United States Patent Application Publication US 2011/0014706 A2 - sequence listing, part 48

SEQ ID NO: 147902 - DNA, 2009 bp, Arabidopsis thaliana landsberg
ctaagtatgaactgttcttccattgtagataccaacagcttgacttgaattcttcttcttaatcaatccagaaacgtgaattcgcgaacgcagatcgtatcgaatacgtatacttcggtctgttgatgtcgtaagtcgaaaagagacgagaatctattgaactgaaacacgaattctttgttatgttagagagagagagagagagagagagagagagagagagagagagacattataagataaaccttctagaagtatccttttaacaatttattattttatttccctccctaaaaggtttcaagatttatgttttgaccaaaataattataaaaggtacaaacagaacccaacaattggtgaaaaatcaccaatatgctatttaattctattgaattttacatttttagttcctcttagataattgatctcactaagtataaatgtataatgataataaaaaggaagataataaaaaaaccagaaattggaatggagcatctatcaaatagaaaactttaaggggattttaatactttaaaataattttgagggggttaaatgtaaaacgtaaataatataaagaaaccctaataaataagtcgttcattgatcaatcttctccaattcttgcagcatcacttctccgtcgttcctcaccaccgagattcgttcaccggtaagtcttatccctgatattttgctcttcttcccaaccgtatatacccgtatcttcttctttctctgtcgaataaacttggcttttccgacttcgattccttcaattgtaaacaacttcgttgcccgtacaactttttgagtccggtgaaagatcccgtgacggaaaaaactgtagatcaggcaattattatgtctatacatcgatataaaggattgaatcgttcatcttaagtaagtttgacgaaagttgtgatcttttgtgcctattcacatataacgtttcttagctcctatcttttgaaattgagctgattcgatctctacctgaattgcatgtgatcttattttgatataatttactattcaattagaaaatatgatctttctagattgattgcttctttaaagttctcttagacgctggtgttatagctcttgtgtttgtggtctcttctctcttaaatatccaacctcttttggtgtattttctaatctagtttgtgttgactgactgatagagagattgaagcttgactcaatgaggggaaggagctacactccgtcaccacctaggggttatgggaggaggggtcgaagcccaagccctagaggccgatatggaggtcgtagcagggacctcccgaccagtcttttggttcgcaatctacgccatgattgcaggtacatacttttgacttctctattattttcttcagccattgtggatgatgttattgtttgcacacctcttaagcaagaagacttgacacctcttagcatattttggcatgatgttctcttatctttactgtaaaggttttcaaaaagttgacgtcaatgtatcttcatttcttggcttttagcaaattgtaattctcttcttactccttgtccttttcttcaggcaagaagatctcaggaagtcgtttgagcagtttggtcctgtcaaggacatttacctgccaagggattattataccgggtgagcatgttttgtaaataggacaaccaacacttgatttttacttatgttctgattagaaaatatccctattttcacatcttctttcttgatttgtttactacgtttatctgcctttcctttttctttcggtcatctctttgtgtcttctcatggatactagggccttatgagaatcttcttaaaaactgatttcataaattaaatttaggctccatatttttcagatagtaattttctgtgacatgacaatagacagtgagcatacttgtggtcttaaaccactagttttcggtgtcgttaggtggattagtcgtttagaatttagtacctggtgagacctcat

SEQ ID NO: 147903 - DNA, 932 bp, Arabidopsis thaliana landsberg
aggccatattttgataagagaagaagaacccttatagagaaagagaaagagagagacagagagagtggatggatgtcttatagaatgaacaaaacatcctctgtttctcttgtccttgtccctttttccagatcttaaggttttccacattttatcatctgggtcctctccttaatggtgaattctccatctttacaagtttgatgtttttgttcatcaaatctggcgttttttttctcttctatatatattgtctctgctcattttccgtttctcttcccattgattgttctgtttcatttctgttttttttttttcaatagttttgattggatgctttgatgatccattgtcagatttgaagacactcaattcctatttgatcggggactagaatttggattctgtttcagacaaaagtagatttccctgtctctttcccgtttgattttcaataagatgaatctggaggtaaaacattgaacaattcttcataaatctcagaactttgagcttttttgaatcttaaaacacgatcgaagtaaaaaatcgaattgttagatgaaatgggcaatcgtcattttcgcaaatctgatccgtatttgtgagatcggattcattggatcgactttggggttttgcaggagcaaaagatggaatctgcatcggatctgggcaagctcttcattggcgggatttcatgggacacagatgaagaacgactgcaagagtattttggcaagtatggagatttggttgaagctgtgatcatgagagaccgtactaccggacgtgcccgtggctttgggtttatcgtttttgcagatccttctgttgccgagagagtcatcatggacaaacacatcattgatggccgcacggttagtattcttggatccattgcttgacaattcatctaattatcagtcttg

SEQ ID NO: 147904 - DNA, 3304 bp, Arabidopsis thaliana landsberg
atttgggtatacgtagttgccttgtgggaagcaaatcttttaccagaggtttctagtatcatatagaatgtatgaccatggaaaactaaacatgagcttaatggtgtttagatgtctcctattatttcatttgcttaataattctctgtttttttttatatatgatcgctcttttgcttccgatttcctaaaggccaaccattattctcagatagagaaaagaagaaagaatggtgggaagtggagctccacagagaggaagtgcagctgcaactgcaagcatgcgtaggaggaagccgaccagcggtgctggtggaggaggtgcctctggtggtgcagccggatccatgcttcagttctacaccgatgacgcacctggtctcaagatctcccccaatgttgttcttatcatgagcatcggtttcattgctttcgtcgctgtgcttcatgttatgggcaagctctactttgtcaaatgatgacaaagataatagttgaagacaatgccaccctaagtgactgctagtgatccaaatattatacagtggtttcaagttaatgttttaattttgtggtttattaccagagtataaacgatctttcacaattccagtttctttacattcaaattttcaatattcttcacacatattataggcatgagctttttatacatctcacaaatgacaatgagtactattatcacctttttaacttaaaaaaaattcaattgttgatagcataacacactcatagtcaatggtcttgagtgaaataactaatctattaaccataactaatctataaaagtctctggcgtttattgaacaattaagaaatagatgggaaatgttggagataaactaaacttttcagggtcttagttgtcaatctgaaacggggcccgattaaattatactcgggtcattcttttgtccaccgggtttttcttcagaacttgagcgaaggaggtcgcgatattggagagatcttttctaatggcagcgttgggagaatcatcatcctcagagatggacaacgcgaaatcgccggagattcaacaatcttcgccagtgcatccgccggagtatcagaagatcgcaacgacgacggtggaaaatgcggcttcctggatcgatgatgcgttgcgtcaggcgcttgtttaccagaagacgatcacggagacggtggattctaccattgacgcctccaaagctcgattgtctcagattcgagatacttctgtagctcacacgagccaaaccatcgtaagctaactacaacctcctaattttcattggaatccaaagggaatctgaaattcacagcatctactctctatgtcatccgtgtgattgtttatcctctcacgaaatcgaggtttcggtatattataggattctcttcgagacattgcttctgagtataacgtttacgagcaaatggtgtttgggaagatcaaaggtctgctctacctttggtggctacctctatgttgttgtgctttttttctcttagctcatatgtttgtcaatcttgtatgtagatggtgtgaatgttgctgcatctcatccgctaatatcaggcaccttagcttttggagttgggatttttgctctgaaaagtacgttttctggatattcttttaatctccctagagtttcaatcgcctagaatgttatgaactgtagtgattgctcttgtttgtttgcagagaccagaagatttgtatattacaatactgtacgcatgtttgttagtgaagaggtcagtgttgtatacaacatcgttgaattataaattggtctctctgtggttaaatatgttcttgaaacttgacagtatgttttggattcaggctttgctttctagagcagatcttaaagtaaaagagttgcgacaatcaatggatcggcttatagccgagagtgaagagttagaggtacgcctcttcttttgctttaatgagttgatctgttcgacatgaggttgacgtttgtggagaatactgcctatgttatgcgttgaggtagctatattactctctttcggttttgcttcaacatccctttattttgaaataaaatgtgtggcatttatgatgaaaattgaaaggggttaggtttcgaccagagaaatttctatatagccttattcaggggatatggatgaatgcttctactttcgcaggcatatagcctttcacggttgaagtaatttagtgcaaggatattcttgagtctaactctttcttaaccctaggcaatagatatatagatatataccctccaactaatagtcaatggtcttgagtgaaagtagtctattagaaacaggtattggattacggtttttgaattcttaacaatttttaactttcattgcttcagagagttgcaactgtggcagaagaggaattcattagaggaaggatgaaactcaggtttatgatccagacaaattacaacatctgtatattggatttatatatcaacatgaatattatgttaactttcttcatcttcttacacaggcaagcaggcaaacaaatcagaggtgcgatcagctcagcttataagattgaaaagcaagcagcaggtacacctttctgtgctatcatgctacagtttgtgaaaccaaaaatatgcatagaacagaagaagaaaactttcgccgtaacaaagcttatcgacttagaccatgatcattttttatttacaggtttgaaagatgtactaaaagaactgccaacgagagaagcttctcgattccgcactcaagtaagtgttacttgtcttttggctcttataggtagagtataggagctgggatctagagttagaagctgaacttggttggaataaatttaacaaccattttatatacattgtataatggagatatctcaattgttcaacctcagatatcgaagcgtgcttctgaagtgaagcaagagagaaacgctttgacaaaggaagtgaacaagatcagcaattatggtatctccgtatgaggcaaaccaaaccccattttcgagttacgaatttctttactcttgaggttcttctttagatgatggagcaaaattacacaataataatgtctacaacatgattcaaactcttttttttttttttttggtttcgtgtcaaatgctaaagatgtaatctcttgttgtcttcggttttcaagggtttcgttcattggcgatagttagtacttagtaatacaagttcatgatgatgttgtcatgtttaagtctcccatccatgtgggtgtatttttaaatccaattttccctttt

SEQ ID NO: 147905 - DNA, 8017 bp, Arabidopsis thaliana landsberg
gccaaccttcttcctaccacagcaccaacgttgctaatcctcaggatcaagtgtatccgccacagcaaaaacaaggtcagaacaaaccttttgttccctacaaccaaggtttcgttcctaagtagcaattccaggggaactaccagcaaccaccaccacctgggtttgcacctcagcaaaaccaaggtcctgctgctcctgacgctgatatgaaacaaatgctacaacagctgcttcacgggcaagcctctggctccatggagatggcaaagaagatatctgagttacataacaagctggactgtagctacaatgatctcaatgtcaagatggaaacactgaataccaaagtccgttacttagagggacattctgcatcttcttcagctcaaaaacagacaagccaactaccgggcaaagcagttcagaatccaaaagaatatgctcatgctatcaccttgcgtagtggaaaagcacttccaactagggaggaaccaaagacggtcactgaggacagtgaagatcaagatggggaggatctaagtcttgagaaagatcaagctgacaaaccactcgaccagtcactcgagcaaccactcgaccaggcactcgagcaaccactcgaccagtcactcgagcaaccactcgatctaccactcgacagggttactcgaccaaccacccgacctgtcatcccagcagcatcaccaactgctccaaaaccagttgctgtcaaaaacaaagaaaaggtctttgtccctcctccctacaaaccgcagcttccatttcctgggcgtcacaagaaagcgttggcagacaaatatagagctatgtttgccaagaacattaaggaggttgagttgcggatacctcttgttgacgctctagcgctaatcccagactctcacaagtttctgaaagacttgatcgtggagagaattcaagaagtgcaagggatagtattattgagtcacgaatgcagtgctatcatacagaagaagaccattcctaagaagcttattgatcctggttcattcactctaccatcctatttaggtccattggctttcaacagatgcctatgtgatttaggagcatcagtcagtctcatgccactctctattgccataagattggggttcactctatacaaatcttgcaacatatccctaatcctagctgacagatcagtaaggatctttcatggtttactcgaaaacctaccaatcaggattggagctatagagatacccactgactttgtagtcctagagatggatgaagagcccaaggaccctttgatcttgggaagacctttcttagaaactacaggttctatgattgatgtcaagaaagggaagattgatctaaaccttggcaaagactttaggatgacctttgacgtcaaagatgcaatgaagaagcctaccatagaagggaaactcttttggatcgaagaaatggatcatttagctgacgagttactggaagaacttgcagaagaagatcaccttaatagtgctttgaccaaaaatggtgaagacgagattctgcatttggagactttgggataccagaagctattagacttacataaagcgatggaagagtcagaacactttgaggaattgaatggaccagcaaccgaggcaatggcaatgagtgaagaagggtcaacacaagctcaaccttcttactcgagaacatactcgaccaatcactcgagcgcgactgtcagcgactatggggagctgatcattccaacttcagatgactgctctgaactcaaggcaccaaaggtcaatctcaaaccacttcccaaagatttgaggtacgcattctttggtttaaactctacttaccctacgatcattaatgctaagttaaatgatgatgaagtgaacctgttactgtctcaacttagaaagtatgggagagaaattggttattctttgtttgacattaaaggaatttcacctagtttatccaatcataggatccatctttaaaacgaatcatattctagcattgaaccaaaagatgaggttaaatcctaacttgaaagaagtagtgaaaaaaaaaaaattgaaactgcttgatgctggtgtcatctaccctatttctcatagtatttgggtttctctagtacattgtgtccctaaaaaggggggaatgactattgttaaaattgaaaaggatgaattgatcctgactagaactataactgggcatagaatgtgtattgattatagaaagctaaatgctgcatctaggaaagatcattttcctttaccattcattgaccaaatgcttgaacgtttggctaatcatccatattattgctttcttgatggatacagtggtttctttcaaataccaattcaccctaatgatcaagaaaaaaccactttcacgtgtccttatggaacttttgcctataagagaatgccatttggtttatgcaatgctcctgcaacatttcaaaggtgtatgacctctatattttcagacttaatcgaggagatggtggaggttttcatggatgatttttcggtctatggcccctctttctcctcatgtttgttgaatcttggcagggtattgaccaggtgcgaagagacgaatcttgttctcaattgggaaaagtgtcatttcatggtgaaggaaggcatagtgttgggtcacaagatatcagagaagggtatagaggttgacaaaggaaaagttgaagtggtgatgcagttgcagccaccaaaaacggtgaaggacatcagaagtttccttggtcatgctgggttctacagaatatttattaaagacttctccaagatagccaggccgttaaccagactattgtgcaaggaaaccgaatttgaattcgatgaggactgcctcaaatcctttcaaaccatcaaggatgctttggtatctgctccggttgttcgagcgcctaattgggactatccatttgagattatgtgtgatatatcagattacgcagtaggagctgttttaggccataaaatagacaagaagctccatgtcatatattacgccagccgaacgttggaggaaactcaaggaagatatgcaacaactgagaaggagcttctagctgttgtattcgcatttgagaagttcaaaagctatttggttggatcaaaggtcactgtctatacagaccatgcaactttgaggtatctgtatgccaagatggatacaaaaccaagaatgttgagatggatacttctattacaagagtttgacatggggatagtagataagaaaggcattaaaaatggtgcagttgaccatctgttaaggatgagaattgaagaacccatttcgatagacgatttaatgccaaaagagaagctcatggttgtagaattttttggaaggagctacagagggaaagaggtcgaccaactgaatgttgttgaaggaggatctccatggtatgctgatcacatcaattacttggcatgcggagtaaagcctcccaacctgaccagttatgaaaggaagaagttttttagagacatacaccattactactgggatgagccttatctttacactctttgtaaagataacatctacaggagatgtgtcttagaagatgaagtggaaggtatcctgctgcattgccatggctcagcatatggtggtcacttcgcgacgttcatgacagtgtccaagattcttcaagtaggcttttggtggccaacaatgtttaaggacgctcaagagtttgtttcaaagtgtgattcatgcaagagaaaaggcaatatcagcagaagaaatgagatgcctcagaatccaatcttggaagttgagatctttgatgtatgggggattgattttatgggtccattcccatcttcatacggtaacaagtatatactggtcgtcgtaaactacgtatcaaagtgggttgaagctattgctagtcctaccaccgatgcaaaagttgtgctgaagctattcaagaccataatcttcccgagatgtggagtttcttgggtagtaatcagtgatggtgggaagcatttcatcaacaagggtttttgagaacctcctgaagaagcatggagtaaagcacaaggtcaccactccctatcatccacagacgagcgggcaggttgaaatctccaatagggagataaaaacaattctggaaaagactgttgggattacaaggaaagactggtctgcaaagctagatgatgcattatgggattataggacagccttcaagacccccattggtacaactgctttcaatcttctctatggaaaatcatgtcacctacctgttgagctcgagtacaaagcaatgtgggcggtaaaacttctgaactttgacataaaaactgctgaggagaagcgattgatccaactcagtgacctcgatgagatccgtctagaagcttatgatagctctaaaatctacaaggagagaaccaagcttttccatgacaagaagttcatcactaaggatttccaggttggtgatcaggtgctgctgttcaactctctcttgaaattctttccaggaaaacttaaatccagatggtctgcccccttctgtatcactgaggtccgtccttatggagcagtcactctagctggtaagagtggagacttcacagtaaatggtcaaaggctcaagaaatacttagcagatcaaatccttccagacgtgacatcggttcatctccaggaacttcttgatgattaaaggagtaaaggagtcgaggtaatgactttaaacaagctcacttgggaggaaaccctaagactatctctgtaaataaatttttcttttcttgttatttttgatttgtcttagttgtgtttgtggttctcagggacaagggaacaacgaggagatagaataaaaattcaaaagttttactctacagaagacctggagatcgagtgtatagcctggtggagtacaaaattttgaaagttttatgttgcatctgaagacccggaattcaagtacatcagtcgagtatacgtgatgtttaaaattcataattttttaaaacatcactgtactcgaccaacaggagctacagagacttgcagggatttcctgctgtttatagtagattttctacaagttttctcagtcaacagagtgtggaccacgcgctgaggataagctggagagagaatctaaaagtcaacctcagccactctttttgaaacttcactcgacttcacagaatccactcgacctatcaccacttcacctcaccaccgacactccaatttctctacaccacgaatcgccgtccaaagatctactcgatccagaccacttcacttgattccgtcccaatactcgaccaattcatccacatcaaccgccgtctcttataaaagaagtttctcgacttagattccctgtcttgtagctcactcgacctccgagaatcactcgaccatccctgcgctgccgcaatcgagtactcctcctctttcaccgtcgaagtcttagagtccactcgattacgacaacggaactcgaccacaagcactcgttcgacctcgagaattcactcgacccctgcaacagtaactcgacttcttgttcttgaattcaacaaagcctattgacatttgagctttgagttctaaatttctacaggggaatcatgagcattatagtggcagttcttctgttgatcccgactacaacatggatgaaacagagtcgtcatcttcaaggccagagagagaacagagagaatatgatagcttcagaagaaaagctgagatagcccgagggaagagagcgatgacagagaggtatgagcttatagatgaggatctggaagacgagtacatgcctgagcatactcgcagagccaccaaacttctgaacaaacccgatgtattgcctactgaggaatatattaggctcttcaagctgaatgagttctgtagcacgaggtatccttactcgaccacacttgcacaactcggattgttggaagatgttcagcacctgtaccagagttgtcatctgcacactctgatggcttatccgtatgtatcatatgaagatgagacaattcaattcctctccacgctgcaagtggagctctaccaaggtatgacctctgatgatttggaatgcgaaggattgggattcttgcaattctctatgtttggtttcccaagtggaacaggtactaagcccaagtatgacagagaagagttgaaagacatatggatcaccattggcagctctgtaccgctgaattcttctatatcgaagagcaatcagatacgcagtccagtcatcaggtacttccaacgttctatagccaatgtcctctgctccgagagatcacagggactgttaccaattcgaatatggagatcatcactatggctctcaaaggcactctccgccaaactaagaacaatatgtctctcgaaggtgaaatcaatggcacgtctctatactatcatacaacagatccgcctgtgtggatacaagagctgggctgtcagcaatagccacaagagagcgctaggcgctttgtgcataggtggtgttatgacaccgattttgatagcttgtggagtcccaatcatttctgatggactcgagccgcgagcaatggatatcgagcacctacgtcactgagaattcctggagtttgcaatggttgacgacttgcacaggttcaggtttgagcactctacagacaagagagctaacatccttctccctagccctaaggttacacggataatagagggagataacattgattttcagcctgaggttggacgcctctactatgagaacgctctgccattggatgaggatgatcttctagaagaagctgctttggatgggatggatgaagacagagcagtggagttcgacactagcatgtatcactttggtgaacaagagcttgagtgaagctcataagaacaacagtaaactgtagaagtggtgcaagaagcagaacaagctgctcgccaagtgtttcaagactctcaagtttcagtaacagtccactgctattccacagggacagcctcctctggagatgccatcgaggagatttgatgagcctgagcacaggcgtgagcttagcgagcagagagtctcacatgtcccggctaggcattcgtcattcgagtcccgggagcacaagagaagaaggaaggctacactcactcgatctagcagcagatcacgcctcattcactcgaggaggtcactcgaccgcggtgctggccgcagcaaaaggagagaggtcgagtatcctcagagcggtgctgaccgccacagacctgatgaggtcgagtacccacatgctggagctgatacaaaacaaggcggtttgtctatggcctgggagaaatcacaggcagccattgacgagcaactacgttcattcttcgactgaggtaagcgcctcacttcaccattgtattatatcatctgttgtgatttgtttcttcattttgtttctgtgattggatttgtcctgagtactcttttccaagtttattcgcacagtggactgtgtgatttaagtttgggggagagctcaggaagtgtgtgttgcattgtatatattcttgaatctgcattcatctaaggcatagaaaaaacaaaaatatttgaaaaatttcagaaaatgatttcacaaaaaaggagtgttcatgtagttgcattacatttaggatcgagtctagagtgtttcatctaggattgttgcatatgcataggggatgatgatgagatagccttgtaagcattttgattcaccggataaactcagttcttaacccgtcccaatacttcgtcgttttgagtattagggttttcgggatatttggctataagtagcatgtacttctcattttcgcagacaagaagtttttatctagttttattccgcagaccttgtgttctagaccgtttgtaatccggatttctctttatctattcagtattcagtatacagct

SEQ ID NO: 147906 - DNA, 510 bp, Arabidopsis thaliana landsberg
cgtgaaagattgaagaaactgttggagaagacaaagaaacagaaagacaagcttgaatcactttgcagatcccttcaagctgaaagaaaacagaaagaaactaacagtgctgattctgctgttcaaccatgaaacagagagagactatgaattcagtgatttgctctcttttttttctttgtcagagttttgaactaattagcacttcagattacaaaactacaattagactccaaattcactttaaaatgtagaaacatatcacatcatattgattctgctcttttgcgagctaagtccattttatctcacaaaatgcaaattgataatagttaattcagctgcagcttctgcaaatctccaggttcacaagagaatgattctgcattcactaagttcacaaccgatttggagaagaatagctacttcaacatctgccataatgaccagctgattctttgcaatcttaaaccaaaccgaaccgaaccatttgaaccgaagaaaagttaa

SEQ ID NO: 147907 - DNA, 1676 bp, Arabidopsis thaliana landsberg
  unsure (1)..(1676): unsure at all n locations
agaaacataccaaccgtttagccgctgaacacagtccttatcttcttcaacacgcgcataatccggtgattactctctttaataaaagtattcgtctttagataaaattgataagagaagaacacctttcgtttcaattagggagctttcttgcaatttgctaagtcacaactggtttagattgtagctaaccggttcttagtttaaaagtttggaactttttttattatctagattgatttcatggtttatgtgaaaaaggttgattggtacccatggggagaagaagcttttgaagaagcaaggaagagagacgtgcccatcttcttatcaagttgtttactttatcctcttttgatcgttttaattactgcttgattagattccattaatgacttttagttttgtgaaactaatttggttcctttttgttttcaaaatctcttttatatggaatcttgaagttggatacagtacctgtcactggtgagactttcaattgttttcttggatttgagtttgacttcttctttttactgaattggaggattaagagaatgaatgacagattaaaagactctggatttgttagtatcattactcttctctcctcataggtgtaattctaatgaaggatctaaggattttataaattgaaagtggagaaaacttgtagcctaagaactcagtgtaattgtttgagatgtcaagagtagagagcagagaagcttattttactatcttgaaatgtaagtttaagtacagttaactcttttgttaggtgccatgtcatggaagttgagtcatttgaagataaaaagtggcaaaactcttgaacaattcattcgttagtatcaaggttagcgtttaacacggaaaaacgttttaaagcacagtcttcgaactggttactgttgaaacatgttagtaacatgtctatgcaacaggttgatcgagaagagcggcctgatgtcgacaaggtaaactactttctgcactctttgatgtcttgaataaattgctcaaaactcaaattttcatttatttctctgaatgcttagtttcagaagtatcttttctttttggctcaatcatgttgtgggtcatattaatagcttcttttactttgttggagaatatttgtgtcttcggtaactctagtaagagatgcaaaaccttagaaaccatagtagacttgtgtagaatttgttctagctggatcagtgtctactagagaaagtagccttgactatattcatggacttacgattctttttactggcactttaggtttatatgtcgttcgtccaggctctgtatggtggaggagggtggccactgtcggtattcctttcacctgatttaaagccgttgatgggtggaacctactttcctccaaatgacaattatggacgaccaggattcanaactctccttaagtaagtaaaccctttttctcttattgtagaatcaaacgctcttggcgaagactatagttgattcgtttatgttctccatgttttctttgggtttggttcaggaaggtgaaagatgcgtggaacagtaagagggatactctagtgaagagtggtacatatgctatcgaagaactctctaaagctttatctgcaagtactggagctgataaattgtcagatgggatttctcgggaggct

SEQ ID NO: 147908 - DNA, 3693 bp, Arabidopsis thaliana landsberg
ccctaaaacctaataccgaagtaaactcgtcaaccactgcgcccatgacctcccaacgatactcttcccttatattcttcctcttccttcttcctttctgcgatccaaaccttcaaacacatctccggtagatatgaaaatccactcttgcctctccgccattcttctgttcctcttcttctctgcttcttccgctaaacaaaatgttcggacagagcgaatttcaggtacttgttcttcttgctccagcagattggaatgtagagttgaattgattaatccttgagggtcgctcaaataagtttgaaatccgtcgtttctccagcatttggtttatagacatataatttgatttgcttaagaagtcaatgctattgattgaggaactatgtaacagctgtgtaagagagctcaaaaaggtgtgtttttgaaatgcaggaagtgctggtgatgttttggaggatgatccagtgggaaagcttaaggtttatgtatatgagcttccaagcaagtacaacaagaaattactgcaaaaggatcctcgatgtcttacacacatgtttgctgctgagatttttatgcacaggttccttttatctagtcctgttcgaacgcgtaatcctgatgaagctgattggttttacacgccaatttatcctacttgcgacctcactcctaccggcttgccattaccgtttaaatcgccgcgtatgatgagaagttcgatacaactaatctcatcaaattggccttattggaatcggactgaaggagctgatcacttctttgttgtgccccatgactttggagcttgctttcattatcaggtagattatctctgcattcaggaacaaactctattttttatatgcattgaatactttggtggttgctgttcatcaagaataccctgtgatcttacaatgatagatgatcattagcttaaaattagctgttgtatcatcacattagtacttagttacatggaaactgagaatctgtttatgagtttattgtataagattgtggaatattccaatgatttgtgtgggaattgaagatttgattgacattaaacaggaggaaaaagccattgaaagagggatacttccactactccagcgtgccactttggttcagacatttggtcaaaggaaccatgtctgtttggacgaaggctcgatcactattcctccttttgcacctgcacagaagatgcaggcccattttattcctccagatattccacgctctatctttgtctacttccgcggtttattttatgatgttaacaacgaccccgaaggtggatattatgcaaggtacatattttgtagacttgtaaaactctcaagtgatgagttttctctagtcttacatagatttttcaaccaaaatggaactgcaaactctatagtatcatacaataaaagaagcacatatacatcaagatctacctattaagataacaattaagcattcctcattaggaagttaggttatatataaggttagctaagatcaaattgttttagaatctgctgactggaacttctctctttgtatagaggtgcaagagcagcggtgtgggagaacttcaagaacaaccctttgtttgacatctcaacagatcacccgacaacatactacgaagacatgcagagagccatcttctgtctatgtcctctaggatgggctccatggagccctaggttagttgaagcagttgtgtttgggtgcattccagttatcatagcagacgacatagtactgcctttcgcagacgccatcccctgggaagaaataggagtctatgttgcggaaaaagacgtccctgaactagacacgatcctaacctcaataccaacagaagtgatcctcagaaaacacagactcctcgcaaatccttcgatgaaaagagaaatgctttccccttaacctgcacaaccaggggatgcattccatcagatacttaacgggctagctcggaagttaccccacgacaaaagcatatacttgaagacaggtgagaaggcactgaactggactgctggtccggttgctgacctgaaaccttggtaaagtcagaaagagaggaatctttttgtatatcttgggtttcacctagagcatacgttgttgcctttctatagcacttcaaaaacattagaagtccaagtcctccgagtggattttttttgtagataacattagtacatttactcgaggtacatgtaccaagtttgttgtacattttctcttcgattgatcatataatactgtacactccttttgtcttggctaactccaatcatgtaagtttcaatgtccaataacctgaaaagttatgaaaacatgtggtaattaattttgttgtgaatcaaattagaatccttattaaaaaagaaaattatttattcaaaaaaagctcgtagatgaaatgggcctaaagtctactaaatgggctgattgaaggaaaaactcgaactaatctaagatctttgctcttgagagagaacgagagaggcggccatgggaggaggaatgggtgcgttttggggaactcgagtgatggaattagtgaagaagcacgattccggtggtcttctttggaagcggatcaagctaacccctactcgtaaagccaatgccaaaacccgcctccgtcgtgtttggcaggtactctcctattccatttttagggtttatgggtttttgagagaacatttctcttttcgtagtctagatcctcttatctgcgttcacttccctagaattacccgccaaggatagattaggattgaatgtattgatggatttttcgtgttgaaagtattgatggattcatttcaagatcatcagtttcgattgcaaaatgttgttcagtctattgtgatgtgctctccttaggtctgagtagatgtaatgagttaggacaaggccaactgtgtagtttgttcttggtatatggcctttaggcttctatgtatgtttctgtggaactaggaacagagtaggaacacttggaattcatttttcccggtttggtgtttggtatcatgcaaaggttgtccatctctcaatatgcttgtgttattttcgagctattttgggctatcttgtgcatcacagtgtgttatacattttttggtaaagcttgtcgatctaccaagatgtatgtggtgattttgagctcataccacctaggaatttataaatattataagacctaaccctcctatatattcttcgacgcaagtattgttttaatagttatgagagtctcttgcagaatgaggctgttctaagggcgtgtggtgaatcagatgcaccaaatccgccgggagctagcaacacaaaaagctctagcaatgcggtgaaaaatgcgtaaggccgaagagaagctagtcctagtttgtaaggactcgtagatcaagtctctgtcgttacctgattttacaaaaataatatttgaaccttgtgtttggttattagttttgcaaaagaagaggcacctccacaccaaagcaaaatatggtatttgagtattggtggtttttttttattattcttgtcatcaagaaatttgttcgtcgcctgctcaatatagttcttttggctacacccgtttatccttgtcgtgccttagttatgttggccgttcagtggctacaagtggatatgtttgtgaag

SEQ ID NO: 147909 - DNA, 2471 bp, Arabidopsis thaliana landsberg
atggatgaatatgtagaggatgaacacgaattcagctacgaatggaaccaagagaacgggccagcgaaatggggaaagctaagaccggaatggaaaatgtgcggaaaaggagaaatgcaatcgcctattgatcttatgaacaaaagagttagacttgttactcatcttaaaaagcttactagacactacaaaccttgtaacgccactctcaaaaatagaggccatgatatgatggtatcaattattacccattctcatacatttctctcatttataaggttcaaaatttttacatactttatactaattttgtggcagctgaaatttggagaagaagggtcagggagtattacggtcaatggaactgagtataaactcttacagcttcattggcattctccctctgaacatactatgaatggaagaaggtgtgcaacattctataactatttttatatacatgaaatgtttataaaaatttgatatactacttttatcaacaaaagggagtagatacattaaattgatatgatggcatataaaaatttaattaaatttgacataaaattctaatcattattaatgtactttatatttatagacaaaataatttaatcaaaaaaataaattttttcataaagcgaaaaccactttaccggttaaatatttataacaaaattttgctctcatttactcttgattataaccctctcaatgtacatatccttacttgagtatgaaatgaaattatataattcaaaagttttttaaagtccactatttttttagtaccataacaattgtgtattattttcatatttttattaaaagcaggtcatattttggttctgtttgttaccaactaaaattcatctctataaatataaatttggacctaatcaagatttaagcaataccataattgttgggaccaatatcaatactataacttaatataatacaaactagctttattctaaagataatttagaaacttttaaaaaacatctcatatgagtaaaaaataactcatctcatatgacttgaactaattatcaaaaaaaatctcatatgaattaaactacgaaaaataaaaaatataatatagatacaagaaaagttgttttccgttgcgagtacttagtatacatcaagacgacaagactttataatttaaactttttgcattaaaaatcgttgatgctatttaaaaggttagctgttttttttagtaagtacttagttcacatcaagactttaattgaaacttattacaattatgaatatctagataataaaagaatagttttgctatttttgattatttgtagaaagaatatatattacaaacttaagatgtcgaaaccatacttttaatctatctctgaaccataaaactttgtagatatagaaaacaaaatgttctttcttgtgttgataattgtttgatattggagccatttatacctacaagaaaatcttatagaccaaaaatacattaacatatacacaacacattttgaggcattaacagacccaggccatgttaataacattttatgttattctatggattcgcagatcaagataaattgaaaactgccatttttagtctagtttaggattctcctatttaaatatgaaaaatgatggcataaataattcctacaaaaaaaaatccaattttaatagttttaattatagtgttgaatttatatatattatctatttgatctaaatgtttaattgacacattatttcttaatctagttacttaaaagttatgctatttgtcgaggtttaaaaaaaaaattaacttttgataaattaatggcatagaatcttatagtatgcaaattaaaagttactttcaatttttacattccagttaatatatatagagtatatggtaaataataaatggcaggtttgctctcgagctacacatggttcacgaaaacattaacggaagtttggctgtagtcacagtcctctacaaaatcggaaggccagattcttttctcggattggtataaatcgctagaactattagttattaagcttttaaattttataaataattaattattatcttaactaatcttgatcttttttattttttatttttttggttagctggaaaataaattgtcggcaattacagatcaaaatgaggcggagaaatatgtagatgtgattgacccaagggatattaagattgggagcagaaaattttatagatacattggatcacttactactcctccttgtacgcaaaatgttatttggaccgtcgttaaaaaggtaaatactcatcgctattatcttctcttttttacttaatcaaacatagcattaatagatcattacaaggtactaatagtgtgaatatgcatatccaaaaagtttatccatctacatgttaactaggtctatttttccaattttaaattttgactttttattttaaa

SEQ ID NO: 147910 - DNA, 1371 bp, Arabidopsis thaliana landsberg
atgggccagttttattttagggcccataaaagtcgggtcggatcctcttcaaaatgtggattcggttcagcgattctcttctcggtagttctcaaaaacaaagagcagcggcagagacgtctgagtagaacctgggatccaggttcagttattttaccattataccccttgaactcgtcttcttcgtcaaggtaatcttcggttcagatggaattcgtagaaatctagattttaatttgcttaattgccaatagttgatggatttttgcggttttgcgaatccgaggctcgcggtggtgagattttcgtctttgaatttagagttctcgggtctgcttagttcctttaagttccagagatgatgaagaaaaatctattttggattaagctcaaatatgaactctgtaattcattatagcacaagtgttgcggttcgtaaagcttctcgctttctcttcacatcgaggaaattttgcaatggtagcatcggtggtgatgtaagcgagaatgggacggaagagcccttgaagataacttgggaatcttcggagatggattgtgagtttgaccaggaggaaaatggtgagaaaatctctgttagaagaaggtttatggagagtactacactcggtgcgtctcgggttcttgatacgttacagcaagattgtcccggtttcaatacgaaatcagctttagatgaattgaatgttacaatctcagggctattagtgagagaggttcttgttgggatcttaagaactctgagctttgataataaaacaaggtgtgctaagctcgcttacaagttctttgtgtggtgtggtggacaagagaatttcaggcacactgcgaattgttatcatttacttatgaagatatttgctgaatgtggtgagtataaagccatgtgcaggctaattgatgagatgatcaaagacggttatccaacaacagcatgcacgtttaatctattgatatgtacttgcggggaagcaggccttgctagagatgttgttgagcagttcatcaagtcgaaaactttcaattaccgaccttataaacactcttacaatgccattttgcattctttgctaggggtgaaacagtacaagctgattgattgggtttacgagcagatgttagaagacgggtttacgccagatgttctgacttacaacattgtaatgtttgcaaactttaggttagggaaaacagatcggctttatagattgctagatgaaatggttaaagacgggttttctcctgatttgtatacatacaacatcctcctccatcatctagcaacaggaaacaagcctctcgctgctcttaaccttctgaatcatatgagggaagtaggagttgagcccg

SEQ ID NO: 147911 - DNA, 410 bp, Arabidopsis thaliana landsberg
tcatgatcatgagggggattcacaagtagagtctagagaaaagagagaatgggtaagaacaataccaaattccttatgcaatttgcaacttttgcaatggttttaacctttgcgatgatggtcaaagaagctacaagcatgtccatttgtgacatggacataaatgatatgcagaaatgtcgcccagccatcactggaaacaatcccccacctcccgtcaatgattgctgcgtagtggttcggaaagctaatttcgaatgcttatgcagatttaagttttatctcccaattttacgaattgatccatctaaagtcgtggctcttgtagctaaatgtggtgttacaacagtccctcgttcttgccaaggtattttcatgtgattttgaatttgtagtaagatcttgagagt

SEQ ID NO: 147912 - DNA, 607 bp, Arabidopsis thaliana landsberg
gagaaaatgggtaagaactggttaacatgtgtctccgtggcttgtttatctccagggaaagacaaaaagaatcaagttggtgtttcgaatctgttctctaattattgattatgattatgtaacctgattatgaaatcaagattgctaattgttttgattttggtcttttggttttgccttgtttatcaagaaacccgagaaaccgaagaggaaatggtcgtttgggaaacaaaagagtagagaatcttttgatttccctctggaggagactccaccggttgacccttcaccttcttctgttcatcgtccatatccaccgcctcccccgttgccggattttgctcctcagccgttgttaccaccaccgtctccacctcctcctcctccggcatataccatcaatacaagaatctatggtgagtctaaagaatcaaagaatagacaagctttagctcttgcatcggctgttgcagccgaagcagctgtggtagctgcacatgctgccgcggaggttatacgtctcacgaccccatcaacacctcaaattgaggaatcaaaggaggaaactgccgcaatcaagatccaaaatgcgtatagatgttacacg

SEQ ID NO: 147913 - DNA, 662 bp, Arabidopsis thaliana landsberg
gtccaaccacagtcactgttgcctttgtacgtgctgacaaatcaatgacatcatttttgttttgactcgttttaggcgaagcaccaggaacaaaaccatttacaggtcccggcagagaatctgatgttttagatggaacactggctacagaagataatcgtgcatcatggttacatggtgttggaccagaagcagaatctgtatcagaaagtgccagttctggttctgtagtagaagcagcagcattaccttcactggtctctgtattggtcctggaaggttcttttttctgatgagtttgttcaacctccatgtccttcagcgatttcatcaccgcttccatcagcatctgaggccaagaagatatgtgaataaacgaatttatagagcttggtcataaggagagttcaaagtgcaaaatccactttttttactctcaccctctcttcttcctctgcatttgatggaaaatctgccagctcatctacgtgaaactccacatattgatcatcatctaaagctactgcgagatgaggaggatatggatctccattcgacaaatcaaaactgatcatatcagaagatgaactactggagacttcaagactctctttttcctgaaataagtccatatcatgcaacatcaggaacaatctacccat

SEQ ID NO: 147914 - DNA, 348 bp, Arabidopsis thaliana landsberg
ctcgaaaaaggacgatactccggcgagcttaaaggcctcagaggcagtgagagtctcaccagagggacccacggctttggagttgggacggccagtgagaagtccggcgatgtaagagagaggaacaaggtcaccggaggcggtgatggtgccacggagagggaggcacggagtgatttcgtggttgagaagctttgtaattgcttcgagaatctcgaagcgtataccggagtagccttggaggagagtgttgacacggacgagcattgccgctcttgttgtcggctttggcaacgtgtgtgacgtgtccccggcgccggtgccaaatattccggcattcaagaacct

SEQ ID NO: 147915 - DNA, 312 bp, Arabidopsis thaliana landsberg
aaacattctgtgtgggaagaattgatgagtcaattccatctgatgattgttcacttctttttttttcttttcttctctaattggccagtttgtggttctgataagtcggaattacatagactctggcagagatgagcctcaattagtagctttcttcgaattctgtttgtatttgtgaccctgatgtttgtttgtttcgatttggtttgacccttatagaactgttatagccattttgtagccaaaacttggagtagttcacgacttaacgtggttaacacttgcttctttcgaaaaaaggtgaatccttaa

SEQ ID NO: 147916 - DNA, 902 bp, Arabidopsis thaliana landsberg
atcgatgtttcttgatctgttcactgagagccatagctatctgcgtgccttttcttcatctcctgtggttcctcttgccattgcgcgtggatggagtgagtcttccagtcctaacgtccgtggcccgccagctcttgtttttgatttctctcagcttgaagcaaagctcaaatccggctacaaagctacaacagctgggaaactatctgaggctcttcgcgtcttcctctctattctccaaaccatcccattggtggtagttgagtcaagaagagaagtagatgaggttaaggaactggtcatcattgttaaagaatatgtcctcggtcttcaattggagctcaagaggagagagatgaaagatgatccggtgaggcagcaagagctcgctgcttacttcactcactgtaaacttcaaacacctcacctacggctcgcgtacttcagtgcaatgaccgtctgctacaagtcaaagaacatggctactgctgctcacttcgccagaagtttgttggatacaaacccaactattgagagccaggccaggacggctagacaagttatgcaagcagctgaacgcaacatgacagatgcaacaacactcaactacgactttagaaacccgtttgtgatatgcgggtccacttatgtgccaatctacaaaggacagaaagacgttgcatgtccttactgcactgcccggtttgtaccaagccaggaaggtaacatttgctcggtctgtgatcttgcagtcattggcgcagacgcatctggcttgctatgctctgcctctcaagtccggtgaacaagtcagaatgattatgtgcttcaatcgtgaggtaagtacgagatgctcttttatggaagaagagtgttgagcttttggtgtttgtgaaattccg

SEQ ID NO: 147917 - DNA, 1339 bp, Arabidopsis thaliana landsberg
gtgtgaaggcgttaatttcagctattgatgggagtctggagtcagttgagatgaatgatactgatgcacaggaagctgccattgatgcacttggtcagatgggatcaagtaagtgggtcacttttctttgaaactttgtttgttgcagtcgtcttctaaaagagatagctagagaggccatacatttagaattatgaattataagagcatccgacaagatattcgtttcccatgcaatgatcttgtaacttatatggatatttttacaataatcttagcaacgaagggagcggatcttgtcctttcaacttcacctccagctgcaagacatgttgtagcttctgcctttgatcgtaatgcacatggaaaacagttggttagtgtgtttttgcttctcatcaattgaaattctgccgattatatgctcttactacatttttgaagatccaatttttccagttttaggatttctaattctaactattgagggttgaaattttgcttcattagtagagacattcatgaaattatatgattgtttcgtaaatggcatgtgcaggctgcactgcatgcactggcaaacatcgcaggtgaaacacgacctaagagcaacagaatagttgatggaaaagctgaagaaagccttagatgtttgatatacgacgctgcagcacagagcacaaaactaaccccatccgtaagttcgtttcctcttttacttattcttctctcagaagtgtgcagattacatatttttgtttgatccgtagcatgagctaatttaagcatgtcgcacaaattgcagggtttattcctctcagttcttcaacaaagctcagagattcgtcttgcggtaaacctttaactcagcatctgatctatcatatcttctccccctttgtttctctagttggaaatttcaaaatgacacactacatttcattcaaaattaagaaatctcttttgtccttctacacaaaactcggatacatgtcactcatttgatctcacataagaccttcacgcattgcctagaggtaactatgttttttgcttatagtatattgtttacaatgttgtttgcagggttatcgaacgttaacagcattagtggctcggccatggtgcctggtggaaatcttggccaaagaagagataataaacatagttacggatgcaaccactgaaactgcaaaaataggtaaaccaagtaacattcctcgcatcacccacactccagccattgtattggcttcttcctccctcaacctctttgatctacgagtctaatctcattttttttttactcagcaatggagcaaggtataactgctgcaag

SEQ ID NO: 147918 - DNA, 958 bp, Arabidopsis thaliana landsberg
ctctaatcgttagttttttttttgttcgtagttgaagaaaagagagctttgacgaaaaaatcatcctttagaatggcaaagactgatgtggatgatgagtatggtatgtgttttagcaatatgattttttttatgaatatcgtcaaaaacgtccccactatcccgtccacaaatgattaaggttttcgagatatgttaatagatactatacccgtttgtttgtttttgtgttttagtaatatacttctctttttcagctaatttaatgtgaaatttcttatttttctcaggtcttaaaccctctgagttatatggaaaaaatacatggaagattaagaaattttcacaaatcagcaaaagggagttcgctagcagtgtttttgaaattggaggctacagttggtacatggcatgcatatctttctcatctttaatttttgtctcaaaaaaactctggaaatggttttgaaggctttgtgttgttacttttatcttcaatgtgtcaggcatattttaatgtatccagaaggatgtgatgttagcaatcatctctcattatttctctgtgttgcaaaccatgatgaacttcttccaggtttgtatttttttccactggtctgcttggtccttgttttctttctctggatacttagtgatatatattcttttgctatcttggacaccaggctggagtcagttggctcagtttactatatctgtgatgcataaagatccaaagaaatcaaagttttcaggtgatttttcgaatctttaattgcttgcttccatttgaatatgcagacaactgaattcatgatcttgtagacacgctgcaccggttttggaagaaagagcatgattggggatggaaaaagtttatggagttgcctaagttaaaagacgggttcatagatgagtctggctgtcttacaattgaggctaaagttcaggtgatcag

SEQ ID NO: 147919 - DNA, 475 bp, Arabidopsis thaliana landsberg; identical to SEQ ID NO: 33931

SEQ ID NO: 147920 - DNA, 1565 bp, Arabidopsis thaliana landsberg
catcaatgggagtttttataaaacaaattgcatcttaaggttgttattgttgttgtcgttaatctgtcggtaatcatctttctatctgctgtgtgatacatctacgattcttatgctgtcttttgggttttcttacacaaccaaaaccaaagcctagttttgttttgacttcatttgaagcaaacctctttctttcttcagttatgtgggtttttgagctagactcgaatcagttctgatccagtcggattttgtattgagtcataaagaagggatttttgggggttgtgagtgatatgaagaagcgggaacatttgggattagggttcttcgagtggcagattatcttatggtcatcgatttggttggcgatttcgcaacaagcgctgggattgagacctattagggagaaacctcgatcatggagtgacaaggtatgtgtgttgtgtttttactttattgatgattgttcgaaagtttcttcatctcgatgtttcccagaaacatatttttatgttttgttcgtaattttgatgtgcctttccaactaagaattcgagcagtttgctgtcaaatgttttttttattgacttgtttctgctcatgatttgctgaacgagaactggtcataattgatgattttttttctaagtctgagattttctgagtttcgaagaaaatggaccatattgaatgaaaatcccggagtagagcagctctgatctaagttttatcttttgatttgattgagcaaagctgaaaatgtatataaactatttacattagctcgattgagctcatcggtatctaagctttgttctgccggcgaatactttgagatgaataagaatgaatctgtcgttagtagtgtggtgtgatgagactacaataatggagtctatggtacatagagaccggttagttgttacagaagtagaacgcgtgatagtggggaatcttcgatgacattttacagtttgggtttgtagctagtgacttttaagtagactgtgcaaagggaactcatgtacgttagattgaccaggcaatgtttgggtaatggtttaatacgtgaggtctttgtgatcttgcagtggctctttggtaggaaacaagaagctgaagttggacccttttatgcttggaatataacaggaacttatagaggtttgccgcatgcccttctccatttttttttacgtcttttacacttcaggattgtctacgatgttgtgggtatatgtctgtagcttaatgttttagactacttatcaaatgtaaagcgggtattttcaggaacttggaagtttctgaattccttaaatagctcttcgaagtttcaagactttcaaaaagaaaatggtaattctgtggttgagttagtagcagttccaacgaagataactggtgtgcattatgttcaggtaaagagttcagcttctaagctctgtatcataggatcaccgttgatgttgtagaatgcaatgttttgaacttatacaacgttaatgaaacagggtgtagttgttttccatgacgtatttgacaatgaacaaaatgtgggt

SEQ ID NO: 147921 - DNA, 309 bp, Arabidopsis thaliana landsberg
tagtcaaattctttgctcagcgggacggggaagctggacgatggagctaggtcagaatctttgcaaaatgaaatgatgaggcatgtgtttttgcaacccattattggtttatgcaaatcatgatctctttatgctcttgttggttttcttggtactttttatagcagcaggaggttgagcttgaagtccgtagcgtgagcgaggtctccgcaattgaaatgagaacaggaagtcaagaaaaaggaaaataaaaaataaataacaaaaatcagagcaaccctagtgtgtttgctttggacgaccggcagc

SEQ ID NO: 147922 - DNA, 2261 bp, Arabidopsis thaliana landsberg
attacttgtgtgtataattttattttattttgcaaacgagaagaagccagaatcaagtcgttaacccatgcctttcaattacccaatcacctaagatattttttttatattacttcctttgacaagttaatccacttccaaatatactataaagttgcacattgacaagaggttttagcagaagctagaagaagaaaggagaagaagaaacaaagagagaagatgaagaatgttatgctgattattgacgagagcaacgcaagttatgatttactcatttgggcacttgaaaaccaaaaagataccattgagagctccaaagtttttatctttgcaacacaaccacaaaattcctttactcctcctaccgtactttcttcatcagtcggctttgctcaaattttctatccattttcacctagtaagtcattttatcgactaatttgttgggagttttcaaataaacatcaaaaattctatccattttcacttagtaagtcttttgttgaaacttgatcagtttttatgtgtgttttgcagattcagaactcataagattggctcaagaaaagaatatgaaaattgctttgggtatattagagaaagccaagaagatatgtttaaatcatggggtaataatctattgactgaatcatttaacccgttattaatacaatatcatatatatatttttaaataccaaagttttaaaagaaaaaaatgaagttcttgttgggacaaccattgttgcaatattttagtctcatgatctaatcataatcatgttgaaaacagatcaaggcagagacaattactgatgttggagaccctaaagatctaatccgaagataattaagaacgaaatatcaatttaatagttacgagcgatcaacaagtctcaaaaagtaagaacatcttttaatttcaaatatcagttaaaaaaacttagtattgatggaaaacttgagataacgtacatcttttaattaaatgcaggtgtacacaaaatacagattgttctcttcttgcgtgaaaaagacttcgcaaagattaaagattaaggaagttacaaaattcaccaatatatataattttctatgtggttaattgagattgtgtaatgatttggggttgtagtttcaggtgttgatttggggttgtagtttgaacttataattgtgttatgtgtataaatatttgtgtttatatatatcaagttagtataaatactataatttcttatcgtttcttttattggcactggtgtcttgatcatcccgactaattcagacatgagcttatctgaaaacccactttggacacaaacgaattgatacgaacgagtaacgactcttttattgaaaacgaaaaggcctaaatttgctgtgaaaggcccaataaacaattaagtgattatgtaagacgatgtcgtttaactcttaagtttctcaagaaagttatctctctctatctatcttcctcaaccttatccttgaagctttgtttcatctgttgttccctgtgaccatggctactccactctcaatctcatcaaatcctctcacctcccgccattgttaccgtctccacttatcttctacttcattcaaggtaatctctcattcttctacaaatgtcaattttgaatgaatccgtaaaattggaatttgaaatgtgtacagggaaatgtaagtgttttgggggcaaacccaagtcagattctatctctgaaactcaaccaaacccttaaaacgagaaaccaacagcaatttgcgagaccccttgttgtggttagccaaacggcggctacgtcgtcggcagttgtagctccggagagattccgtttggataatcttggaccacagccaggttcgaggaagaagcagaagagaaaaggtagaggtatctctgcaggacaaggagcaagttgtggttttggtatgagaggtcagaaatcaagatcgggtcctgggattatgagaggctttgaaggtggtcaaactgctctttatcgtcgtcttcccaaacttagaggaatcgctggaggtaaagttttgtttttgtttggtatccaagttttgtgtagcccaaatgttcgatgagatgtctcatccaaaaggctctgtttaaatttggtgatgctgctttcagttttatttagttagggcacatttgtttcatagatttaatattgggtaagagagccatgaattgacgactatggatcaagattgtagttagtgaatagagatatttcatgg

SEQ ID NO: 147923 - DNA, 2336 bp, Arabidopsis thaliana landsberg
aactaataccttagacactaatgaccatggttgccttttgcgcggtattcagcatccggtttcaggtggtggtaccaccagcaagataattccatcagctcgccggacttctctaccactcacgaaaagagctacaaaccaagaagttgcagcttacaacccaatagttgggatcttgcagaatgtcaagtctccagaatattccattaatgagccacaagttgataagattgccatttttccattagctccatatgaacaagacatcttctttactcccatgcaaaggaaaacatcgtctaaaagctcctctgtctcagaccgctctataacaaaagacaaatgcacagttcaaactcatacgacgtggcagggaatccaactcaacatggtagataacataagcgacgggtcatcatcatctgatcagaatgcaacagctggtgcatcaagccacaccacatcctctagttcaagaagatgtcggtttgacccatcatcgtatcgtcaacgggctgatgctttggaggggttgcttgagtttagtgccagattgttacaagaagggagatatgatgaactcaatgtattgcttaagccttttggtccaggaaaggtgtctcccagagaaaccgcgatatggatcgcaaagagcttgaaggagaatcgagacaagaccaaaatggtagatctaaatgtttctagagagataccacatgtgggtctcctctgacaggctccacattgtcataacgttcggtttagttcggttttagcaaaaagagagaagagaaagaactgggttatgcttctgggatttgcaggagctagagttggtttaggtttagtttgatggctgacacttttaaaagatgagtaacagtattagtaggttgcgttggatggtctttgctttagtcgaaccggtagctttgcatttgtaatctgtacacttgatagtgttaacaccttttataacttgtattactatagacttcataaaagtttccaatctctataatttttttgtttggtaggaaggtggggagacaaagacaattagaactagcagaacaagttttggctattgaagcagaattataaaattttggatagtcacttagcatttgaccggtccacatattaccggtggagcggtcaattagaactagcagaacaagttttggcctttgaagcagaattataaaatttggatagtcacttagcatttgtggttcatctaatatttaattactccattttatctcttaatctaataaatttatcctcacaaaataagtatacaagtttttaataacattatattttagtataatttttctttgtcaaaccacaagttaattaaatactaactccatgattggttactagaaaacaattacgaatgatatattttagtatatttttttcaatcatgaattaaataataaaatagtttgagttaaattaattattgaacaatattcataaaacttttggggtgagtaaagaaataagatggattgaaaaaaggccacgtggttgtcacaatgcttttcaaaaatcttatccaagcataagtctccttggtacctctcctctccaatggatcatccgtctctaacaatgaccaaactccgaaattataagaagtaaagacaaccatggcgagtgctaccttctccttctgtcccctctctcaatcccatccccattcttctctaatcaaaccgacaccgtttctcagatatggcaagaaactacaccatcttcaccaccacatcttcatcaccatctcttacccatctcaccattctcgctacttggccgtttcaagagacgatgccgcgacgcctcttttttcttccgaccaaacccaagagacagagaccagaagaagtggaagacactatagagaaacgaagaatggaggagaagtttgctgttctaaacactggaatctatgagtgtagatcatgtggttacaagtacgatgaatcagcgggtgacccatcgtacccgattccaccgggttttcagtttgataagttgcctgaagattggagatgtcctacttgtggagctgctcagagtttctttgagagtaaaatggttgagattgctggttttgctcagaatcagcaatatggacttggtggtaatgctcttacctctggtcagaagactggtttaatctttggctctcttttactcttctttgcgctttttttgagtggctatttcattcaatgattaaatattttctcactattactatgttaaatcatgttaccaccaattttataatgtttcaatacaccattcttctccatcaa

SEQ ID NO: 147924 - DNA, 442 bp, Arabidopsis thaliana landsberg; identical to SEQ ID NO: 71955

SEQ ID NO: 147925 - DNA, 1046 bp, Arabidopsis thaliana landsberg
atggcatttggcaaagataacataaacgaccatttagtatgggtatcagtcgggtatagtaaaaaaaaaaaaaaaagtaaggtctgatgcaatatttttatgccatgatattaacgagatctcttaaatttgatttcgccatacgtataaagcattattatttatatacaatattcaggcccagatcggcccattagacgaatggtttccagttcaacattttcccccaacccatcaaaattgttggctgtttggattaatcctagctaatctatatgctttctcggcagtataaatataaacttgaggtcacaacaaccaaaatcatccataacccaaaaagagtcacttccgtgtcacaagaaaccatgaaaccttctcttcatcaaccacttttcttcttcttcttcttagccaccgtcctcccattaatcctgaccgtccattctcaatcagacgactcagatttcatccgtactagctgcaacaccacattataccctgacctatgcttctcctctctttcctccttctctagctctgtccacaacgatccagccctcttggctcgagccgccatctccatcactctcaccaagactctcgacttagcctcatacctcgccaatatcaccactctccagccggagagccaagacgatggtgcccaccacccaaccgcagccgctgtttttcatgactgcttcgacaatcttaaagacgcggtcgaagaaatgaaaggctcgatgaaacagatgagggaactggtctcgactggctcgctcgagtccttcaggttccaaatgagtaacgtgcagacgtggctcagtgcggctttaactgatgaggagacttgtacggacggatttaaagacattcacgatgagccgaggaaggatgacatatgcgcacgggtcgatgacgtcaaaaagatgactagtaacgcgttggctctagttaatcgatgtgttgataaggccatacattgatcattttatcattattcactaaatattcttcttcttttttttttcttacttgaaaaa

SEQ ID NO: 147926 - DNA, 3376 bp, Arabidopsis thaliana landsberg
ttactcttcgccgtcaacggtggtgaggtttgtctccatcgatgtggtcgtcgctttagattggcggaggaggagctctgcagcgtgggtttctcggttgtggacgccgaggagtgctccgtagtttctcttgcccggccgttgatctattgttgtgcggctacggcggaagttggtggtggctaggtgggtttcgttgtttggcgtggtggtcaactgtggatctgtttggatcttagatggctaatgtggaggcaagggttcagtcggtttgggtgagctccgacttctggatccgccgcgtttggcatccatccgcccggtttggagagtaacggcttaaggaaatcggcgaagatccggtcatagaagaaaggggttaagccccagtgtgttgggatgcttggtatggaaccgacaccgtcgatccggtgtgtcggagtggctagttttccgggagagttgtagttggtttggtgcgtcggcggagagcgtctatggacggaaaccggaaccctccgtctacggttcgcgttccttcgaggcgttccagttctaatctagccctaaaaagtaaaaacaaaaaaataaaaaataataataaaaagtatgtagaaagaaaacgtagcgttttggatcggttttgaaaaaccaaattaaccaaaccaaaatcaaaaccattcatacgccaaatccttagaatcgacagtcgagcatacttaacagcttaagctataaaatgtataatagatttacgattctttgatttcgaaagcaagttgatgtattattggcatgctacaaaccgtgcacaaattaaacagcatcgtatcaagttcatcactcaacgtgtttgatactcccaccaaaaacaaaaatacgtctttattaggaaaaacatcaaaggaagaagttgactcttttagcttcatagctattaatttggaaaataaaacttccaccaagacttcattgggtagtccacaacctatgtcaaacaacagtgcaccttgaatttaacattgcgacccgataagtcgttgaatgggttagaatccggcgttataggggactgtggacgaccatctttaacatagatatccagctcctccaagcaggagaaatagtccaagaaatgcttgatcatgtccatctctcttgacgttccttgaaactcacgaatctctaaccttttcaccggacaagatgcgagtgaacggcctttctcttcccgaagaatacaggtacaagcgtccccacagtcatcaaaggttgggagggaaacaaagaaggcgaaaaagatgttttagggtttgccaaagtgaagaaggttttaattttcctttacgtgccctacataatcaagtgaaacgcagccttttataaagtgattaatttaaacagctagcgttttataaagtgttaaaagttaaacacacaaaactagtttagatgcgatatgatgagttccccgaattaagtttaagaaaccaaagctaaacgcaaaacttattgccactcaacctatgatttcagttgtgtaactatgtgttgtttcttgcctaaagttaaatcaagttggtatctgatgtgttgtacattaaagtcaagatgtaggtattttttttttttttgctaacgtttagtcaattcgagtaaagctctattaaagactttgcaagcaaaaggaattgtgaagagttagaacatccaaattttaagcgaggttctaaagttcacgtaactgttttcaacgaggcaagcaaagtaacaccagaagaaaattatggggttttctgcactagtctggtttagttggactgggttttcaaatccagtagatcaaaccgagcccaaatcaaatcaaaaagcactaataatactcgttgttttagtgtgctgataaagtttctttcttttgtttgagagttgagactgggatcccattgttgaagaagcgtcactttaacgacatgttctaggtgattaaacaatactgtgaacaagctttatttattgttagttcgagtatgatcatcgatcatttataaaactcaactaagtagtcatcaatataagatagatttacgattctttgatctcgaatgcaagttgatgtattattggcagactcggctacaaatcgtgcacaatacggcatcgtatcaagttcatcactcaacctgtttgatactccgacgaaaagcaaaaaataaaccatttttatcagcaaaaactatcaaagcaagaagttgactcctctttttagcttcggagatattaatttggaaaagtaaacttaaagttccaccaagaccttcattgtgctgtccacagcctatgtcaaagaaccgtgcaccttgattataacattgcgacccaataagtgcttgaatgggttagaatccgacgctaaaggggctaggaactgtggacgaccatctttaacatagatctccatctccttcaaacagaggaaacagtaatagaaatgcttgatcatttccatctctctcaacgttccttgaaactcacgaatctctaaccgcttcactggacaagatgcaagcgaacggcctttctcctcccgagaaatgcaggtacaagcgtccccgcagtcagctgcgacacagtgtacgagaccaccctaaaagcagaaaggagacattagggatttccaatcgtgaactgtatctctgcaaacgtgttattcaagtcatttgatggtttatattttataccttaatgactagagtttctagacgtggacaatttttcaagagaaccggcattgcttgccatcttatatccatgctactctcaatgactaagaatgtgaggttgttgaacaccggcattgcatgagagcattggccaagcacctgaacaacaaaaagacccaaataaacattaaccagctgcaaatgtaacttcaatgtttggttttataagagagaacagaacagcatactattccaagagtccgaggagataagtaaagcttcttaacattggtgacggtatgcataagcttacgcacgttaccaagattgggaaaaacatgattctttcggatgcttagtagcttgatttgtgcatcaactaagtattccaaattaactaatggaaagttgtcatgaacaaatgcagtgtaatttaagcaaacaagattcggtgtatcaaataaataaacccgtgaacacttcatcgttagattcttgaggcttgcacttgatacggtctcaatctcatgattccgatataaacaacgtacattagccaaatctaatgcctcaagcacagggcaagcagaaagtagactctgaaactgaccactatcaaaccgaattgagtcaagaatgagagtcttaagcat

SEQ ID NO: 147927 - DNA, 1054 bp, Arabidopsis thaliana landsberg
atggactgtttcatggaaaacgttgtcgtgtgtagactcaaatcaatacaatcagaaaacgaatcttatgacaagcaaagacgcgacgaagtttcgatgattgatcaaaagacgatcaccataatgatgatgatgatgatgatatgtagtgagtgggtacgaattacatatttaagataatatagtgggcacaaatctcacagagtggaaagtacaatggactcacacaagagcaagagaaagagaaagagaatctttttctaacacttttgattttagtgagaagacagagacaaaacaaagaccactatgagacactatccatatccataacgaacagcttctctgtctctctattatcagtatacaattgtgtatatatagacatgtattacctacctgtcattgtgatgttatatgtctgaagaacacaacacatggaccataatgatgatgatgataagaacaagaacttaagatgaagtaagagaacaaaaaaaagaaggataagtctttattgaaaagagtttgagatcagtacatgtatacacataaaaggatagattttttaaaatggttacaggacaaagagttttaagagaatgcagagtccccctgtaccggaattcataaaagaaaacactgacccttaaaccgaaagaactctaaaccctaaacgctaaaccctaaacagactttgggttacttctaaaaccttctcttatggctttagtactactactaaggtgatctgtataggcttaaaaaggattggtatcaagttctgttacacaaacccttttcagccacttatgttacagacaccaatttaaaaacactacatgggttttttctcctaagctctttacatgttgaaaaagttaagaaaacggatgatggtaataagatcaaaccgataattagcaggaaaatgttaatatattctgtattaactattaaccccccatttttttgttgtttctaatcatctaccttcgtccattcaaaccgtcctggtagtggttgttcgttcacaggatcaaagttgtacctg

SEQ ID NO: 147928 - DNA, 492 bp, Arabidopsis thaliana landsberg
atttgtaggcattatccgaagaaatcaaagcgagatatgaaaaagcagcagtcaaagtcattgacttggtatgatctaattctattcacttcctctagtttaaactacttttattgaacttttccgttgctggttattggtttaattaggatgactatgctgccgatgatgaccagtatgaagagaaattgaagaaggaaactttggcatttttctgtgttgctacgtaagaactctccagtctgattatgatttcgttttctttataccctttcatagtttgttggattcatttatttgagaacatgtttagttatggagatggagagcctactgacaatgctgccagattttacaaatggtttacggaggtttgttgcctcagtgtttgtttccttagatttgatatgctctgtgtagctttagcgtcaatactctgtgttttatgtttctaggaaaatgaacgggatataaagcttaacaactagcata

SEQ ID NO: 147929 - DNA, 2669 bp, Arabidopsis thaliana landsberg
tctataaaaaaaaattcttcaattcaacatcactaatatgcgattctctcttcttcttcttcttcttccatcttacgccaaacctcgagtctgcgaatcattcgattctcagattcgcatattttcttcgaattcgctaggctcaaaacgttgtttccgtgtacaagaagcaacctaacgatttggggccaggtgaaggaagagctgatttaggttattgagattcgttttcttcaaatggaaaacgacagggttgagagagaacagagccaatttcaggaagacgagtttatcgattcgagaaaaccaccgccatggaggaaacagatcacggttcgagcgatcgtcgcgagtttattgatagggaccgtctacagtgtgatctgtctgaagctgaatctaacgacaggactcgtaccgaatctcaacatctcatcagctctcttggcttttgttttcctcaaatcatggaccaaagttcttcaaaaagccggaatcgccacgacgcctttcacacgtcaagagaacactattgctcaaacttgtgctgttgcttgttacagcatctctcttgcaggtggatttgcatcgtatttgttgggtttgaatagacgaacttacgaggagacaggagtgaacaccgaaggaaacaatcctcgtggtataaaagagcccggtgttggatggatgacatcattcctcttcgttactagcttcattggacttgttgtattggtacctcttcgaaaggtactgatatctagcaattatgaaaacagagtaaatttttgatttcaatggtgtgattaaattctgagaatgaattgtataaatttcaggtgatgattatagactacaagctaacttatcctagtggaacggcaacagctgttcttataaatggatttcatactagcaaaggagataagacagccaagtatgttttctatatatgttcttgatgaatcttgttttttcttacttgattgggatatatatcgatatttttcgtcgttttcgatacaggaaacagattcgcgggtttataaaatcgtttggtttgagtttcttttgggcattctttggatggttctattcaggtggtgaaaaatgcggattctctcagttccctacatttgggttacaagctttggacaaaacgtgagtttcctcagttttttttatataatccttcaaatgtttaaacatgtttgattgaagaagctttatctctttatgggatatagattctactttgacttcagtatgacatatgttggagctgggatgatttgttctcatttggtgaatctgtcgttgctcttcggtgccatcctctcgtggggaatcatgtggcctctcatagcccggcttaaaggcgaatggttccctgcaacattgaaagataatagcatgcagggcttaaacggctacaaggtctgatttcatcctagtttttaatatatatatatatcttacagctgtggtagcaaaaagatgcgataagttttgtttgtgttgttgcaggtgtttatatgcattgcactgatcttaggagatgggctttataacttcgttaagatactctttttcactggaagaagcttccactctagactctccaaaaccaacagcatcagcacatgtaagttatctgtggaaggatctagctaacagtgtcttgcatttgtttcgatgtaaaagtaataaccaattgactgattgcagtggtagaagttccagaagatagcacgaaagaatccgataacctgaaacgagagaataaagtgttcgttcgagagagcattccgctatggatggcttgtgtcggatacttattcttctcccttgtctccatcattgccatccctctgatgttccctcagctgaaatggtacttcgtcctcgtagcttacctcctcgccccgtctctcagcttctgtaacgcctatggagctggcttaacggatatgaacatggcttacaactatggtaaagcggcgctctttgtgatggcggcactggcaggaaaaaacgatggagtggtggctgggatggttgcttgtggtctcatcaaatcaattgtctctgtctcagctgacctgatgcatgatttcaagacgggacatcttacgcaaacctcgccccgctcgatgcttgttgcacaagccatagggacagcgataggctgcgtggttgcgccactcaccttcttcctcttctacaaggcgtttgatgttggaaaccaaaatggtgaatacaaagctccttatgctatgatatacagaaacatggctattatcggtgttcaaggtctctccgctctccccaagcattgcctagagctttgctacggattctttgcctttgcggttgctgccaacttggcaagagacctcttaccagataagccagggaagtggatcccactcccgatggcaatggctgtaccgttcctggtgggtgggtcgttcgcaatcgatatgtgtatcgggagcttagtggtatacgtttggaaaaaggtgaatcgtaagaaggcagatgtgatggttccagctgttgcatcaggtttgatatgtggagatggtctctggattctgccttcttctttgctggctctggctaaggttagacctcctatctgtatgaacttcactgcggctcattaa

SEQ ID NO: 147930 - DNA, 1058 bp, Arabidopsis thaliana landsberg
  unsure (1)..(1058): unsure at all n locations
atcaaacaatggcgactttgattctatcattcttgcttcttcttctagcaacaaagcttcctgaatcactagctggtcactgcaccaccacgacggcgacgaaaagcttcgagaaatgtatctctcttccaacacaacaagcgtcaatcgcgtggacataccatccacacaacgctactctcgacctttgtttctttggaactttcatctcaccttccgggtgggttggatgggggattaacccggattccccggcgcagatgactggttctcgtgtcctcatcgcctttccagatccgaattctggtcagctcatcctccttccttacgttcttgactcttcagtcaagcttcagaaaggtcctctgctttcccgtccgcttgaccttgtccgtctctcttcctcctctgcttctctctacggtggtaaaatggccactatccgtaatggtgcttccgttcagatttatgcctctgttaagctctcctcgaacaatactaagatccaccatgtttggaacagaggtctttatgtccaaggttactctcccaccattcatcctactacttccaccgatctctcctccttctccacctttgatgtcacttcaggtatccaaattctttctcaacctttgatctctcatactaccaccaaattctttctcacttcagcaaagtttgatcttacactgtttctttctataggatttgcaactgttaatcaaaacagcggttcccgagctttaaaagtgactcacggagtagtcaacgcgatatcgtggggttttctcctcccggcgggagcagtaacagctagatacctccgccaaatgcaatcaataggacccacttggttctacatccacgcagcaatacagctaaccggtttcctccnnnnnnnnnnnnnnnnntccattggaatcgagctcggcacataattcccctggagtgacctatgggttacatcggagcctcgggatagctactttcacagcagcggcgctgcaaacactggctttgctgttcagaccaaagacgaccaataagttccggag

SEQ ID NO: 147931 - DNA, 262 bp, Arabidopsis thaliana landsberg
  unsure (1)..(262): unsure at all n locations
gttatcttgaaatgtcattcttgtgcggaaggagagatagagaagcttaaggtggagatagagaggaagaanatagatgatgagaggaagaggagacatgatgaaaggaagaaagaagaagaagaggcgaagagagaagagaaagagaggaggaaacgtgaagaagaagaagagaagaagcggtggccacctcaacaaccaccacaagaaaaagaacttagggaacggcaactaccgatggagaaagaatgggaaatggaag

SEQ ID NO: 147932 - DNA, 535 bp, Arabidopsis thaliana landsberg
gtgaacagaaaagaaaactttttaacatatgcaacaagatttaggtgagggtttgtctacatgttccggggaagagagagagagagaatcagaagtgtatcttgatctagggttcacagacaaaatctccatgctttgaactaagcagaattcatctggtcttttatctctttcatatcaaaccaaaggattgatctatccatatcgtccaaaacctgtatctagctaagcctagaacttctctatcgtttaccacttcctttctatatttcttctgaatttgtaacataagaagtaataatgattccaagtatggagggaggcgggaagactaacagagaagaagaggaggaggaagaggaagaagaagaagaaggtgaagagagtaaggtttcaagcaatagtacagtggaagagagcgacaagaagactaaggttaggccttatgtgagatctaaagtccctcgactccggtggactcctgatcttcatcttcgctttgtccgcgccgttgagaggcttggaggtcaagaaa

SEQ ID NO: 147933 - DNA, 418 bp, Arabidopsis thaliana landsberg
gtttcataagtatagattgcgggataccggatgattctagctacaacgatgagactacaggtataaagtatgtttcggattcggcgtttgttgattcaggaacaacaaagagaattgcagctcagtttcaatcaagtggttttgatagacacttgttgaacgtgagaagtttccctcaaagcaagagaagctgttacgatgttccgactccgagaggcaaaggttttaagtatctaatcagaactcgtttcatgtacgggaactatgatgatcttggaagagtgcccgagttcgatctctatctagagtaaacttttgggactctgttaaactcgacgatgcaacaactatactcaacaaagagataatcaccattccacttttagacaatgttcaagtgtgtgttgttgatagaact

SEQ ID NO: 147934 - DNA, 726 bp, Arabidopsis thaliana landsberg
cttcgggtcttactcggtggtaacatcactctcctccgggtattctctactggattgctcagcttcttggctccgtcgccgcttgtttcctccttagctttgccaccggtggcgaggtaacgtcacttacacctaattagattttagtagtattttcgattctctgtttctctattttgtggtttggtttaaaactaaattcaattgaatattccaactaaaataacccgtttgacctaacttctccggcaagtaaataaacctttttgcaaatgattgttttttcagccaattccagcgttcggtctctctgccggagtcggatcattaaacgctctcgtcttcgagatcgtgatgaccttcgggctcgtctacaccgtctacgccacagccgttgaccccaagaacggtagtctcggaacaatcgcaccaatcgccataggtttcatcgttggagctaacatcctcgctggtggagctttcagcggagcttccatgaacccagccgttgctttcggaccagccgtcgtaagctggacgtggaccaaccactgggtttactgggctggtcctcttattggtggtggactcgccggaattatctacgactttgtcttcatcgatgaaaatgcccacgagcaattgcctaccaccgattactgaagacgtcaaattcaacgttgttaatctgatgaatttttcgtgatttgcttttttaatttgcat

SEQ ID NO: 147935 - DNA, 607 bp, Arabidopsis thaliana landsberg
ttgttgttgccttcagattacacatgatgaacaagtggcaacttggtctgctataagtaaagaatccaagtcactaatccatttgaatggtgttgcttcagtcgcatcatcccatctatctggcttcagagccaagaaaagtagtaatggtactgttttatccaaaactcttcttggtatttttttaccgtacaagttaaagaacgttgcaccacgtatgaaaactcaaagaaacagatcatgtatgcacgattttctgaaatctctgagttgggtttctaatgtatatgcaggtctcaaagatcatgggaggccaaaattttcatttaactcacatactcatggagaaacgtcatccaagataagtgacatggctgaaatctttgagcctgatgtggaggatcaggctatagaagaggatccaattattgaatgccccaacagttttgatgaaagatcagaaaacaggcagggtgtttctgttgctgagtcgagagaagttttgcacgagtgcactaaagatgcggtacccaagcttcaagaaattcctctagataaaattagactgataaaaagaagctctgaactggtattattgattatacag

SEQ ID NO: 147936 - DNA, 315 bp, Arabidopsis thaliana landsberg
aagttgagaccagaagaagaagaaaaaaaatcatggagatgaccgaagcttccaaacagacaacagcagaaggatcagcaaatccagaaccagaccaaattttgagtccgagaagatcgttggagctaaaacaaaagaaatggtggatctctgtttctttatgtattttcttagtcttgctcggagattctctagtcatgcttctcttgaacttcttctatgttcaagacaatcgagaagatagtgaccaagatctacaataccgaggaacatggttgcaagctctggtccaaaacgctgcgtttccactactca

SEQ ID NO: 147937 - DNA, 740 bp, Arabidopsis thaliana landsberg
ttaatctgcagcaccagtgtctcttctttccttttctcctttttggataagagaaataaaaataccaatttgcagcttctttcttgaaaactttggagagctttatgcatatgcttatgtctgaaacggatctgacaaaaatgggtttttctctttcttgtttttttttctggctagcataaggtaaaagcttatatctttgcacacaaaaatataaagaacagatgagattagtcagaggccaaatccaaaagacttcatagcaaagtaaacatcttttgcctactttcttctttttttctcacttagtcacttgcatgtagagtacagtcagcatcttctctctttttctcccccaattctctcaagagaatctctaagcttttgttcttcttacaaatcatgtacttataataaacccaagaaagaagaagaaaaacaaaaccaatcccaagctgtgatggcgaaacaaagttacttcttcgtcttcaccttcttcttgtttctttctcttctctcatactgttcttcaacaactacacatcatgatgtgttaaacccaccaacggtctttcctacaaaccccacaactacaccgacggctacatttcctccggtgaccataacgccaacaaatccagccacaacagttcctattgttcctccagtcacaactattccacctgctacactcacaccacctccagtcataacaattcctgctcctacactcacaccac

SEQ ID NO: 147938 - DNA, 891 bp, Arabidopsis thaliana landsberg
atgggtcgggttaaatccgacccggacccgctccaagactactgcgtttctcctcctccttcatctcaccaacaaatcttcctcaacggcaaactttgcaaagatccgacacaagccagcgtctctgacttttcaacatccgcattatccagacccggaaacactaagaccaaaccgtttatgatcaacgtcactgtgaccacaaccgccaacctcccaggtctaaacacagtgggccttacaatggccaggctagacttcggaggctctggtgttgtcccaccgcacgtgcacccacgcgcctccgaagtgacagtctgcctcgacggtgtccttctcgtcgggttcgtggatacgtcgggtcgggtctttacgcaggagcttcatccgggtgagacattcgtgttcccaaaggtttgatccattttctatataacattgatacggtgagctcagctttggcagtctctgggctgagtagtcagaatcctgggactcagattgtatctttgtcgtctttcatttcaaagccttcgatactggtagaggttttgaagagtgcttatgatatcaacggccaggatgttgctaggatccgcaaaagtcttgaaggctaaaaatgctaaaagcctaaaactatatataactacatggccaaccaataactatatacaaatgtatatgactaactcaaaactatattatgacaacaacaaaaaaaaacgtataaacaataaaatgtcactaaaaaaggctatacactcaattccgaattgagtttttctgcaattctttagctatcttgttaactatgaatgtttttggaatgtgaacgatttatgatccatagaactatgtaaagagcattaaattagtctggtaaatagcatc

SEQ ID NO: 147939 - DNA, 944 bp, Arabidopsis thaliana landsberg
cagtttcgagattcggagatctgcaagggagaagatgatcgtttgcgtcgccgtcgtcggccaccaggtctgccgcagaatttacaatccgagtttctattgtgatctgatttcattaggtcttaccgtttctgacttgaacttccctatggatcgaaataacagaacaatccgctttacatacaaagcttcacggatgctgacgatgctctcaagctccaccacattgttcattgctccctcgatgtcatcgaagagcgaggtccttttatccaatccaatccaatctccttttggtttttgctctgcatttcttcatcttattaatgtggtttagtctgtttcttcagtgaacaatccgaaaaagtctggtacaacactgaacgaggcttttcttggcttgctctatcctactgtgaactacaaagtgtaataagcacattccctcactctctctgatgactttgtgttgttggggatactcctttaatggcttcttcttattcttcctctgcaggtatggttacttgactaataccaaggttaaatttatattggtcactactgatttggatgttagagacaccgatgtgagaagtgtaagtatctttcatctgctcatatcctctactttaaccaatgttatccacttactagttctatagagttccttaccaaagttacagttggttcttctacttgagtatgttacttcctcttagcaccaaatatgtgaagaagagtttcattctttgtgtgttttcttcagttcttcaggaagttccatgctgcttacgttgatgcagtctcaaacccctttcatgtccctggcaaaaagataacctcgagaacctttgcgcaaactgtaagcaacatcgttggatcgtacggtttgaactgaccttctcttataagttgctttttgtacctcaaacttgtgtttt

SEQ ID NO: 147940 - DNA, 484 bp, Arabidopsis thaliana landsberg
acacaggtttacccgaccctaccctcaatactacttacctccaaactcttcgtggactatgctttcttaatggcaatcgaagtgccttggtagagtttgatctacgtacgcctacggttttcgacaacaaatactacgtgaatctcaaagagcgaaaaggtcttatccagagcgaccaagagttgttctctagcccgaatgccactgacacaatccccttggtgagagcatatgctgatggcacacaaacattcttcaatgcatttgtggaggcaatgaataggatgggaaacattacaccaactacaggaactcaaggacaaatcagattgaactgtagagtggtgaactccaactctctactccatgatgtggtggatatcgttgactttgtaagttctatgtgagaatagttgactcaatatctggcgaccagactatatgttaagataaataagcgggatctcaagttgttacttgagca

SEQ ID NO: 147941 - DNA, 1233 bp, Arabidopsis thaliana landsberg
atatccgttttccgatttagggcaccaaattgaatcaaaatctccgcttcttcccaatttacgaaacttcacgaaaaaacttcttcggattctttttaaccctttctctcaattcttcttccagggttttctaattgggcactgtttctcttcgtcttcttcttcctccgtacgcatccttctcctttttactgttgagtgtgaacagatttaaacaacgtcatttctagggttttcggagttcaattttgttatcctactattgaatttgcatcgcgatagctgaatttaggatcctgtgttgttgctcagtcgtattagaacaactgttgaattacgcttgcgttgattgttctttttttattggatcctcgtgagttgttttttttcttgttctgaatcgtttcctggacttctgatttcctgctagaagtttatttcatggttgctgattcattatcttcttgtttctagatgaaagtttactgtgtataaaccttcaaaggatgagaatttcaatcttactttgaacaatatgtagtttatacagtagcttcgtctgttgttgcaccatggttgataagatttatgtctcctttgtttggtttattgaattcttccttttttccaggctattcatttatgagtaatcgtttattccatctcagattgtaggcggtttcgcgtcttgtcaccgaatgatacattgtctcacgtgagattgtcagtcagttcgtgcaatgtcaaaccttcatgtaccttcctattcaccttgagaatatttttagtgtgcttaggataacgtttgcttaattatgcgtaccatttctcatccatcaactcttgtgctctttcctttgtagtcatctctcaatggttcagcttcgaatttaccagatggttcgggcagatcgtttactgcttcttattctggacaatctggtgcaccgtctccctcttttcatcatactggtgggtgttattcttatcttgaccttcttctatattttgcgtcgttctgaacttatataacttctacatattcttcatgcaggaaatcttcagggacttcataatattcatgggaactataatgtcgggaacatgcaaggtacacttacatcaagaaactcaagtatgaatagtataccatctgccggagttcaacaacctaatgggagtttttccagtggaagatttgcttcaaataatctacctgttaatctctctcag

SEQ ID NO: 147942 - DNA, 5203 bp, Arabidopsis thaliana landsberg
atgcgtttctgggtaatactgtcattacttgaaaacaactacgtgtatgattcaaggtaatactgtcagtactaggatataactatgtgtatgattctaggtaacatcggtagtaatatgaatgaatatctgttgaaggagatcgacgaggaaatagaagcaatactgataagtgtgtattttacatgttttgagcatccatttgtcatcactttagcatcatatcatcactgttttataccatttctcatcatttgtcatcggtttacatgtttaggatagatttgcatgcatgttgcatatttgcgttgatttcagctgatttggagatgttgacgagctatctggaagaagcggacctgatcatgtcaaaccactcgaccccgaggtcgagtaaggagcttcaagatctcaacagatcactcgaccccctggtcgagtagaggacatcactacttcaccacatcactcgacctcggggtcgagtgtcttcaccttcattgccagaccactactcgaccccatcactccacctggaggtcaagtatcaccatcaccaccactcgactgcatactcgatgacaagcttcagagccttcttcattccgcactcaaccagacactcgagcacaaggaagaaaagaagactccagctattcactcgacctcccactagaccacatgggtcgagtacaattcttaatccgtcccaatacttcatcgtttttagtataagggtttcatgtacttcacattttcgcatatttggctataagtagcatgtacttcacattttcgtagaaaagtttttatctagttttattctgcagaccttgtgttctagaccttttataatccggatttctctttatctattcagtattcagtattcagcttttgttcttgatttcgtttactgttgttcattctgttatcatcctgcttttatactgttgttatcatgttttcaacttgttcaacgtctatgctttctgttatgatgtctgagtagtgaatagatttctgaggatgggttagagtagtgtagaattctcagtatgctaggtgattgagtattggttgatagatctcttctggattagttgttcttaatgcctattgctttctgatcaactggaatttgagcccagacatttccacgcccaaaaggtgttcgatgaaatgtctgaaccactaattctagagattcgtgaccctgtaccaaggtattggttgcagggagcgttttggctttacttattgattcgtaatgtctgttaggttagctctcgtcaatggtgattgagtctgggactaggtttacttaagtctcttttgcggtggcacttagatttggttaatgaatttgttgtctagggttatttattgagcatgtcaatcacctgtaactgaggaaacgaaactactcaattaccccatcctgggaattctttatctgattgaattctttgtttactctactgttgtttactgcatcctgttatctgtcgcttaatttctgcaattctttcttgttactcgacctcgtacctcgaccacccagttgtctggcaacagactgtgcagtcgagtatctgtgttttattttctgtctgttactcgacctgtcactcgacctcacccagtgctttgcaaagagctgtgttggtcgagtgttttattgtttctgcttgaatttctgttttctgcatgttcatttagaactgctataacacaccaaaacctgttattgcttggcttgacttagtgacttctgatcacatcttgattgttagcatcacacccatttggattgacaacctaaaatactacaacgatatgattggtgttttaggataattgactaaaaaacctattattaatttggcgacgttgccaattgggtgtttgtttgttacatttgagatttcagacttgcttagatcaagttcattttcaattttcttttcagttactaactttgtgtttttcttgttgtcttcttgatccaggtacacctctgctgtatgcgaactcgatcaacaggcaatcagaacctccttttcgacgacaacatcaaccgcatagctcgcgaactcagaaaaaggagaaccacagtcaaccctgtacctcagcaaccactcgaaatggctgaagaacagaatcaacaaaatggccctgccaacattggtgctagagatgcaccacgtgatcaccgccagaggaaaggaattgcacctcctgcaatccagaacaacaacttcgagattaagagtggtttcatctcgatgattcaggggaacaaattccatggtctgccaatggaggatccactcgaccaccttgatgaattcgataggctctacgacctaacaaagatcaatggtgtcagtgaagacggattcaagctccgtttgttcccattctccttgggcgacaaagcacacatctgggagaagaatctgccccatgactcaatcaccacctgggatgattgcaagaaggcttttctatcaaagttcttctccaatgctagaactgcaagactcagaaatgagatttctggtttctcacagaagactggtgaaagcttctgtgaagcattggagcatttcaagggttacaccaaccaatgccctcatcatggctttactaaagcctctctgctcagcactctttacagaggagtcctaccacgcatcataatgcttttggataccgccagcaatgggaatttccagaacaaggatgttgaagaaggctgggaattggttgagaacttggctcaatcagatggtaattacaacgaggactgtgataggaccgtcagaggcacagctgactctgatgacaaacacaggaaggatatcaaagcgctgaatgacaagctggacaggattcttcttagccagcataagcatgtgcacttccttgttgatgacgagcagtatgaagtccaagatgaggaaagtaaccagttggaagaagtaagctacatcaacaacaaccagggtggctacaaaggatacaacaacttcaaaaccgacaatcccaacctctcctaccgcagcacaaacgttgctaatcctcaggatcaggtgtatcctccgcagcaacaacaaagtcagaacaaaccttttgttccctacaaccaaggtttcgttcccaagcagcaattccaggggaactaccagcaaccaccaccacctgggtttgcacctcagcaaaaccaaggtcctgctgctcctgatgctgaaatgaaacagatggtccagcagctgctacagggacaagcatctagctcaatggaaattgctaagaaattatctgaattgcaccataagctggactgcagctacaatgacctgaatgccaaagtggaggcattgaataccaaagtcagatatttggaaggccaatcagcatctacctctgcatcaaaagttacaggacttcctgggaagtcaatacagaatccaaaggagtatgctaatgttcatgctatcaccatatgccatgatcgagagctgccaactcgacctgtccctgatttcatcactggggacagtgatgttcaagaagggaggcttctactcaggttgaagtctctgttgttgaattcaaccattccgctggttctcgccatctcactcaatccatatcggaagaaaaggccgccataatcgagagaatggtaaaacgattcaaacctactccactaccctcacgtgctcttccgtggacattcaggaaagcatggatggagacatacaagtctgttgcagagatgcaagcttgccggactgaaccccccatattcgcaaaacccgatgacggcgaactgttgtacctgtacacgacagtctcctgaaccgtgataagcggtgtccaggtgagaaagatcacgaacgacaaaaaccgatctattacgttagtaaatcgttgatagacgctgaaactcgttatccaacaatggaaaaactggcactggccgtagtcatgtcagctcaaaaaatgagaccatatttccaatcacaccccatcgtagtgatgacgtcccaaccaatctgaactattctgcatagtctgacccaatcaggacgacttgcaaaatgggacatagagttaagcgagtacgatatagaatatcgcaccagaaccagcttgaaagcacaagtcctagccgactttgtaatcgagctcccgttagccgacctggatggaaccaactctaataagaaatggctcctccacgtcgatggctcatccaaccgacaaggatctagagtaggaatacaactcacctcccccaccggggaagtcatcgaacaatcgttccgacttggattcaacgcatcaaacaacgagtctgagtacgaagccctcattgctggcattaagctagctcaagaaaaggggatccgggaaatacacgcctacagcgactcccaactcgtcaccagccagttccatggggaatacgaagctaaagacgagcgcatggaagcgtacctcgaactggtcaaaaccttggcccagcagtttgaatcgttcaaactaactaggatccccagaggagaaaacacctcggcaaacaccttggcagctctcgcttctacatcagatcctttcgtcaaaagaattattcccgtcgaaggcatagaacacacgagcatcgacttaacagtcaaacatgctgggatggaactcgaagcaccaccaccgcagctagagctctcgcggcagctgcggaggcaagtgcaacggaagaggagccagaattcgaaacccccgatttttttcctcatagtgttctcacttgcatctatcttttttattgtaagaatattttggaaattataatagatatgctcagaaaaacaagagattaagaatctatgctagaagtttttttatttagttctctctcatatgactcaacttaataccgaaaatatcctctgtctcatatccacgggcgttaacaataaaattatcagataagcggtttagaaaactatcgatgatgattgtgagaaatgaggaggcaaaagtgacaccgtcaatgatgatttcatgtcacgtgtggtggactggtggtggtgatgatgataccaacatcgatgatttcaaaagcagtggtggtgttggtaggaaaattacgtcaaatggagacggtgatggaatggtggattggtggtgg

SEQ ID NO: 147943 - DNA, 324 bp, Arabidopsis thaliana landsberg
accaaaagataaagaaaaacaagaaatattttgtttttcgatctgaaaaagtgaaagcttcttcaaaatctttgctttagagatcgtttggtgattttgattctttattttttttttatagattcttcttcttgattctttcatatggatggacatcagcatcatcaccttcaccagctttaatatctcaacaagcatcatcttcatactcaatcgcaaacgccggaaatagcctctccggtagctgttgtggataggtttccacagtggagccgccaagagacaaaagaggtgatagggataagaggagagctagatcaaact

SEQ ID NO: 147944 - DNA, 675 bp, Arabidopsis thaliana landsberg
gtttgatagggttactaaaggcgaaacggggttaagattgtaccaatccaaagttcaagtgcaaccgggtttcgcctaacaaaacttgcactcgaagaagcctacgagcaagccaagaagcttgacctaaacgtcaaaggaatactcatcaccaacccatctaaccctttgggtacgacaacaacccaaaccgaactcaacattctatttgatttcatcaccaagaataagaatatacatttagtaagtgacgagatatattcgggcacagtattcaactcttcagaattcatcagcgtcatggagattctaaaaaataatcaacttgaaaacaccgatgttttgaaccgagtccacattgtttgtagcttatctaaagatctaggcctccctggttttagagttggagccatttactccaatgacaaagatgtcatctctgccgctacaaaaatgtcaagtttcggccttgtctcctcccagacacaatacctactatcctcattattatctgacaagaagttcactaagaactaccttagagagaaccaaaaacggctcaagaacagacagagaaagctcgtgttgggtctagaggccatcgggatcaaatgtctgaagagcaatgcgggactctcttgttgggtcgacatgagacctctccttagatcctaa

SEQ ID NO: 147945 - DNA, 1918 bp, Arabidopsis thaliana landsberg
ggactagttctagatatgttgatactaatggtttagttgaaatcaatatattttttgtaggttcatatattggagtaaacatagggactgatctttctgatatgccacatccaacacaagttgttgctctactaaaagctcaagaaatccgacatattcgattatacgacgctgatccccggttgttgattgctctagcaaacactggtatcaaagttataatcttcattcctaatgaccagcttcttggtataggtcaatccaattcaaccgcaccgaattgagttataggcaatgtcattgcacattaccctacagcgacgataaccgcggtttctgttggctctgaggttctaactagtctctctaatgcagctcctgttctagacagtgctataaagaacgttcatgctgctttactctcgtcgaatcttaacaagttgataaaagtttctactcctttatcaaccaccttgattcttgatccttttcctccatcgcaagcgttctttaaccgttctttgaattcggttatagtaccgttactaagcttcttgcagtctacaaactcatacctgatggtgaatgtgtatccttacattgactatatgcaatcaaacggtgtgattccgttagactacgcgttgttcaaaccgatacctcctaataaagaagctgttgatgccaacactcttgttcgttactcaaacgcttttgatgcaatggttgatgcaacgtacttcgctatggcgttcctcaacttcacaaacattccggttttagtaaccgaatcaggctggccttcgaaaggtgaaaccaatgagcctgatgctacacttgacaacgccaacacttacaacagtaatctcattagacatgttctcaacaagacgggaactcccaaacgcccggggatcgctgtgagcacttacatttacgagctttacaatgaagatacaaaagcaggtttatcagagaagaattgggggttgtttaatgcaaatggtgaaccggtttacgtacttcggttgactaactcgggttcggttcttgctaacgatactacgaaccagacttattgtactgcaagagaaggtgctgatacaaagatgcttcaagctgctcttgattgggcttgtggtcctggaaagattgattgttcgcctattaagcaaggagagacttgttatgaaccggataatgtcgttgcacatgctaactacgcgtttgatacttattatcatcagactgggaataatcctgatgcttgcaacttcaatggtgttgctagtatcactaccacagatccaagtaagaaacaaaaaaacttaatttgattatacattacattgtgtaatactgagctatattttcttgattggttgatttcaatgcaggtcatggtacatgtgtgtttgctggaaggtaaattattctgttttcttatgcccttttgttggtagatatgttcaatcttggttttggttagaaaatggatcgatttggtatggtttatgttcggttctggttggagttttatcaattatatccttagatggaacaagtactaacttttaatcgttgttttgttcttcaattgcagccgcggtaatggtagaaacgggacgtctgtgaacataacagcaccatctgcgaattcaacgacttcttctggaatacggagtgatttgtattacagtcggggtatatggagtatcttgacagtgatgattttgaacgttgctaatatcttgtgagaaatctttgggacataacaatgtttttttctgttccgagaagttttttttttttcgttcttaggtgggattggagttagaattgaggccgattgtgttggattcgattttgtacacaacaaaaaccaagataacattctaatggtctttttttatcccat

SEQ ID NO: 147946 - DNA, 475 bp, Arabidopsis thaliana landsberg
taagatattttctgtcgtaagtgatgattgtgatttggtgatctcttattccaaagaaatttatttgtgtagttgtgtatgcatttatatttgatttatgattactaatgaacactgcttaaaaaatatgtgaccagaattttcatttctcttttagatggatcttgatctgaaaagtccaccaaacaaaccgcaacacagtattagtggtatgagtatggagacgccctccgaagcaacatcatcatcaacttcagttactgaagctcaacgctgcttgtcactctattttgctctctgtaccaaggtcttgcgaatttttaccattcttcgactaatgactaatctagtctttaagtctgtggcaaaattttgctaaaactcttagttcctatgtgcctattatttgcagaagcactccctttttgttcatgtattcagcatatacaagaatgcatcagatcccgttaagcag

SEQ ID NO: 147947 - DNA, 686 bp, Arabidopsis thaliana landsberg
ggacatgtttcctagtcatgtcaaggtatatgttcagaatgatgctatagtggctttagctagtggaaccatgggaaagctccatggctgcgttctaatcgctggtacaggatgtatagcttatggctttgatgaagatggcaaggaggctagggcatctggtggtggaccaatcttaggtgattggggaaggtatctttcttcccatgttgtggttcatatcaatttcagttctacgattaacaagaaaaaatcacatcacaatgtctctgctttcgcattctttctatccagtgaggtttgttttatcaccggttccatcttgccagaagaatattagttttgattttacctcgtataaggcttcacagatgcatgagtcaaaattatgattgtagctgtagactttctcattatatagttgttggaaatacacttgaaatgtattgagattccttaaccgataattgtgtgaatgatgatgtgactatttacagtggctatggaattgctgcacaggccttaacggcggtgattagagctcatgatggtcgtggcccacaaacgatgcttacaagtaccatcttaaaagcacttggactctcctctccagacgaactcatcgggtaccttctttttcaaactaatgactgatctcaaaacatatgcctttctataatttcctt

SEQ ID NO: 147948 - DNA, 447 bp, Arabidopsis thaliana landsberg
  unsure (1)..(447): unsure at all n locations
gcaggacggaaaagctctgccaaccggtcctgtggtcatttcaccagatggcctatttccagcattgtaccgtgaaggttaatctttatacccttcaagatttcatttgcagcatctttacgcttttttcatttaataagaaatatctcttattttgttcttataaacattataactgatatgcagtgataagaagagcacctcatgagttcaagatcgcatgtttggaggtaaaagtttttctcatttttttctgtgaactaataatagagaacacttaaaaccagcggcttagatatgaacaacttttacaattgtaatatgcaggatatcaggaaactcttcccaacggattacaacccgttctattgccgatttggaaatagagacacagatgagctgagttacagaaaactcngaatcccaaagggaaagatattcataatc

SEQ ID NO: 147949 - DNA, 1301 bp, Arabidopsis thaliana landsberg
gtttccctacctgagctgcaacaaatgatgatgagtcaattccgtgggccgattgtacacgtcacggaagggccacaaccacagcagacgatatggacccaattcttggggttgagaggggaagagaaacataagcaactcaagaaactcttggagactaaacaaggatcccctcaagatcaacaatacagttcagggtggtcttggaggaatattgtaagatcgattttggatctaacagaagaaaagaataaagggtcaggatcttctgaatgtgaggactcgtacaacatttatgataagaaagataaaccaagttttgataacaaatatggatggagtatagctcttgattatgacgattacaagcctcttaaacactcggggatcggagtatacctcgtaaatctcaccgcggtatgattactactctaaaattagatcaatattcaatagtcaagtatattagcaacttctagcaaattttctatctatgggagtagaatttgttagttacatagttctgtacgtaattcttggataaactagacctactaaaaattattgttttggtatagggtaaaccaatttaagtctagattggattggtttaggaaaaaaacaattcttaaaccgtatttaatttgaaatttcaacaattgtcagggagcaatgatggctccacacatgaacccaacagcaacagaatatggtatagttttagctggctctggagagatccaagttgtatttcctaatggaacttctgctatgaacacaagagtctccgtaggagatgtcttctggatccctagatacttcgcgttttgccagatcgcatctcggaccggaccattcgagtttgtaggattcaccacatcagctcacaagaatagacctcagttcctagttggatcaaactcactactcaggactttgaatctgacgtcattgtccatagcgtttggagtcgatgaagagacaatgaggcggttcattgaggcgcagagagaggctgttattctccctacgccagcggcagctcccccgcatgttggtgaaatggttagcgaccgctttgtttgaggaatgtgtgaaagggtttctttttgtatgttatgtatgtagttaaacatgagtatgtatggatgtatgtttttgtttctttgaaataacattaataaaggtgatcactaaagcatgttatgtatgtagttataactatgagtatgtatggatgtatgcttttgtttctttgaaataacattaataaaggtgaccactaaagcatgttatgtgag

SEQ ID NO: 147950 - DNA, 824 bp, Arabidopsis thaliana landsberg
caattagatacaatgtgacagtgaagatcttaagcgacggtatgaaacaagtagtcttatcattgtcaccaacctgtttggtgtaattagcctatgacactcgtggattattgtacaatgcatccgatcatggaaggttcttgggaaagcaagattattttcaggtatacccacaaaatctttctgcattacaccaaccaatatacgaaaagaagttattggaacaaggttaagatatgaataaaccttggtctaccatgaaggaatactcgtcagggtcaggcagccgctcatttccataccaattaaggtgggctgggagctcagataggagtgatgggctactactgtaatcttgaaactggagtccggtgtttgcaagaaaacgctcgccttgaagccaagtcaagtctaagtcagtgtctaaagaaacagaatgatgtgattctggaagttcccagttcaagcttctcagaatcgcctctgtgttgaactcctgcagcttcatggcagagggatccaaatcttgaagggttacagtagggatcttgtcttgtggcatgagaaactcatctgcattcacactactgcctcctgctggtgtctcataaggaggcttcatttcctcctccatgagagatggtgcagaatttgcaacataggaactttgacttggcaatggttgttgctggagaaagctattctcatacagaaccggcttcgattcaaggacctctggaacatcattccaaggaagcagagagtcaaacgcagaggaggaaatgggaggatcaaatcctatacgcgtcttttttgttttcgga

SEQ ID NO: 147951 - DNA, 548 bp, Arabidopsis thaliana landsberg; identical to SEQ ID NO: 4122

SEQ ID NO: 147952 - DNA, 1045 bp, Arabidopsis thaliana landsberg
  unsure (1)..(1045): unsure at all n locations
acaaacaacaacaaaagaaacacaatgcagattcacaaactctgttttcttgctctgttcttagctaatgcagcttttgccgtcaaattcaacttcgattccttcgatggcagcaacttgttattccttggagacgctgagcttggtccttcctctgatggcgtaagccgatccggagctctttccatgacccgagacgaaaccccattctctcatggtcagggtctttacatcaatccaatccaattcaaatcttcaaacacttcttctccttttgattttaaaacttctttcactttctccatcactcctcgcaccaaacctaattctggtcaaggccttgccttcgtcattgtcccagccgctgataactccggcgcttccggcggaggatatctcggaatcctcaacaaaaccaacgatggaaagtcagaaacnaacctcatatttatcgaattcgacacgtttaagaacaatgagtctaatgacattagtggtaaccatgtcggaatcaacatcaactcgatgacttctcttgtcgctgagaaagctggttattgggttcagacattagtcggaaaaagaaaagtttggtcgtttaaagatgtgaatcttagcagtggagagaggttcaaggcttggatcgagttcagaagcaaagactctaggaataccattaccatcgcccctgaaaacgttaagaaaccgaagaggcctttgatccaaggttcgagagtactcaatgatgttcttcttcaaaacatgtacgctggttttgctggttccatgggacgtgccggtgagcgtcacgatgtttggagctggtcgtttgaaaactaagtaaaccggttcggttcggttcagtttggctaggtatcgtttgctttgtttttactttttaataattgttgtatactactcagtggtaactagagtgaataattatggtttgaataaaacaagccaagtgtgtggcttaattactcggcattgccatatttgtattcagtctgattaattcagatatatttcaataaaaaagaac

SEQ ID NO: 147953 - DNA, 687 bp, Arabidopsis thaliana landsberg
ctagggtttatagacgaagaagattcatatctatcgggttctttgatacgtttctacggagaattcaggtgtttggaagacgctaatctcgtgttacaccagctctctaatgctaacactgttgcttgggcagcgaaagttactaacgattacagagaaggagagtttcaagaagtaatccgcgatttcatcgaaatgggtaaccatggaatcaagaagaacgtctcagtgttctctaatgttctaaaagcatgctcatgggtcagtgacggtgggagaagcgggcaacaagtgcatgcgaatgctataaagctcggatttgagtcagattgtttgatccgatgtcggttaattgagatgtatgggaagtatgggaaggtgaaagacgcggaaaaggtttttaagagtagtaaggacgagactagtgttagttgctggaacgctatggtcgcaagttatatgcagaatgggatttacattgaagccattaagcttctctatcagatgaaagcaactggaatcaaagcacatgacacgcttttgaacgaagcccaccttcagatgtaactaactgtagataaagaaaatgatgaacctgatatgtaaatatctatatatatctatatatatatatatatataagaagagtatttagatgaaaagataaattgattgtttggtttacaa

SEQ ID NO: 147954 - DNA, 455 bp, Arabidopsis thaliana landsberg
gttttatatgttttgtaaatttggcaaaaactccctccaaaaaagaacttagttgactgagaaaactaagcataaagatctccgatcggaatcttcttattcgccatggatgctctttctcaggcgatcagttccgggatctccgttccttacaagaacaattcttcttctctcgttccttctcacggactaccctccttaatcctccggaaatcgagatctccggtgaatccctcatcacgatctcgcgtctcggtgcgagcttcggagattcaacacagcaaaacctcagcttcatcgatcgatctcagcgatccagattggaaattaaagtatgagaaagatttcgagcaacgattcagcatacctcacatcactgatgtcttacctgatgctgaagccattcgttcaacgttttgtcttaagatgaggtcagatcactactttagcttgag

SEQ ID NO: 147955 - DNA, 674 bp, Arabidopsis thaliana landsberg
gataagagatgctttgatcgagaaaaggattaaacgaagagaatcggttggaccggcatcctatggagaagtaagaggtgtactaaggaacgacttggttcgagctttggctcatgctcttcctctcggcactctccggcttggttgccaaattttgtcggttaagctcgacgaaaaaacatcgtttccgattgtacacgttaaaaacggagaacctatccaaacaaaggcacgtttaacaacagtagatatatttattgatcaattattgagtaagtgccgtagtggaattttttagtatatactttatattagccgacagtgacgtttatgggtcgtgatcggatttaatggtttgtgtttgtttgttttacactgaaagcaacatgtttagcatgaaatgcatggtcttatgttctgataatatacttttcttttaatttaggttttgattggctgcgatgggtcaaattctgtagtctctagatttctaggattaaacccgactaaagacctcggttcgcgggccatcagagggttcacaaattacccggacgaccatggattccgacaagagtttataagaatcaagatggacaacgtcgtaagcggacgacttcctataactcacaaactcgtcttttggtttgttgttttgctaaattgtccccaag

SEQ ID NO: 147956 - DNA, 669 bp, Arabidopsis thaliana landsberg; identical to SEQ ID NO: 24722

SEQ ID NO: 147957 - DNA, 442 bp, Arabidopsis thaliana landsberg
tgttcacgcaaaaaaacaataaaaaaactttgggtgggccttgtaacacatgacgccgccgataaaaggaaatctcacgatcgtatcatctccgaaacaaaaactcgtggaggagatatgcaattgctgacgctaaatccggcggccatttccaggacgccgccgcaagccatagacccttcctcatcctcgagtcttcttcttccttttcctcaggtgatttttgactttttctcctccttcgatttttaatctcgttctttgttcttcacacgcttatttgtttatgtttactcattgtatcgatgtctctgctccgaattcttttggcagattttgagctcccaacgcgctcttggtcttgtagctaggccttgtaatccacttcgacgaggattatctaggtctttatcaagtcgacagcttttccgacgatccaaag

SEQ ID NO: 147958 - DNA, 742 bp, Arabidopsis thaliana landsberg
cgttctaacaatgtggaagcagcggagccatgaaacccaaatacaacgtccctcaccctcacttggtgacaatccacctacagtttcggctgaagcaaggtcgtctttctccactggacaatccatgggcaaactgaaatctgatgtaattattgcgaaggagagaagtacctccaatcatggagtttctgccctgacaactgcagaaagctcgagcagcagtacaacaggaggaactttgatgggggtgatgagaggttcttttggaggaactttgggtggagcttcttcttcagctagtgtacaaatgccgccaatattaccttctgcttctccagcttcggtttcagtttctgggagtgggagaagaaggttctctgaaacaccgactgcagggcctactcatagagaacagcctcagacatcataccgggaccgtgctgcagaaagaagaaacttgtatggctcatcaacatcaagtggaaatgatgttattgattcaagtaagagcccttgactctagacttttctaaaaatagaatcctgaaatgaggtttttattgttgttataattgggaaaatggttcgtttaaatgaaggtgaggatttaatggggttcaggaaaggttcatcggatccaacaccatttcctcctggtgtggctgtacgtgggattacagcaagcaccgaagacagcagcttttatgtgttcccagaagacaccccgatagatgagagtaac

SEQ ID NO: 147959 - DNA, 1660 bp, Arabidopsis thaliana landsberg; identical to SEQ ID NO: 36947

SEQ ID NO: 147960 - DNA, 2570 bp, Arabidopsis thaliana landsberg
gtacctcaaactaactttcatctgcctgttggtgtgcgaaacagggatgattcaagggaaagttatctgcggaaagaagttgagatattgagaagtaaaccccattggaacaaagcttacttttacttgtgggatgaggtatgcttcattaatatttttcactgattgtcaaaaggatgtagttttactgtggtaatagtaacattctattccatttctatatctcatgtaccatcgttgatgtgttgtcttacttttaataactttttgacatctttcttattactattcaattttttttggcagccactgaatatggagcactttgacaacgttcgcaagatggccagtgaaatttacgcctatgccccggattctcgtgttttgactacatactactgtggtatggtttattttttgtggaattcacatgttttaattagtttctgtctctcaaatttacttcctattttctgctggggccctgttttattggttctcatggctttgtcttcctgttgatatgagctccaaaattggtcaatggtgaaccataaatgtagtttgtatcagtaggttgatcagtataccacactatgttattatgcagcccataatattagtttattgggtaacgttagtttgtaagcagttttcacaatggtctggtagttgtatcatatgcttcattacagagcttatggatattcatacatgtatgttggtgaaaagggaactgaaatctactaggttaaactgtgactatgaattaaagttcataatttaacaatgctttagctacttgagaagtttagtcaaatagtcttactcttttttttttgtaggaccgggagatgcacctcttgctccgacaccttttgaatcttttgtcaaagttccaaatctccttcgaccctatactcagatatactgcacaaggtaattgatcattcaaattctcttaggtggcagtaatttaatcattcaaataaattgccttctcttacttaggttttgtgattaatgaggacaagatcttaaccttaccaatctttaattttaatatccggtgggtgtactatgtgtgttgtgtttatacctattaaaagacacctaattggttcagaataaattgtatatcatctgtcagttaacaaaaaaatcatttcctttgtcaatatattttgagcaaatacgtctttggtcttaaattttcccttttccgccactcacctacttggatagacatggaggcaggtgagtttagtatatgaatctatgatttaagaaagtctgatgaatttggtgaacttatagagaaatctgttttcaactaggctctcgttactttaatcttttatctcagtgttgttaaatcatggtttgatattcagtgagtgggtgcttggtaaccgggaggatttgtgtgaaggatattcttgacgaattgcagacagagaatggtgaggtagggtctctcagatctccatcaacccttttacttcttctttagagaatattatccattgacccaagtctatgttattctcaatgaggtttgaaatcgtctggtccatacacctgaagtatacttaactgaatagaaataaagactagagtttggtcaatatagttaattagttatcataagctttgaaaacgtttgcacgtgtacatgaatacatctagctttggtagtaatggaatcatcatatgtcgatcaaagtactgtagttatggaatggttaaatttgattcaaggtcatcttaatgatgtgctcattagtggtcctgtatgtgttagcattttagcaacaagaatcataaagaggacttttcttgctggtgcaggaatggtggacatacatatgccttggaccttcagatcctcacccaaattggcatctggggatgcgtggtacacagcaacgggcagtgatgtggcgtgtgtggaaagaaggtggaaccgggttcttgtactggggtgcaaattgctatgagaaggcaacggttccaagcgccgaggttattttcttatccttttttctgttgtaaatgtttcttgatcgattgcttcatgatattatataaccaaatgaataggtaaagtttaggcgcggtcttcctcctggtgatggagttctttactaccccggtgaagttttctcatcttcttcagagccagttgcttcacttaggctagagcgccttcttagtggcttacaggtacgtcaactttatagttttaccaatcagataacaacgaaaaactgttccagttggcttatttggagaatgaatcaggattatgagtacttgaagctgtatgagtcaaaatacggaagagaggaagcgatggggctattggagaagacaggggtgtacacggggccggagcgctacactttggaacatagaccgatcgatgtattgcgaggagaagtgtacaacacatgtagaccatcttgagtaaccagatcgtttagtatctataaacactctcggttagccctaagttaataataaaagaacataacaagaaaactctaacaatgtctagattaccagtg

SEQ ID NO: 147961 - DNA, 453 bp, Arabidopsis thaliana landsberg
  unsure (1)..(453): unsure at all n locations
ctctctcttctctctgaagacagtacttgtatctgtccggcgttaaaagcttcggtgtggtctcttgacttctctgagagaagaaaaggaagctgagtctcattttagattcagctcacgaggaagtgacgacgatgtctcattctagaatactttcgttggaacctgctatagattcaatcactggtcgatttcgtgatttacagagaaatgatgatgacgtcaacaaacctgattttcgagaactcgatctaggttctcctgtttctaccttaatgccacgtggctctgcttcttcttccgctgctgcgactcctactagcagctctggctcttctggctctgcttctggtaaaccgtcggtgagttnnnnnnnnnnnnnnnnnnnnnnnnnnnnnnncaagagtcattccggtgagctttctagccccggatccggaatgccgaccacga

SEQ ID NO: 147962 - DNA, 715 bp, Arabidopsis thaliana landsberg
gagggaatcatccctccttttgaccctttttttaccaatgagattggtagtaacaaagatgagagaaatggagaagaatcaggaggatcttcaagtgatggtgaaaatacagggaaacgcgttcgggtctcagatgaagatgaagagaaagttgaagggtatgaacgaaattggagtacagataaaggtatgaatataaacgcaggatctgaagatggagcaagctctcctgtatccacttcaccaatgcttcgtaaatagaggtaatcaagctttacctctgtgtttctctagttgctaaagcaagttgcttgcttttcaagaaaccgttctcagccctaaagctttacctctttgtttttttttacttgctagagaaggaaggacttgcacctggccaaatggagtttgtgctttatcattaaattaaaaatgtttcatataattgtgggaaaaaaaatccgaaaaataacaatcatcttagaaaattgtgagtttgagcactagatttttttattttatttttttatttttaaaattctcctttttagttgtatttatatataccagaatggtctggatatcaccagcatcacatattttctctcttttttatttttccttttttgttataaaaaaagatttggaccacgaatttgtaacgtatatactgttgtcggaattatttttccttattttattggttgattttcat

SEQ ID NO: 147963 - DNA, 468 bp, Arabidopsis thaliana landsberg
tctctctctctttcgctgctctcacacgcaaataatggctcatctcttcagggagctgtctctgggccactccaagagagagtctacgccgccgccgccgtcacattcggcgactccacgttcttcttcaatgtcttgcgatctacctccatcaccactcggacaactcgctgtccaactttccgattccgatctccgtctcactgcttacgagatcttcgtcgccgcatgtcgtagcgccaccggtaaacctctctcatcggctgtttcagtcgctgttttgaatcaggattctcccaatggctctcctgcttcgccggcgattcagcgttctctgacctcaaccgccgctagtaaaatgaagaaagctttggggttaaggtcgtcttcttcgctttcacctggatctaataagagttctggttctgcttcgggttctaatggtaagtcgaaacgtcctactactgt

SEQ ID NO: 147964 - DNA, 1388 bp, Arabidopsis thaliana landsberg
gaagtgcagatcaaaagaaagaaaagttggtttacgcatacaaaagttgatgaaataaaaagtatttctggtgctggagtaaagaaacgtcttttagatctgctttccaaaagcatatggcgaaaagtaagagtaaacaaaggacgaagcattttgtgttgttcgtgtgaccggaaaattcttaagtttttctttttggtgttgtagtagtaatgaatgataataaatattttaaagatttttactacatgatacaaaggtgtaaaaaactgaaacaatattatcaatatttttccttcaaatattatcaattatttatgaagattagtttttagtgttttatgaaattattcggtaaaaaggttaatttattcattttcaatgtttttgtagtttcatcattggactatgccccttgtatattaatcttaaattagtcgttaagtacttcaaattcgaattcaaacaggttatgtagtagagtaatttatgtaagtgtaaggttcttgacatgtgccaagaatacaaatgtacatgagtgacaatattattatctaaatattttcaaatatttaaaagcttatttcgaaatattttaggatccttttatgaatataagctgcttatatatatgcctataacattcattttcaaatcaaaagctccaacatattaatgtgctgacaaacaacttaatgtttgaattcacatatgatttatattgaaagagtctccagctatcttagatagtctccctagttaagggattaaaggttatcatcattagcatataattggtaccataatatgcaccaatactacagagcctaatatacatctctgtggctttgcttttctattctcttttggtattgttgtcattaaagaaaaaaaaagttggaattgaggacgttgcattgacaatgcaaatggaattgggcttagccattaagaagctttttcacaactttagtaaagaagagagacttatataaagaagatgtctatcaccacttactcttcccctctcctctcttttcccaccaattctcttctttcttgtgtgttcacattcaaagaaaatggataatcacacagctaaagacattggtatgaagagaagtgcttctgagctggctctacaagagtatctcactacaagccctctagacccttgtttcgacctcatgaaccgggttagtccttttgttgtctctcttattcgtatcattgttgcttgtgtctatatcaagatccagagatattgtagtaattaagagtctagtttcttttggttgtaggattacacttgtgagttaagagatagtcttttgtggtctgagggattggtttccgctggaccttttcgcgatgcacagtcctcaatc

SEQ ID NO: 147965 - DNA, 1925 bp, Arabidopsis thaliana landsberg
atgatatttcggatagtaccgtgccatcatcgcaaatggcgagggagttacggctaccagagacaacggagcgaacagagtaaggctcgagagcttcaacgacgcaagcccattccttttcttcgttggtaccaattcctagttgcccatcttctccagagcccctggaaaacagacaaaagatggtaagagagtttaacaagagtaagtgaaaaatcgaaactttgataagtagatagaagagaggtgaagagtattcgaccaggctatgattgaagtagctgtaaccattagacacagagaaagagagaggagagagaggagagagaggagagagagaaggtgaatgcacagagagacaagcgcaaaagcaaagcagtgggattcgagggggatggtaataataggaatagcgatgtgtttatatgttaagtgtatgtgtttaattatatttaattcatattattcctaattactcaatacattgatttccgtatattcgtatttctataaacatgctcaaaatatttactgataatgtgtgtttggagttatttttaagtttacagcagattactattttaaataaaaaaacttcttatacaaatgtacacatggaaaacatgaataaaaaaatggaacaatagaaaaaggataatctgtcaaaaaaagaagaagagaggaataaataaggaaaagagaaataaatgaaatgtacggaaagagacttatgtgttgaattgtctacaaaaagattttaagagtttaaagctttttttttcccttgtatcagattctttttttttttttgcttaacatcaactttcatttaccaaatgattacatccaattaaaggtacataacattctcctctatcaaattggacccaaatgcaatggtttgatctagtatcccctaaaacactatcggatccagcgctacctgatcgaggaaccattgcatttttaaccacaatgagatagataatactctacaaatcagaatattatcatctctttgaccacctacatagactctaagcgacacgagaacaactactaaaacggaaaagaccaaaacctagtctggagacaaccaaacaattaaccattgaagaaaagtggaaggcacaatcgttgcattggtttccacgcttttctctctcacttgaaggcgatttcttcttctcagatctagatctttaggttcagttgctcttcactctccggtcgtagttgttcaacgtcggtccaggagtgagtctttgcgttctctccgtcaacggtggtgtggcgatttccctccgatgtggttgtggctcgagtttaggcggaggaggatactaaagtggttgtctcacggttatggacggcgtgggtgctttaggtcttcacgctcaaccgccggtctcgcgctgtgtccacggcggaagttggagggttttcggtgggttcgttgtttgctcggtggttagctgcagattcttttggatcttcgagggcggttgtgggttttgggtcttgaggtttcgggtgagctccattccttagatctgccacaatttagattccaccgaaccggatcgattcgttgaagctcaaggatcttggtttgatccggattggaggagaagggtttccgtccagtgagtcgggttgctacttcaggattcggctccgtcgatgtgttgcgtcggagcgactagctttctgggagcctggtgttggtttgttcccccgttgggtttaattcgaggccgaaacccgttctctttcgtccgaagttctcgggcatcggttgcggcctcgaaactgtagggcttgagcccgccggatctaatgctccggtctctctgctagcttccatcaacaagcggcgatcttccttctttgccgacatgttttccgatttgctaattttgtaa

SEQ ID NO: 147966 - DNA, 1682 bp, Arabidopsis thaliana landsberg
agttacagacgatttggtcccctctcttctctctctgcgtccgtcttgtgcgtcgatttgtctccatctccctctatctccgcctactttctcagaattactccaattcgccgacttcttctcctctgttctctgcatttggattgatgccacttaaatactttgaggatctcactctctctttctctcttcgctgacttcgattgcttcagtaccctttttctcaggtcagctacgatgatagctttattcagacaagaagatcaaagttttgatctttttgttttggttttcttaagagatggttaattaggtcttgagtgcgctgttttgaatcgttcttcagtgtgattaaacaattggttttgatttgactaatcatgttgccattaaactaagtgaaaatctctgctttttttatattgcatattgatgattgagacattgatttcttttctatttctttatttcccagtttctaatttgggaactgaaatgttttctaatttaagcattacaaagtgtacaatttttgtttctggcaagtttttcttggcctaattcgtctattttatgaattcacctctttaggatcaagacttcgtaaaagattgtttctgtaaaacgcaacaccatgcctctgtttgagcttttcaggctcaccaaagctaagcttgaatctgctcaagacaggaacccttctccgtgagtctcattcacttgtctctctttaagtctgccatgtttcaagttcatcaaattcatgtgttcttttgttgtgtgtgaaaaaaaaaacagacctgtagatgaagttgtggagctggtgtgggaaaatggtcagatatcaactcaaagtcagtcaagtagatcgaggaacattcctccaccacaagcaaactcttctagagctagagagattggaaatggttcaaagacgactatggtggacgagatccctatgtcagtgccatcactaatgacgggtttgagtcaagacgatgactttgttccatggttgaatcatcatccctcccttgatggatattgctctgatttcttgcgtgatgtgtcgtctcctgttactgtcaacgagcaagacagcgacatggcggtaaatcaaactgctttcccgttgtttcagagaagaaacgatggcaatgaatcagctcctgctgcttcttcgtcgcagtataacggcttccaatcgcattctctgtatggaagtgatagagctagagatcttcctagccaacataccaatccggatcggtttactcagacgaaggagccactaatcactagtaacaagcctagtttggtcaacttttcacatttcttacgccctgcatctttggccaagactactaataataaccttcatgacattaaagaaaagagtcctcaaagcccgccaaatgtgtttcagaccagaattcttggagctaaagactctgaagataaggttcttaacgagtctgttgcttctgctacgcctaaagataaccaaaaggcttgcctaatatcagaggactcatgtagaaaagaccaagagagtgaaaaggcagttgtgtgttctttctgttggctcgggtaatagtctcgatggcccatccgaaagtccttcactttctttaaagagaaagcattcgaatattcaagacattgactgtcatagataaaga

SEQ ID NO: 147967 - DNA, 475 bp, Arabidopsis thaliana landsberg
tccagtaaagaaggtctcctcgctttctgtccatcaaggcgaggtatcaaattccgctgagaacttaattatagggtttgatttgcaattttggcataagacataactaaattacactagtttttgtttttccttgtcaggtttggcagatggaatggaacatgagtggcatgactttagctagcactgcaagtgatggaatggtcaaattgtggcagtcaaacttaaacggtgagtggcatgagcaggccacgcttgaaccagttccctcctaagtgccgcatcaccgttttgtccaaaaacatgttcgttccatttcccacacactatttgacagtattgctcagttttgtttcgactttaaagactagtctacaagttgatgtgattttagacgtgtgaaaacgaaacactgtagcttagacccaaaagcataaacgaaatcatgtagtctttgttaatttggtttggtgtc

SEQ ID NO: 147968 - DNA, 854 bp, Arabidopsis thaliana landsberg
catcgcgtttattcccttcgcaccgaaagtacaagagccacatgataatttcctcaagctcttacagtttctagcgaacgattccatacctagatctgttatctctcgacaaccacgaagcttgactcgaatcagattcgagcaacgaatcgagactatgaataaagcttcatcgcttaagctaaaagatctccgatcacaacgaagagcgagctttgttacggaatcgaatcgattgaagatacatggtaagaaagggagaatctcagatttagcgtcaagtgataaacggtgacgattctgtccgtcgactaatagccaccgtttggatacaagagagcatcgtttccgatctccggcgctgagaaattgaaagatatgagcgaggcaatcgtctggtagatttgccgtgaaatcgtaatctccgtcttcgaaaccaatcgattcgcaatcgagaaattccggtgaccatagacataaagaagtatcgcgtacgtttggttccgccggagacgacggagcttggcccattgttgtgtggttgagtattgggtaaggttcggttgagtcgcgagtcaccgagtcacacacgactcgtgagtttttttttttttttcagtatctttcgtttttaatgttttttctgcggactgtagtcaacaactctcaccttcgaggccaccattttttctcatacgtttggcccaatgggctttattccactaattcgttgctttccttgagtttgaccttcaacatagccatggtcattttcttccattgtagtgctcagtattaatgtaccggaatattcactaatgggccataaaggcccaataatgatattaatttga

SEQ ID NO: 147969 - DNA, 862 bp, Arabidopsis thaliana landsberg
aacccaaaacctcaaactttttgaatccgaaacgagaaaacaaactatgttacagtcaattcatcttcgtttctcctccataccatcaccttctcaaagagaatctctcataattccatccgctatttgctcatttcctttcacctcttcttcgttccgtccaaaacaaacccagaaactgaagcgtctggttcaattttgcgctccttacgaggtcggcggtggatacaccgatgaagaattgttcgaaagatacggaactcagcaaaatcaaactaatgtcaaagataaattagatccagctgagtatgaagctttgcttaaaggaggcgaacaagttacttccgttcttgaagaaatgattaccctcgtatgtagtttgagttatctttcatcaaaacttgctttgtttcgtttctctaagcttggcatttcgtcgaacagacttataggcactaagctttatgttacatgtaatcgttacttactcgttagtacgtatttctacgtttccatagagttatgttttcatctgggcttgctttagtgttgtttttgtaagctaggcttttcgtcgaacaacttaacggcgttaggcttagcagtttttggggcatattgttcactttttaatacatagaatcgttacttgtttattaagggaattattggttccgtaatggcttgatatgtctctgatgtgtagttggaagatatgaagatgaatgaagcatctgagaatgttgctgtagaattggctgcacaaggagttatagggaaaagggttgatgaaatggaatcagggtttatgatggctcttgattacatgatccaacttgcagacaaagaccaagacgagaaa

SEQ ID NO: 147970 - DNA, 464 bp, Arabidopsis thaliana landsberg
ctggtcaatcctctgagaaaacagatgtttttggcttcgggattcttcttcttgagcttgtaaccggacaaagagcttttgagtttggtaaagcggctaaccagaaaggtgtgatgcttgattgggttaaaaagattcatcaagagaagaaacttgagctacttgtggataaagagttgttgaagaagaagagctacgatgagattgagttagacgaaatggtaagagtagctttgttgtgcacacagtacctgccaggacatagaccaaaaatgtctgaagttgttcgaatgctggaaggagatggacttgcagagaaatgggaagcttctcaaagatcagacagtgtttcaaaatgtagcaacaggataaatgaattgatgtcatcttcagacagatactctgatcttaccgatgactctagtttacttgtgcaagcaatggagctctctggtcctagatga

SEQ ID NO: 147971 - DNA, 438 bp, Arabidopsis thaliana landsberg
atgaagccaaatccatacaagctgctttatgcttatgagatgagacgacacaattggcgaatggcggcaagttacatgtatcagttttctgcccgtttgagaagcgagggagcatgcaaggattacaaacacatgtccctagttttgcaagagaggcttaatggactttctgctgctatgaatgcattagcccttgttcatcctgggtatgcttggattgatccagtaccagaagaaaccacacgttatccggttaaaaaggctagaagagcagaagaagaacaatgttagtcctcacgaccacatattgtacttgtcttttctacaccctgaagcatcattctgttttattgttgaactatcacatgaataacgacattttgaattactttatctgcagtaaggagtaatgaccagcccaaaggggagaagagttgc

SEQ ID NO: 147972 - DNA, 1561 bp, Arabidopsis thaliana landsberg
  unsure (1)..(1561): unsure at all n locations
atcattctctctttagatcttttttttctttttctctgtaacaacaaaacaaaaaaaccactctttcgaatttgatcagattcttctaaagctttagtttttacgcatcaccgattcatttgatccaaagggttttttatttcttctacggtatgaatgttttctgcttctttctttctttataccgccgcaatttctgacttattaggacttatatgttttttctttgtcttgtaattagtactttgatggtatctcataaatagctattttatggtttatcagatgattgctgaatttgatttttctattgaatgttctgtcttatttatgtttggttgtgttattcttaataaactattcatgatcgcgtaaagattctttcttttaacaagtccaattcttttgttgaggttttgtttcctctatgtgttctgttttgaagcagagttgttaagttattttgattttggtttgtgatcatgaaatcgaaaaacatttattctggatccgatgttaatgtctttagtcatgatcctatctttttgtttgttgtacgcagatgcctaaagttgtgcttttttattatctgaatcaggaattagaaatttcccatttttttgtttctctgttttgttttgccagtagttattttaggattctacctcgaagttagtgcctttcaacttcctatactgaaaatatattagtatttgaatagcgttggtcctaatttttgtttgtttgtgcagagtttgtgagaagaggaacggtatttaatacacttacaaatttgatattggaagaaccaaagatgccctggacagcattcttcatgtttttcaacagaacttgcactcgtctggttgtctttttcctcgttattctgtaaatttgttcctttcaggtgagccagcctctcatttcacatcttgtgtttttgtcttacattggtaccttgtggaagcaaattttgttgttgccaccttatatacagcttcttgtgttaaaactattggcatctcttccttgttttgatggtgttgtttccggaattcggaataggggtttgttgttgtgcttattatactggttagtttgtgagaatgtgcattgttggaaacaagaagggaaaccgatcattgaaggaaataggaacttttatgatgactacatgtttcattgctaattaccaatccgttcaagtttgccaggtacatgcctctctttgatttagtatttcctaacacttctatcgcttaggcaacactgatttatgtcattaaaagaactctatcctcttgatgacatgtggatagctatttgttagagtattaaccatagtttttctgatattcaacctttcttataaatcattgcaggctgaatatntcagacagttgcttaagcctgtaacgtagtctagcgtctggagttttcggaaattggggttttgagcggctatctacttttgatttcgaaaaatttactgtgaagttgtaaagagtctggtattctgaagagctgtctgtgggggagcttctggtttggggggtaaggg

SEQ ID NO: 147973 - DNA, 309 bp, Arabidopsis thaliana landsberg
catcatcatcatcatcatcaaccaatagcagtggaaggtgtggaaagtggagtagcttcacactcgtgtattcatgatcagattatagatcagagcaagagaccgggtcggaaagtgtattcggttactcctcaggtttatcatgagccaaggagtgttgaaaaagcttttcatcataatggaagggttttgcttagtgtttttgatgagaagaaggatgtgaaacaacctattaggatttatttgaattatgatgctgttggtcattcgcttgaccgagattgtcaacgagttggcaatattgtcaag

SEQ ID NO: 147974 - DNA, 2241 bp, Arabidopsis thaliana landsberg
actcagcctctccttcgccggatcctcaaccttctcgttcagcccctctagcagacgcgcaacggccttgacgacgcgcgcctcgtacaccccgacgccggcgactgagcgcgtgatttcgatagcgtcgtacgcgctgccgttcttcaattctatgcagtacgggcggttcctgttcgcgcagtacccaaggctgggattgctgttcgagccaatcttcccaatcctgaacctgtacagatcggtgccgtacgcgagcttcgtggcattcttcgggctgtacctgggagtggtgaggaacacgagtttcagtaggtacgtgaggttcaacgcgatgcaggcggtgacgctggatgtgctcctggcggttccggtgctgctgacccgaatactggatccgggtcaaggaggcgggtttggaatgaaggcgatgatgtgggggcacacgggggttttcgtcttcagctttatgtgttttgtgtatggagtcgtcagctccttactcggcaaaactccatacattccatttgtcgctgatgccgccggtagacaactctaattccggccaatatctacctcactcagtgttcgggttttcgattctagaatcggttatttctggtttataagagagaccaaatcaatcagtgttgttaattaaccattaccgttttaaaaaaaatattttttgttatactcccaacatttgatttggcccaatatgaaagaacagtatggggggcctttaatgaagctatcattgactgagtataattttacaatcgtcggtgaaaaggtaactaagtaaacggtaaaaaaatgagcgccgtctatcttaccgcgcaatgaatgagaagtcaatttgggaaactgatcggagaaaagagggagagagggtttctcagctgaaatcaaaatgggtatcatcagatttcaaatcctgaatccgacgaggatttgtaggtctactatatattatatgtcttgccgttatctgccatcatcatcatcatcatcaccactccgagtatcttcttcttcatcgcaaaaacctagtttcgatttctccagaaggtggcattttggtcaccctgatcatcaccagcaatatcaaaagcctggagaagaaggggagaagatattccggctaggtctcaccgcagatataggtttatctgtcgcaaaagctctcaccggttatctctgcggcagcaccgccattatcgccgatgctgctcattccgtttccgatgtggtaatgaaaattctcatttgctgaggacggaagatgatccttcctttggttttgtttctcacatgatcatcatcattatatctcaggttctaagtggtgttgctctagtgtcttacagagctgcaaatgttcccaaggacaaagaacatccttatggttaccttttctcttctctttcctttgatgtaaatacattataataacaatgaactgaatttccccatgcatacaagggcaggtcatggtaaatttgaaacgcttggagcacttggcatctctgccatgcttttggctactggctctggtattgcctggcatgctttagaccttttatctgtatgaccaccactctctcctttctctttcttttttaattactcatctccacctccacaaccttgcttcattgtatgagaatatattgcacttcatgtttatcttttatcgatcctccattgtttgctttatttgggatataataaattcaatttacagagttcttctcccttcctttctcatttgcagattgcactgtccgcagctcctgaggtaattcatagtggacatcatcacggcattgatatgaatcatcccattctcgctttgactgttactattgcttccatttctatcaaagaagggtacaaacatcactttatttatcactcttttcaatccaatcaagtttatcataccccattgctttacgtctacagcttttgctctaccgtcgcttcttactagacaattgcaaattttcactttagttagacttgcttctcagaacctaccgccccttttcttttgatccttcatcccttttctcttcacttattttgatccttcatccctgaatcttatgtttctcaggctttattggatcacaaaacgagcaggtgaaaaacaagggagtggtttgatgatggcaaatgcttggcatcatcgatcagatgctatttcttctctagttgcacttgttggagttg

SEQ ID NO: 147975 - DNA, 3492 bp, Arabidopsis thaliana landsberg
aaagcaaacactctatatacaatcctaagatgaaatgcaatctacatgacattatgtttttgtgaaatcatttcctgaaaattttcgaatttttgtggttttttctctaccttagatgatgtagaatatgaaataagaaaagtgaacacaatgttaaacatgtcttgaaccctctccctaacttaaattacacagtcccttgtgtaataaaaatctgagaaagaattcaagaccaaaacacgaaacacacaaagaaaaataaaaatgctatggtatgtacgatggtggtggtggtgttaccttaggtgaagtaggtggagacaaggtcatcaatgctctcctttgtgtagctccagggagcgggtcgtgctggacttggattagttgaaagaagtagtgaaaaaagaaattttgaaactgcttgatgttggtgtcatctaccctatccctgatagtacttgggtttctccagtgcattgcgtccctaaaaagggtggaatgactgttgtcaaaaatgaaaaggatgaactgatccctactagaactataactggtcatagaatgtgcattgactataggaagctaaatgctgcatctaggaaagatcattttcctttaccattcattgatcaaatgcttgaacgcttagctaatcacccatactattgcttttttgatggatatagtggtttctttcaaataccaattcaccctaatgatcaagagaaaactactttcacatgtccttatggaacttttgcttataaaagaatgtcattcggtttatgcaatgctcctgcaacatttcagaggtgtatgacctctatattttcagacttaactcgaggagatggtggaggttttcatggacgattttttggtctatggccactctttctcctcatgtttgttgaatcttagcagagtattgaccaggtgcgaagagacgaatcttgttctcaattggaaaaagtgtcatttcatggtgaaggaaggcatagtgttgggtcacaagatatcagagaagggtatagaggttaacaaaggaaaagttgaagtgatgatgcagttgcagccaccaaaaacggtgaaggacatcataagtttccttggtcatgctgggttctacagaagatttattaaagacttctccaagatagccaggccgttaaccagactattgtgcaaggaaactgaatttaaattcgatgaggactgcctcaaatcctttcaaaccataaaggaaactttggtatctgctccggttgttcgagcgcctaatctgggactatccatttgaaatcatgtgtgatgcatcggattacgcagtaggagctgttttaggccagaaaataaacaagaagcttcatgtcatatattacgccagccgaacgttggatgacgctcagggaagatatgcaacaactgagaaggagcttctagctgttgtattcgcatttgagaagttcagaagctatttggttggatcaaaggtaactgtctatacagaccatgcagctttgaggcatctgtatgccaagaaggatactaaaccaagactgttaagatggatacttttattgcaagagtttgacatggagatagtagataagaaaggcattgaaaatggcgcagcggaccatctgtcaaagatgagaattgaagaaccacttccgatagacgattcaatgccagaagaacagctcatggttgtagagttcttcgaaacagctctgagtccccgctttcaaacctcacctccagcttgttcttgattgtttgcttgagggcaagcaaagactaagtttgggggagttgataagcgtgtattttgcatgttttgagcatccatttgtcatcattttagcatcatatcatcactgttttataccatttcacaacatttatcatcactttgcatgtttaggatagttttgcatgcatgttgcatatttgcgttgatttcaggtgatttggagctattgacgagctatctggaagaagcggacctgatcatgacaaaccactcgacccccaggtcgagtaggagcttcaagatctcaagagaacactcgaccaccaggtcgagtagaggccttcaccattaccacctgaccatcactcgatctcatcactcgaccccgaggtcgagtgtcttcacctccaccaccagaccgccactcgatctcatcactcaaccatgaggtcgagtgtcttcacctccaccacctgaccatcactcgatcacgtcactctacctagaagtcgtgtatctccatcaccaccactcgactacatactcgatgacaagctccagagtcttctccattccgcactcaactataccctcgagcacaaggaagaaaagaagactccagctattcactcgacctctcactcgaccacgtgggtcgagtacagttcttaacccgtccaaatacttcgtcgttttgagtattagggtttcgggatatttggctataagtagcatgtacttctcattttcgcaaacaagaagttttttatctagttttatttccgcagaccttgtgttctagactttttttaatccggatttctctttatctattcagtattcagcttttgttcttgattttcgtttactgttgttcattctgttatcatcctgctgttacactgctgttatcatgtcttcaacttgttcaacgtttatgctttctgttatgatgtctgagtagtgaataggtttctgaggatgggttagagtagtgtagaattctcagtatgctaggtgattgagttgcagggagcgttttggctttaacttgttgactctgtaccaagatagaattccagagattcgtgactctgtaccaaggtattggttgtagggagcgttttggctttaacttgttgattcgtaatgcctgttaggttagctctcgtcaatggtgattgagtctgggactaggttagcttgagagtctctattgcggtggcacttagatttggttaatgaacttgttgtctagggttaatttattgagcatgtcaatcacctgtaaactgaggaaacgaaactactcaattatcccatccttaggaattctttatctgattgattttattgtttactctactgctgtgtactgcatcctgtcatctgttgcttagtttctacaattctttactgttactcgacctgatactcgaccacccagttgtctggcaacagactatgcagtcgagtatccctgtttcatttcctgtctgttactcgacctgtcactcgacctcacccagtgctctgcaaagagctgtgttggtcgagtgttttaccgtttctgtttgattttctgttttctgcatgttcacttaggactgctagaacacaccaaaacctgttatgcttggcttgacttagtgacttctgatcacatcttgattgttagcatcacacccatttggattgacaaccttcagtactataacgacatgatagtgctttag

SEQ ID NO: 147976 - DNA, 876 bp, Arabidopsis thaliana landsberg
taaggcagctataatgggatcaggaatgcgggagttacctcgaatgtattcaacctgtggacactttcaactctaacagatattgaggaagtgaatcaaatcgtgcgcatgttactccgtttggtcaacatgatcgatcttctggaccgtccacgctcaattgacgtcattatcagtcgcacaatccgagacattagaccgttccatcgggagcttcgagatccctccagcatcgatggcagtcttctacgtcggtggcctcctcctaaccaccgccgtctatgaccgcgtcgccattcgtctatgcaaaaagctattcaactacccccatggtctaagaccgcttcaacggatcggtttggggcttttcttcggatcaatggctatggctgtggctgctttggtcgagctcaaacgtcttagaactgcacacgctcatggtccaacagtcaaaacgcttcctctagggttttatctactcatcccacaatatcttattgtcggtatcggcgaagcgttaatctacacaggacagttagatttcttcttgagagagtgccctaaaggtatgaaagggatgagcacgggtctattgttgagcacattggcattaggctttttcttcagctcggttctcgtgacaatcgtcgagaaattcaccgggaaagctcatccatggattgccgatgatctcaacaagggccgtctttacaatttctactggcttgtggccgtacttgttgccttgaacttcctcattttcctagttttctccaagtggtacgtttacaaggaaaaaagactagctgaggtaaggattgagttggatgatgagccgagtattccaatgggtcattgatcatgagttcatgatca

SEQ ID NO: 147977 - DNA, 3263 bp, Arabidopsis thaliana landsberg
gaacagaggaagatagagaaagttggaaaatggcaaaccctagaagagtagtgatcgagaaccagagattgtcacctttaatcaacctactgaagaagcctcaagcgattcctctgcttctctcgttgttcctcttgctcacatggatctccctcaggttacaacactcttcacaatcacacgtctcttcgtcctcttcacatccgaaatcgacggtaaatagtcatcccgatttgaaagtttacgacgacgacgataaggctaatttggtccggttcggtttggcgtcgctttctcctgctcggaaagacgaccgtggttggttgcttgatcccgttatccttgctcgtgattctgagctcaaaggttctgatcaattcttacgaatgttaattaggaagttgataaacagcaattcgtatagggttcttgagtatattgaaactgagaaaatctgtagcttaaattatcattttcattttcttcctgagattaataatgtattgaggttaaaataattttggaagcatgtatcgagaaaagtatctatgtctttagtcactctaggaatgataatctttggagtgactgcctaaccttgaaggagactattgtgtaatcctaagtttctcttttctcggtactggagattcacatttcatgttttcacttgtttgaaggtggagccgcatcgtgtgtttccattcatgttggtgaaatacggcctggtggattgaggggaaaccatagacaccatacctgtaatgagacgtttgtcatatggggagccaagacaaaattcagggtaagtctcatcatccatctcattgattgaaacataatggaagagttatagtctgttgaacacctctaacagaaaggaatttctgtttttgcttatctaagtatccaatgcttcattgaatggtatgtgataactcttggtaaagaaggtggaaaggagagttcagagtttttcctaatgctatgccaacttaactaaacctgtgtgacatgatgtgtgtaagtagaggtttgaacagctgcaggagcaggcttatctttggttggtttgagggtttgggagtgtttaaggtgtctagacaaactctagatttcagttcctttgatgtggttttctgattttttgtcttagattctgcgttgggactctttttattagataaaggtgaaaatcccttctgaatctatcataaagatgttcttgactattggactaatatcatcagtcatttactcacggatcactgaaccactaatcactgtctaagaatgaaaaatcgagtttcttccattaagatgtttagtaatgtgactaagtgggcttatcttacttgtttgaacctttttcctgtgatgattgtgccctggttttccatttctttactgctctcgggtcaagatgaaccaaaatcatcaatcaaacattgtttatggacaaacctatatgaatgcagctggaaaaccacgaagtcgataaaggttacgccgaagtgttaattggagaggatgaggtagctgtagctgttagtcagagtggcacggctcatgctctagtaaatgtagatcctgtgcgttctactttcttcataggctgccaagaccatatgcagaacaacagctcaactagcgactacaaagtatggaatgatctataaaccaaagtgggttagtttagtttctcttgttcattcaaattttcattggcttttctttctttcgagcccttatttgtatagagtaggctttgttttgactggtcagtcatattgttactgagattataaacctgaaacttccaatgttgtgttcattgatatgatggtaagattagtctgatcagtgagaatcaattcgtatgtagagtttgttgtttcttcacagctgaatgtgcaatgcatgtctttctaaaaaaatcttattgcaatttgccaactcagcactgtaatcaatcaattacgaagtcttattatttatgatcaaaatgttttatgtattttaaaaacttcaatcacaattatatttgacagatggaaatatatctctacatgtaaaatttgtgagcagtgttagtttttctgcttaccgaaaattgttaaattaaagcataaattgttttcttcaaacgtgtaaatgatttatggtctcaaaacagagtgccattaatgatgcaattacaattactcgtacaaaaaatatctaattcttataggattgataaaaaaagctctaaaagttttctctgtccagcatgcacaaggtcatgaatcttaaagaacactcttaataatgcccttttgtttctcatagagccttgtgctaaactcctaaatgcctagtatttgattagggttcttaattttgttaatggaatccccatcatgttgtattcgaaggtctagttgaagtttatctagagttgagtgataatttactttgtaagccagtaagcactaattaaacttccaaataggaaacaaaacatgaaagacactataatgtctagccaaaaaatgacattataatgtctatagctaataagtaaagtgtcaatgctttggaatttgccatgtgcaaatggaccaaccttaaagtaaaaaaaaaaacgtaaaacaaaagtgaaaaggagaataaaataaaaataaagcatggagacctaaatcacaaaaagggtataatattataattttaccgttgaaatgaataatttcttttgactaaatgggaatttaaggttttagatagagagaaaaagaaagaggtgagaaaaacaaaaacagctaagaggaggaatatgaagaagagtaaacgagagaacttgctttctccttcatcttcatggcgggaaaaccataatcctccacggagaaactcaaactcctccgccgtctcctccggctgcctccccgggttcttcaacctcttcctctccaccttcaaccgccgcaaatccatcaccttgggatctaaaaagcgagaacaaagaaccgtcgtttacgcttctcctccgcaagattcatcaaacggacaaggcggaggaatcgttgcgccaccgcttccgcacaatgaaggagagggagatgcggcgagagttagtctagtcggagcactagagaaatgtgatcgggacttagaggagctaagtagaaccatcgacgtcattaaaactacttacattcttcacaagagacttgaggtttctccgccgaccacacgtgagaattttaaattctccggcaccg

SEQ ID NO: 147978 - DNA, 388 bp, Arabidopsis thaliana landsberg
tagtgaacatagtagtgatgaggatgatgaaaatgatgagcctcttattaagaaagcggcttctgctaaggctgttcagactgataagccaactggtgaacatgtcaaaacttcagattcttacttgtctaagacaaggtacattatttttcactatgtgacttactttgaccatttagttctgtttgattgataatattctttatggtacatggtttacagatttgatcaattcccactctctcccttatcgctaaaagccatcaaggatgcgggatttgagacaatgactgttgtgcaggaggctactcttcctatcattctccaaggtgaacttttcttcatgagccttgtttacgatgcaaaaagaaaaaatgccatgatttag

SEQ ID NO: 147979 - DNA, 209 bp, Arabidopsis thaliana landsberg
gatattttgttttctctcttaacgatggcgaagagtgttttggttaccggcggcgctggctatatcggaagtcatactgttcttcaactgcttgaaggtggttactccgccgtcgttgttgacaattacgacaaaacctatactgcttcgcttcaacgcgtgaagaaactcgccggcgaaaacggaaaccgcctctccttccaccaggt

SEQ ID NO: 147980 - DNA, 434 bp, Arabidopsis thaliana landsberg
gattaggtgtttttgggagggcgtttcagtctggaagtctatgctggtgtagagatgttactcggttctgcaaaaccgactacccattagtacactatgcacggatgttcaagttgacgagctgtttcgcggtctgcttaaagagcacatatacaggggatgatgagtacgttcttgaattctttcttcctccagccatcacagacaagagtgagcaagattgtctattgggttctctgcttcagacaatgaagcagcactattcgagtctcaaggttgtctctgaaactgaactctgtgaaaacaacatgtctcttgaagtcgtggaagcttcggaggacggaatggtttactcgaaacttgaaccaatcaggatacatcatccagcacaaatctctaaggattaccttgagctcaacgcacccgaacagaag

SEQ ID NO: 147981 - DNA, 515 bp, Arabidopsis thaliana landsberg
gagatcagacatcttcggttacaacgcagtctgaagatgaaaaattgagttctgcaaagggccaaagatcaaagagaaagagaccttcaagcttagtggacatggcttcattgaaagaagacggtgaagctacaacacattctcatcaggataattcaaggaacgacgagatgatggatgctaactggattttgaaaaagttgggtaaagattcaataggaaagagagtcgaagtccatggatctcaaaactcatggtaagtttgatcgtcttaactaataaagctcttgtggttggcctgcttattgcatccattaatctaaatgtctaaaatgaataatacatttactgttaaaggcataagggaacagtgacagacgtttctggagacacatccacattgtcggtttctctagatgatggaagcatcaagacatttaaacttgggaagcacagtgtccgcttcataccgcaaaagcaaaagaggtcaaggagctgattggaccatcgaggag

SEQ ID NO: 147982 - DNA, 1097 bp, Arabidopsis thaliana landsberg
ttgcaatattttcaacaggctcaagtggacgcgtatgctcctccgtttcagagcagcactgattcttttgggcagaaagaccaacaagctgttggctatatggcaaatcatgaacctctcaacagtccattgagtccgggttacgggttgcaaagtccgcggcacatgggaaactattttgcagtgccgcctggtgtaagagtaatgccgcagtatccaggatcacctcttgctagtccggtgatgccatcctcaccggttggtggaatgatgagccactttggaagacgaagtgaaacaaggtatcatcaacaagggccaagtagaaacactgggatctaccctggtggatggcaagggaacagagggggagccagcagcatcgttgatgatctaaaaagacattcttttcttgatgaacttaagtctccaaatgctcggaaactcgagctttctgatattgcagggcgtgttgttgaattcaggcagtgtttctgctccgaatctatcattttctttaattctgaagtagtgttttgaaaggttcaaaagaaatgatgtcatagtaatcttaatttactactcatttttctgaacttcagcgtcgatcagcatggcagccggtttattcaacagaagttggagcactgctccgatgaggagaaggcatctgttttcagtgaggttcttccacaagcttcaaaattgatgactgacgtttttggaaattatgtcatccaaaaagtgagccactttttcttcttctttttttctaagctgaaaagatcttgtccataaaatacattgtgatttttgaatcagttcatagaacatggaactccggcacagagagaagaacttgtgaagcaacttgctggtcagatggtttcactaagcttacaaatgtatggatgccgtgtgatacaaaaggtaaatttattaattttactttccttatatcaatgtcagtatcttgaagtaaattgtagttaagtttccatgtgcttgtttgtaccttatgatatttataggcccttgaagtgatagatgttgaccaaaagacagaactaattcgtgagctcgatgggaatgtgcta

SEQ ID NO: 147983 - DNA, 408 bp, Arabidopsis thaliana landsberg
tacccggataacatatatgcccatctcttatctatatggcaaataatttgtgggtcaaattacacctcttattatgcaactacgtgaagaactacacttacaaccttatgaaaaaatcaactggaacaaagcgcgacatctatgcgcaaaggtatggtttcaaatttactctatcatttgaagaatatgcaaccattacatcatttacccatgtaggaagacaagtactatccccatcctctagttcaagatttgatatgggatgctctccacaccttcgtggagcctttgcttgcaagttggcctataaacaaacttgtaaggaaaaaggctcttcaggtggcaatgaaacacatacattacgaggacgaaaacagtcactatatcaccattggatgtatagaaaag

SEQ ID NO: 147984 - DNA, 805 bp, Arabidopsis thaliana landsberg
aatgattgatattgcaggctgaaggatcttcaccagagatgcccaaaggagatggatgcttacgttggatgcatgtattactacaccaacgagtttgagttgtgtcggaaagagcaagaagcttttgagaaagtgtgtccgttgaaatgagaaagtcaagtttatatctgtctcctaataagcaaatgttcattttcactctggagcgttactctaatcactcttccatcgctgcctgcttcttttccttttctggtaatggaagacctttaaaccatgtaatattgtcgtgtttcctttgtccagttctcccgagggaaacgattttggttacttgtgcaattgactctcaagtacagagcttaattagtcgtaaacaaggttttctataaattatacacatatattgacattgggttttaactccaaattgaaactaaaataagtctatcatcaatcattagcgattttaaaatgtccgacgaaagaaacagacttttgaaagagcgatcaatatggatagagctctgtttttttttttttttttttttgtcgtcaaatttggttttgaggccaagtctatttaaatcaaatcataattaaaactattttacatgacataatgaaatcaagtactagttgtacaagaaacacaagatttccaaggatttgggctgacgaatatggcttacttttaaaacgtacagactgtctcatgcaattcgtttggtctttaatttagtggacaacgttttcgttggaagaatatgttatgcatgtttccaatgcagacgtcccttcatag

SEQ ID NO: 147985 - DNA, 833 bp, Arabidopsis thaliana landsberg
caaaccaacactgcagacatgttagaagaagcagtagaatacgtgaaagttcttcaaaggcagatccaggtaaattatctaagttaatatatatacacacaaaaccttttagaggaacccaatagatgaattaaaaatgattagtcaacaaagtatatagtaaaaagagttatgagttggtttattttggtgtggataatataggagttaacagaagaacagaagaggtgcacatgcatacctaaggaagaacaataaggtttgctcctgatttgttttatatttgcttaacggcaatgatctgatcgaaaaattcgaaagatgatcttagcttgaatttagatggatgtcatgttgaaaagtatattatttgataaatggatgtaggtgtaatataaaatttttgtacaataatgaagaaagttaaaaagaattaatgaaaacatatattctttatgatattagtgaaatgactttgatttcatgttgtttgattatagtaaagtattttcaagatgtgtattacagtgtttttaaaactcattcatgcagttacagctaacatactagattactaaccatcatggaataagattgcttagtggtgcaaccaatccgcaacgagtttgcaaacgaggacagaattgctcgatgttttgtcgaaccggcaagataatcgggtctttgtttattgcagtgtagattaaatcttatagcgaaaaagggttaatcatcttactaaatccgctgcaatcagattcgaaataaatcattccgcataccgagctaccaaaagtagtgtagtgtcaggagttcttagtgtaaagacatga

SEQ ID NO: 147986 - DNA, 542 bp, Arabidopsis thaliana landsberg
gagactggaaaataataacctgactggtaatgttggttcattagccaactggctcagtctcactgtattgtaagtaggcacctttggttctgaaacattttttgtccctctttgtgcatcttttgctaagaatataaccctgcaatcttcactaactcttataggaatgtatctcataacaacctcgtaggcgatatccctaagaacaataacttctcaagattttcaccagacaggtatggtaatttagcaggttttggtattgtgcattttgttttgtttgctaatatctatgtttatgtttttggataaagcttcattggcaatcctggtctttgcggtagttggctaaactcaccgtgtcatgattctcgtcgaactgtacgaggtgattacattcttctaaaagcttccattcacaaaacctaagataattaaagctcatgtttctatccatgttttgtctgcagtgtcaatctctagagcagctattcttggaatagctattgggggacttgtgatccttctcatggtcttaatag

SEQ ID NO: 147987 - DNA, 1474 bp, Arabidopsis thaliana landsberg
atgtctcttctagctttcttcctcttcaccatccttgtcttttcaagtaagtcatcttaataatgcatcatgtttacattttctttacgtgatctcccatattgaacatggttttcttggttttacaggttcatgttgttccgcaacccggttccaagggcacaggtacatgcagaggaaaacaatgctagatttggcaagcaagattggtataaactatggaagaagaggaaacaacctcccatctccataccaatccatcaacttcatcaaatctatcaaagctggtcatgtcaagctctatgacgccgatccagagagtctcacactcctctctcaaaccaacctctacgtcaccataaccgtccctaaccaccaaatcacctcactcagctctaaccaaaccatagctgacgaatgggtcagaaccaacatcctcccttactatccacaaacacaaatccgttttgtccttgtcggaaacgaaatcctcagctacaattccgggaatgtctcggcgaatcttgtaccggcgatgcgcaaaattgtgaattctctcagattgcatgggattcacaacattaaagttgggacacctctagctatggattctctccggtcgtcgtttcctccatcgaacggaacattccgggaagaaatcaccggaccggttatgttaccgttgctgaaattcctcaacggaacgaactcttacttcttccttaatgttcatccttacttccgttggtcaagaaaccccatgaacactagtttggattttgctctgttccaaggaaactcaacctataccgatcctcaaaccggtttggtttaccgtaatcttctagaccaaatgttggattctgttctcttcgccatgaccaaactcggttacccacacatgcgcctcgcgatctctgaaaccgggtggcctaatttcggtgacatcgacgaaaccggagccaacattctcaacgcagctacctataaccgtaatctgatcaagaagatgagcgcaagtcctccaatcggtacaccatcaagacccggtttaccaataccgacatttgttttctccttattcaacgaaaaccagaaatccggttcggggacacagagacattggggaatcttgcatcccgacggttcaccaatctacgacgtagatttcaccggtcaaacacccttaaccggtttcaacccgttacctaaaccgacgaacaacgttccttacaaaggtcaagtgtggtgcgtaccagtcgaaggagccaacgagactgagcttgaagaaacattgaggatggcttgtgcccaaagcaacaccacttgtgcagctttagctcctgggagagaatgttacgaaccagtctccatttattggcatgcaagctacgcgcttaattcgcactgggctcagttacgtaaccaaagcattcaatgtttcttcaatggaatggctcatgagacaacaacc

SEQ ID NO: 147988 - DNA, 809 bp, Arabidopsis thaliana landsberg
gattgaacgctttgattatatagctggtgagcaaattcatttaaaacaccaagtagtattctactgtttatacatttcaataaaattcaaatgatgtatagttttactttgttcttctcttaacataaaggaaaacgaatcatctcaatcagcacatgtatgggttttctgattgcccacaattgttcagatctcttcatatatagtagttatgccaatgattatattaatcaaattgtttgtgtaatacattattatgtaggttatcaaaatttatgaaattagacataataatatcggaaatatcgtaacaatataccccatgcattatagctgaatcactatatagtctatattgtttcatgattaactaaattaaaagacaaataataaatatgtaaaatacggtgcaagaagaagattatgaaaataactaaacaatcaatgtttatataataaagctacgagagctgtacaagaagaaatggttttaagggtaaaaccaaagtatcgttgagacatacatttaacagaccctaaaaaccctaacttcgaaaaaccaaaaccatcttgtttgatctaattcttgttttttgttttagtttcgaaaaatccccgacgatagttaaatacttaaatcttaaaatccaaaaccacctcgagaatcccaaaaataaaagataaattttgaaagagagaaatatagaaaataagataaaaataaaaagattgaaaaaatgtaattacgagaatttagaagtgttctcggcgagtgtagccagcgattgcaagttgcacggtactatagt

SEQ ID NO: 147989 - DNA, 414 bp, Arabidopsis thaliana landsberg
tttttccttctgggtttcttttgtttgcctggaaacatttgtctcagattttgattttgaccggagtactcatattctccggcgatttctccggcgacatcgtttgtgaaatggagggaattactcatccaatacctcgtactgttgaagaggtctttagcgacttcagaggtcgacgagctggtcttattaaagctctcactaatggtcagttttggactgattcttgtttctcacttgcgaatcagaacgataagcatctacagagttacgattttggggcatttgggtttttcatttgttaaaaaagaagaactttttttattttgggtttcttttgtgagattggacgattctgggctttgtggtttgtttatgcacatatggtgaacttttaccaaacgtgtgaccctg

SEQ ID NO: 147990 - DNA, 350 bp, Arabidopsis thaliana landsberg
caatatcatcatcaatccaccaatgaaaagttctctctttttttttcccactcttactctgttctcgctacagaatctcctgggaaaaaaaaaagaaacttgatccacccgaattccccaaatcttcacaatttctggaaactctctcgatcgtgaagcagaaaagtgaggttccaaatgggttctgtttcgggtcaaacccgaattacaacgatgaacctctcgctctcaacagcagagaagaaccctaatttctgctcggcgcttctcaattctaaggtaattgttatcacttcgtcgagcttcaccaaaaaaatgactccttctccatgatatcttcttctcgtaga

SEQ ID NO: 147991 - DNA, 372 bp, Arabidopsis thaliana landsberg
tgcctatatgactgactgacaacacttcactatatatgagaatttgacattatggtaagaaaaaagaacttaaaaaaacaagaaatactgccgttaccccatatttaggaaaggagaagtctgatgagcgatcatgtaaagatgggggtgttgaaatggttgtggctgtggtacatcgtcgacgctgcggttcagctgctcacattgggtttgttttgtctttaggatgttttccctctcctttatctataccgattacacacgccaagaaaatgatataagcatcatcgttatatagattcccatttgcaactaatcagctatttgcatttattcaaggaacttcaattttttattcttatactttttttt

SEQ ID NO: 147992 - DNA, 740 bp, Arabidopsis thaliana landsberg
tcatcgagttgttttccaaaactgggaaattcagtccagtcttggcacgtctccggttactctttcttcgtcgtcgggtaagaagacaattctctataaacaaatcatttcaactaatactaatgatgttacttatatgattttaatttataaagtttagatccattaatgaactttgatattagaattatgtttgatgtatttcatattttcttggataacagtatggatggaggacaatggactcccggaagccgagcaaagtacaacctgcgggacgcggtttcacggtccaccgttcaagtatatccgagggcatggacagcgatctacatagcgttggataatgttgggatgtggaacataaggtcggagaattgggcaagacagtatttggggcaacaattctatcttcgagtttacacttcctctacttcgtaccgagatgaatatccaccaccaaagaacgctcttatgtgcggacgagctagaggccgccacactaggccattctaaaagggatattggacgcaacggctcaactgttttttttttctttgtttttttagattgaatgatttgaaatgtttagtattgtcacgagagggtggcaaagagatgtgagcttcgtggatttattcactacggcacaaaaattaggaacaagaaaaatttggagcttgacttgagctttcaacttagtttttatgacgaaatcaaatgttgtgttcttattttaa

SEQ ID NO: 147993 - DNA, 1662 bp, Arabidopsis thaliana landsberg
caaaaaaaaagtaagaaaaagaaaatagtaagcgggtgaaacaaggagttccaaaaggttggctcctttttgtttctgaagatgcgttagtgtgacccttctttgaaatttagggttcatttactcagatttcgagttcgttgtgtttgaatctctattgggtttaccttcttattcgatttgggggaaatggctgattggtatcagcttgcacagtctataatctttggtttgatcttcgcttaccttctcgctaagctaatctctatcctcctcgcttttaaagacgagaatctctcactcactcgtaaccacacgactcaatcggagtatgagaccttgcgaaaggtcgaaactttaactgggattagcggcgagtctgattctcttatagctgagcaaggtagcttgagaggtgatgaagatgaatcagatgatgatgattgggaaggtgtcgaaagtacagaacttgatgaggcatttagtgctgctacggcttttgttgctgctgctgcatcggataggctttcgcagaaagtttctaatgagttgcaacttcagctttatggattgtataaaattgctactgaaggaccttgtactgctcctcaaccatcagctcttaaaatgactgctcgtgccaagtggtttgtctaacactcttattgattctctgattcaaatgtttgggactgtgaaagatgattgcttgatcatgtttacttgtgatgtactgatgtttcttgatcatggatgtatattattttgatttcaccaagttcgtatctttcattgctaatgtatggaaaggattgcttttgttggtgtattgattagtgatctgattcaaatcttatgactgtgaagattgttacttaatcatgtttacttgtgatgtactgattattcttcatcctggatgtatcttgctttgtgtgagtaccgaaaggatttgcttttgttgttttgttaattggtaacttagggatgcattttgatcgactgagatttgttatgatcttttttgttctaggcaagcatgacagagattgggtgctatgcgtcctgaggaagcgatggataagcctacccgccttgttactcagctttacccagctgggtagaaggtggctcggttagttgtcttcttacctgcttctgttattcccattgctttggactgtttatggatggtctgttttcgttcttaaatctgtctttatttcttggcttgtttgcttcgttgcggactattagaaacgaagaaatcggagtggtgaggctgcaggccccatgggaccggtttttagctcattggtgtacgaagaggaatctgacaatgagttgtaaggttcctaagcaattagttacagattcatctatgaacttttggttttcttttctcattttctctatatgactagctgactagcatcagagaaggaatgtatatatcataatactcaccttaggtagatcaaagaatcatgtgttagtttaaatcatagtagaagctctgttcattcttgcgttcttactccatgttccaggaagattgacgccatacacgcctttgctagagaaggagaagtcgagaatctattgaaatgcatagaaaatggcatacccgtaaatgcaagaggttagtagtcttgtatcatt

SEQ ID NO: 147994 - DNA, 1223 bp, Arabidopsis thaliana landsberg
atgacttatctaatcagactcattaatagctttgaactgcgtccagaaaattcatatcgaaccgtttccgtaacagagattagcagctcttgttatattagagttgatagcttaacgcgtaattgggggtaacatgttggtgccagtgcttacaactgtttaacaagagtttggttcagtgtacagatgttttcttcttctaaaagttaaagctatattatctcattaattccttgaaagttttttcttacagggcaattcctcctacacaagctgtaatggcagtaagtaatacatatgggcgtgtgaggaagccgattgggtttaatcgtattggcctgttctctgttattcaaggtttagaaggggataatgttcagcattcccataatagcaatgagtgttccctctggatgcctgtagctcctgtagggtacactgctatgggttgtgttgcaaatataggaagtgagcaaccacctgatcacattgtttattgtctaaggtctgaccttgtatcttccagcagtttctctgagtgcatatacaccgttccctccagttcgttatttgagtctggattcagcatttggcgtgctgataatgttcttggagcattctatgctcacacttcaactgcagctccttccaaaaaatatagccctggcctcagtcattgtcttctttggaatccccttcagtccaagacatcttcatcctctgacccatcatcgacaagtgggtcccggagtgagcaatcaagtgatcagactggaaattcatcaggatgggacattctcaggtcaatttctaaggcaactagttatcatgtttcaactcctaattttgagagaatctggtgggacaaaggtggtgatcttcgaagacctgtctcaatatggaggcctgttacacgtcatggttttgcaatattgggtgatagcataactgaagggttagtaaatatttaacgtttactttgtctctatattagccaccgtgaaaggactgttttttatacaaatgttgtataatcttgagtttttcttcacattagattggagccacttgcactgggaatactcttcaaagcagatgactctgagattgctgcaaaacctgtacagttcaataaagtcgcacatattgtggggaaaggtttcgatgcagttttctgctggtttcctgttgcacctcctggttatgtttctatagaatgtgtt

SEQ ID NO: 147995 - DNA, 2298 bp, Arabidopsis thaliana landsberg
tatcgtgcttctgattgttttggttaacggatcaaattatcgaacgatgatggcttctctcgcgacttccataagtggaagcttcagaattctggttaaatcatcttcgacgaggaatgggtttcctgtaatctctgatcaaaacccgagttccgtcttgtttgcgaataaacgcagacatatctctagaacggcgatttttcaccgatctgcgataagtggttcgagtcaaggagaaaagatatcacctttagcatctggtgtatcttcaggtttatattcagctcagacttttgatttgacgcctcaaaacgttgatttggtgcttgaggatgttagaccgttcttgatctctgatggtggaaacgtcgacgttgtctccgttgaagatggggtagtctctcttaagctccaaggttagttttcgttttgatttcatatacaaaaattcaggatattggagttaggttctgctgatttcgttcgacaagagagaaactttttggggtttgagttgttggaatctatcactgaccagtcttaggttttctattttctatagagctctagattcgagcttgagacatgacaactttagtttggctgattactgttcttggtataatatcttgtagactatagttttggtccaaatctctagcctttttcctttttagagtgcagagagatcatctgcagcagcaatagtgctctcatgttatgtaatcgagcttatgttgaattgtgttgtatgtttaggagcatgtaccagctgtccaagttcttcaacaactatgacaatgggaatagagagggtactcaaggaaaagtttggagatgcattgaaagatattcgacaagtttttgatgaagaagtaaaacagataaccgtggaggtgagtgaggcttctttttaagaaattcgcgttgatatcttcttctgtgtttgcctttgactggttttgggttgcaaacttgcaggcagtgaatgctcatctagatatactgaggccagctatcaagaactatggcggaagtgttgaagttttatcggttgaaggcgaggactgcgttgtaaaatatgttggaccggagtcgattggaatgggaatacaggcagcgattaaagaaaagtttaaggacatatctaatgtaacctttacaagctagaaagcatgaagaaagccactatattatgtaaaaacattattgctctttgtttgagctaatgtctacttcaatagtcgtcctctccataactgtccttagccatcttgccaggttgatcaagaacggtgtgtagacaaagtagcaagttgttgtccacgtaaccagtcccttcaccagcaaacaaaacaagaaagaaacagagtcatgtgtatgtttttgtttgatgatgtctgtataaacacttattacctggccaaagatttctatgtttgcttctggatagtaccacagatggaagaatctgttaaaccaggttatgacaatctttagattaaattctgttaaaaaaacaaagagatggttgttgaagggcacggtttacttactgcatgatggggatttcagctaaaggacaggcgacaccaaggagagtggcaatggtgaagccaatccaagttctatccaaagagaaccaaataaattctgctaaggcaaatagaatgtaagcttctatgttgtctgaaactccagctttgtacatttcagcacttagctctaagaagaacatcaatgctctgtttcattcaccaaaaccatatagagtttcagtttgtctcatttccactgtcctcaaaattgtcatacacaacaagctagagtattacatagtacatactcacaagagtgaaattacggttttgtccaggctaccacgtggaggacttgtagaggttgtctcatccaataggagttgtagaaaacctactgtacagtaaaataagccaagcaagaacggtacctgaaaaacaacaacacatcacttgatcaaaaacagaatgtttgtatgaagttgtgaaaagattttgaagttgaggcttatttatcttacccagatgtttgcatgaagaggaccgatttgaaaagctccgttttggtaaacaacgagatcgacacgtgagtggagaccatcgagatgaggacccaagacgaagcctgaaccgaaaagcgagagacttactgggacgatccatgattttccggtaccgattttgctctgtctattctggctcaggcagaggattttacgaaccggtgaccggtttggcccgtttccgtttagtggtctga

SEQ ID NO: 147996 - DNA, 485 bp, Arabidopsis thaliana landsberg; identical to SEQ ID NO: 22580

SEQ ID NO: 147997 - DNA, 732 bp, Arabidopsis thaliana landsberg
ttttggttaataggacaaggcagataagataacgaaagaagacgagaagatcacaccggaaaagataccggttactgatgatctgaaaacagctttggaggaggaaaatactccgaccaaagaggcaaaatctccggcaacagagacaaagtattcggtaacagagaaaagagctccggctgacgagaagataacaccggaaatgatgccggttactgaagatctgaaaacagttttggaggaggaggcaaaacctcctgcaacagagacaaaagctatggttgatgatcagaaggtgaagaacgaagtggccgttcgtgaagagaaaatcattgacctcgtgactgtgaaagagaccgaaacagaggcgaaaacagagtaggtgggaaaagaataaacacagtgaaacagccttgaaacgctagtttctgcgttcttgatagcaaaatgcttgtttttgtttagattatatttttcctcgatagataaacgcaaacgctgtattctttatatgaattgaaaacttcaaatttcctattgaccgatccgtcaacccaaaagaatgtcaatgtaagaggctacgaagaacgtgtttttccgttttcgttttctgcgattgcgtttcaaagagaatgcatgcgtaaatcggtgcccgttacaacactttcgaaagttttggtttggactttaacgggccgatacgggccgtattataaaaaatttgtaaaataa

SEQ ID NO: 147998 - DNA, 350 bp, Arabidopsis thaliana landsberg
ttcttctctctctgcttcttcttgtgggacaaaccctaattattttacttcgatctctctccacttttcccgctcaatcatctgatctttccctctctcagcaatgcatgatcttcgattttctatcagtgttcaaagctgaaaaaaatcgaactgggtctgttgatttcttcaggtctaaaatcagattagattagagaagaagaagaagaatgctggaagctgtagatagctcaggagtggtgaatggaggattcccgcagattcagagcttatacggcgattgcagtagtgaagaagagttatcggtattgccacgtcatacaaaagtggtggtcaccctgagtgca

SEQ ID NO: 147999 - DNA, 2000 bp, Arabidopsis thaliana landsberg
gttcaaaccttacctttctctggtctgcaaaaggttcttcatcaagggttaaacaagtttacaaaaagttacgattctgaatcagtgatttaaaaaaaaccccaatcagctgaaaatgagagaattgtttgcgattccacgacgaaaaacaaatttgttcatcgaagtcttctcgaaaaaggtaaatgaggaactgctcctccttcctttagccatagcagtttatgggaacgatctttctctggtgctagtggtgattacagagagatattgagaaataggctgaatgattattaaggtagatgatgcggttaatctgttcggtgatatggtacagtctcgtcctttaccttccattgttgaattcaataaactgctgagtgccgttgctaagatgaagaagtttgaacttgtcatctctctcggcgagcagatgcaaactttgggaatttcacatgatctttacacatacagtattttcatcaactgcttttgccgacgctctcagctctctcttgctttagctcttcttggcaagatgatgaaactcggctatgagcccgatattgtcacgctttcttctctgctcaatggatactgtcacggtaagaggatttcagatgctgtagctttggttgatcaaatggtggaaatggggtatagacctgacacaatcacatttacaactttgattcatgggctttttctccacaacaaagcttctgaagctgtggcgttagttgatcgaatggttcaaagaggctgtcaaccaaatctggttacttatggagtggtagtaaatggattatgtaagagaggtgatattgatttggcttttaatctgctcaacaagatggaagctgcgaaaatagaggccaatgttgtgatctacagcacagtcatagatagtctctgcaaatatagacatgaggatgatgcactcaacttgttcactgaaatggaaaacaaaggagttagaccaaatgttatcacctacagctccctcataagttgcctttgtaattacggaagatggagtgatgcttctcgactactcagtgatatgattgagaggaaaatcaatccaaatgtagtcactttcagcgcattgattgatgcatttgtgaagaaggggaagcttgtaaaggctgagaaattgtacgaggagatgatcaaaaggtccatagatcctaatattttcacttacaattcattgatcaatgggttttgtatgctcgatcgccttggtgaggctaagcagatgcttgagttgatgattaggaaggattgtctaccaaacgtagtcacttataatacgcttataaatggattttgtaaggctaaaattttttgaggatggtgtggaactcttccgcgagatgtctcaaaggggattagttggcaacacagtcacttacaccactattatccaagggttttttcaagctggcgactgtgattctgcccaaatggtattcaaacagatggtttctaatcgtgtgcctacagatattatgacatacagcattttgttgcatggactttgtagttatgggaagctagatacagcattggtcatattcaagtatctgcaaaagagtgaaatggaacttaatattgttatatataatactatgattgaagggatgtgcaaggctgtcaaggtgggagaagcgtgggatttattttgtagcctcagcattaagcctgatgttgtaacatacaatacaatgatctcaggattgtgtagtaaacgcctactacaggaagcagatgacctgttcagaaaaatgaaagaagatggtactcttccaaatagtggtacatataatacgcttatcagagcaaaccttagagattgtgacagagccgcatcagcagaactcatcaaagaaatgaggagttctgggtttgttggagatgcttcaatcattagcttggtgacaaatatgttgcatgatgggagattggacaaaagctttctcaatatgctttcttaa

SEQ ID NO: 148000 - DNA, 679 bp, Arabidopsis thaliana landsberg
agagtgatctgcgtttggaaaccgaggaaatcgcctcagcctaagcatggtgatcctctttggagcgctggttaccttaaagacaattggatcgatacagatcttccatcgaccaaattcgagagcaacatcaagcatttgagccagcagcaaccagctacttcaaggaaattcttttaccgggtggagaacacagtgacgccgcagcccgataacccaataatgtgtgtaaaaccggtgactaagaggatacattgctacgccaaggtattcatcatagagtgtgtaaaaagaggatgtgctgataaactgcagatattctcaactgatttcatagataatgaatttgttgatgcttgcgttgggctcacctttgcgagagctgaaggtaaggcctgaggaatgagcgtgtggagacagactttgtgtatctattttgaaggaaaagaatcagaacatggttgatgtgttttagggttgcttgtgtataagagaacatgtgagtgtgtatttgtatgtgtgtgtgatttacgagtgtatattccaattcattacaacttatttgaatcctgatacaattgcgagatatccaaactcttcattactattaatttctgatacttttgcagatgttgtagttgatagacaggcaaaacagaaggaagaagtatacagttga

SEQ ID NO: 148001 - DNA, 386 bp, Arabidopsis thaliana landsberg
atttagttataaaatgttgctatttgttgatctagtgctctgaatcttttagtgaggcagatgatgaagattatgaatttcttcatgaaattattgtaagaaaaagtaagtaatttttttttgtaagtgtttgcgttcatgcaaaagagattaatcagacccacttttctctttttcagttttgttgcattattttgttctctttaatttatgaatactaactttattgttgatttctgctttttggttctctttaggaacatagagaagctgcggaatgaaagtacactgttctttcacggagaaagaagataaataagcattatcttcttcttcagtttttaacacacatttggaaattttatgtaaaattctcttggacgtgt

SEQ ID NO: 148002 - DNA, 391 bp, Arabidopsis thaliana landsberg
atggatctcaaggaaaggaacaatgatgaaccagaagacacaggcagtaagcaaaactgcacctgcattcatctgatgtacgcgatatatatccaattaagaactcacgaaaattcgatataatcatggcgcatgattatgaattttgagtttgactacctcgaaagataatctggaaaacatatccccaaaaaccagctggattactagagtattgactctgttgaatagtattatcagctcctttggatcgtgctctctctgagtctatggcttcaatgctatctactctatcgccagctgctcttttgttgtattggtaacatccgtgcaaagaaagaagccagcctacctgttaaaagataccagatcaaaatgtaagaaacttgag

SEQ ID NO: 148003 - DNA, 428 bp, Arabidopsis thaliana landsberg
caaatgggaagcatcgatgccgcagtgttgggttcagagaagaaatcaaacccgggaaaagccacaattcttgctctgggaaaagcctttcctcaccagctagtaatgcaagagtacttagtcgatggctacttcaaaaccaccaagtgtgatgaccctgaactcaaacagaaacttactcgtctctgtaatctcttcattttaacctctgttttcaactttttatctcattctgtaagctcctgcaacagcaactgaggtttgtttgaactgttcgtttactatatacaggcaagacaacaacggtgaagacaaggtatgttgtgatgtcagaggagattctcaagaagtacccagatcttgccattgaaggaggatccacagtgaccccacgtctagacatttgcaacgatgcagtgaccgatatg

SEQ ID NO: 148004 - DNA, 1336 bp, Arabidopsis thaliana landsberg
acacacacccaaaacaaaaaaaaacaaaataactaaaaagaaagcttcgtctctctctctctctatccctcgtgcgccagtctgacaaagacttagagatagattcagagattcagagctcttcaatggccgccggaggagagttttgaggaggaggaggatcatcgtcgggacgtactccgacgtggaaagagagagagaacaataagaagagagaaagaagaagaagagccatcactgctaagatttactctggtcttagagctcaaggtaactataagcttcctaagcactgcgataacaacgaggttcttaaagctctctgtctcgaagctggttggatcgtcgaagacgatggcaccacttatcgcaaggtaaaactgaaaattccggatttcaatttttagatcggaatctgagcttctctcaattactcataattcaatcgatgaatctgtgcgattgttgtgtttgaattcaatcgaattgttagagactcttgagatcttgcgatttggttttcacttttcactgttcgattgggttgaattttcaatttccccctatttggattgaaatctggtcttcgtagtgattagatctgattatgaattcgatggtttctgctttggatcatctaattctatagatcatgtaagtttgattattgagaaattttggggaaatctcttttgcttcttgagtcttgactaaaacattgactttgacggttgcatcatcatgtggttttgatttagtctagtcttggtcactaaaatggttgattcttgtggaaacaggggtttatttcccagcatcagatgggtcaggaactcctacaaacttcagcacaaattcatcaatccaaccaagtccacaatcatcagcttttccaagtcctgcaccttcgtaccacggaagtccagtctcatcatccttcccgagtccatctcgctatgacggaaacccttcttcataccttcttcttccgttcctacacaacatcgcttcttcgattcctgctaaccttccacctcttagaatatccaacagtgcgcctgtgactcctccgttgtcatctcctacttctcgtggttcgaagcggaaacttacttcagagcaattaccaaatggcgggtctttacacgttttgagacatccgcttttcgctatctctgctccatctagtcctactcgtcgtgctggtcaccaaacgccacctacaataccggaatgtgatgagtccgaggaggattcgatcgaggattcaggaagggggatcaatttccaactaactgttctactttaccaacatttaaccctgtcagcaaacttt

SEQ ID NO: 148005 - DNA, 1756 bp, Arabidopsis thaliana landsberg
atgatacaggcatgtaagtgccaggcacaatttcaaaagtgtgactaaagcatacatcataattaaagcaaacataatctctcaatcttaggtagaagcttaccactttatataaatgtttttagttgcacaatcagtatgttcaaatactatagttttgggtttacgcaacaaatttaaccctgtaagccaacgtgagaaaaagaaaaaatatagccctatcacttgtttttcttaaagaaccaccatacaaaatgaaaggcacacgtatagaggaaataatttgccgaccactcattccaataaaagaaaggtcaaaagtaaacacaagccaaactattcccaagtatataaagcaatgttcactagacaaaccatcatcaaccagtttaaccgtagacatcattccttattgtcccatccaaatagtaaaaaaaaaaagaaaaaaaaaagaaaatgaaaaagtcaacaagactcttatggctattatccatcattgttttggtggcagccgtttctaaggcagtcgcagaggtagacaacgatgatgatgacgataatacttcattggaaggcatgacgacggctaaacgtgaaaccctcgaagttgaggatcatacttcattggaaggcatggttaaacgtgaagccctcgaagtaaaaccaccaaaagctggcaaaggcaaaggcaaaggtaaaggtcgtggcacccgtgtcgcaggacctgagatgaattggcctggacaatgggagttattcatgaagaattctggtgtttcagccatgcacgcaattttgatgcctttgatcaataaagttcagttttacgacgcaaccatttggagaatttcacaaatcaaattgcctccaggcgtaccttgccatgtttttgacgccaaaaaaaataaagttgattgttgggctcactctgtcctcgtcgatattaacaccggagacatcaagcctcttgcggtaacaaaattactaattattactccctccgttccttttttatataacgttttagttaaaatcacgcagattaagaaattacaaatataattcattttacacattagtaattgttgatctgatggatttaatggaaacatgacagcttacaacagacacatggtgttcttctggaggtttaaccgtaaacggtactttggtaagtactggaggattccaaggaggagcaaacacggcaaggtacctatccacatgcgaaaactgtgtatggattgaatatccaaaggcactcgctgcaaggagatggtactcaacacaagccactcttcctgatggaactttcatcgttgttggaggccgtgacgctctcaactacgagtatatccttccggaaggacaaaacaacaagaaactctatgactcacaacttcttagacaaacagatgatccagaagaaaacaatctttacccttttgtttggcttaacactgatggtaacctcttcattttcgccaacaaccgatccattcttcttagcccgaaaacaaacaaagtgctcaaagagttccctcaacttcccggtggtgcccgtaactaccctggttccgcctcctcggctcttctccccatccgcctctacgtccaaaaccccgctatcatccccgctgatgtcctagtttgcggtggtgcaaaacaagacgcttacttccgtgcagagaggttaaagatttacgattgggccttgaaagattgtgcaaggttaaacatcaatagtgctaagcct

SEQ ID NO: 148006 - DNA, 371 bp, Arabidopsis thaliana landsberg
gtttggatttgttagatatgccctttagaagattctgctaacggcatagctggaatggtcgggaagggactattcattctaatatccatttctcgattaccatatcataatctattaagagagatttacactgacaattaccaaacggctaatctcctctctgtgcttctctgcagtttcttgacggttgggtcatattcgcagagtatgcaagaccgagagagcaatcacagtcatatcaacctcagaacaacatgtctcgtcctccatactatggtaaccgctagagaaacagttttcttcggttcttatgaatcttttatattcatatttatgcttcattatataatcttctatgatcgaactgtgtt

SEQ ID NO: 148007 - DNA, 511 bp, Arabidopsis thaliana landsberg
tgtcacttactacgaagaaggaagcatgactttggacagatggtcgatacttcttgcaagcattgcaacagcttatcgatgagtggacactaatgcggatgggagaagatcctcttgttgaagtttggatgtctgatgttagtcctcaactaatcttttgatcaatccataaattttgtaactttgagatgtgttctttgatttagcttatggtttaacaatgtagaatctacctgaagaggcaaatataggtgttgattcatggtgtgtctcggtagacactgcgaatagatgggggaaatcgtttgccaagaagaatcagaaactaatcaccacatctactgatcttgtggatgaagtttggaagagtcgtccaccttctgagatgagtccggttgttgttcatcctttggagtttgctggccgttctgtttcccataaattcgaagatttgagggcaaagcttaagcaagagggtgctcgtggtttggtcatcgctgctcttgatgag

SEQ ID NO: 148008 - DNA, 524 bp, Arabidopsis thaliana landsberg
atggaaaagagacaagagtacaaggttttagctgtttacgcagtgtctatactatgcatcgtcttgctctcaatagcaaaggcttacgtgtcgaagaaacgcgattatgtcaagactctgtttcggtacacgacgatggcgacgacggcgtcgggattctctcaatgtgtgggatacttggtgagtcaatggcttgagaaaagcgggttttatgatgattctccagaaactcaacgagtttgaaacgagttcttgttcgtcttctcttcacttcccctgttcttttcgtactctttacgtggcccaatttattttccttaaaagtggtagaattgtttgattttgaccccaagaaaaaaactttttttgtgtgctagacttgactcttctttcaagttagttttggatcaaacacttgttgttgctgagaaggttccgtgaacaacaattctgtaacatgttctagtgccaaaaataaccaattcataaggttttatagtgcatgttaattaataaatgttgtt

SEQ ID NO: 148009 - DNA, 627 bp, Arabidopsis thaliana landsberg; identical to SEQ ID NO: 41085
  unsure (1)..(627): unsure at all n locations

SEQ ID NO: 148010 - DNA, 932 bp, Arabidopsis thaliana landsberg
tctgcttctgtttcttttccaagtttttaaagagcgagagagagactgaaacaaaaacaaaaaacagagagctttggttccggatcttgattatggcaaatgggtgggtcaaatcgttacaatgcaagtcgaaagctttcgatgatgtttacaatccgattaaaatcccgaacccgaatccgagcccgagtccgaaacatctcatgtcaagctacagttgcagaaaaagcacacagagtctaaaagatgtgatcgaaaccaaaaaacccaaacctaaaccgaagaaacccaatccaaaaccggataaacgagaaaccgacccggttttatcaccatcaacccggatccgatcaaccggagttcgtgatcgtgatccgtttttaccgacattgacggagctatcggaaggtcatcagtcacgtaatgtggtggagattatctttcagacgagctggggtccgaaaccgttttcgggtcgggtcgaaatgattttcaaagtgcaaaacgggtctaagactttgacccggttcgaagagtatcgtgaagccgtgaaagctaggagcgtggggaaagcgcgtgaagagaacgcgcgttcggttgccgacgggaatgaaacaatgaggttttactgtttgggtccaagttacggtgcaggtggcagcgcgtggggtattttgggaggaaaaggcggtggcgcgtcgatatatacgtttgccggaagtagcacggcgaatgagaaagctggcggtgggaaagggaggaagccaatgttggtttgtcgggtcatagcgggtcgggtcactaagcaaaacgagttaaagtatgactcggatttgaggtcacggtttgactcagtgagtggtgacgacggagagttgctcgtgttcgatacacgtgcggtgttgccttgttttctcataatctatcggttg

SEQ ID NO: 148011 - DNA, 207 bp, Arabidopsis thaliana landsberg
aggtctatgtagaagcatacacatgcccttgcatcaaacgtcacccgcaagacccagtcttcatcgcgcaatcacacgggaactacacagcaatcttctcaacaaacccacctttcaaacacaacaaatacaagagattcgaaggtcactgggttgcaggtttcccaatcaaatgcaacttcagccaggatggagctgtagagaacg

SEQ ID NO: 148012 - DNA, 955 bp, Arabidopsis thaliana landsberg
atggctgcgtggtcaccatcagttgggataggatcttgttgtctcaataatggcatcactagaacatggaagtttccttctgcaaggctttttactggtaggaagaacaagattaaacttggatccgagacactaatgtttacacgaaaacgtttcatgggtgatttggttacaagcgcgttgcaaagttatcagtttagtaagatatgtgcttcaaagacttccatcgagctgagagaggcattgtctagtagaagagctgaggctgatgacctgaagaaggtaacatcatattcattcaggacaaaagcaggtgctctggttaaagtcaaagttgaaaagaagagagaaaagtacagcattttggtttatgtctcatctttggaacttagtggtgatgacaagagtaggctggtgatggtttggggtgtctacaggtctgattcttcgtgttttttgcctctggatttcgaaaactcttcccaagactcacaaacccacacaacagaaactacatttgtgaaaagctccttgtctgagttaatgctagggctagaatttgatgggaaagaatctcctttctacttatcatttcacctgaagttagtgtcaggtagagatccggacggtcaagaaatgctgactcacagggacactgacttctgtatcccggttggttttactgctggtcatccattgccgctaggcctttcttccgggccagatgatgattcttggaatttttcgttcttttcaagaagctcaacgaacgtggttttatgcttgtatgatgatagcacaacagataaacctgctttagaacttgatcttgatccttatgtcaaccgaacaggtgatgtttggcatgcttcagttgacaatacatgggattttgtgagatatggctaccgttgcaaggagacagctcactctaaagaagatgtcgatgttgaag

SEQ ID NO: 148013 - DNA, 883 bp, Arabidopsis thaliana landsberg
tttgtattatcctgtgatccgtccacttaagtttaactgggagatttaaggcaaaaagacaaagttgatggcttcagcattaaattccatatacatggaggtacatatagaatctgcatttgtgttctatagccattcttaagtttgcacgcttgaagccatatgatgatgattcctgatttaacacggaagcattctttttcttcttctttagaagtgtttaaagtataggtctttaacttcattcgttgcttcaatcatttaatgaagttctttctcattcagattgtggagcaagtttcaaatataacaattgctatgcatcgatatctagttctgcgatttagttcaaatgactttgatatcagtgtgtttgatcaatgtctaagtgacagcttacttcaatttgagagaaaactattgcttgttgtctttcacgcagccattgtttacatttatagtaagaatttctgtatagatattgctcttggtgtgttagcataattctgtcaaactcgaatcaaatgttatcactatcatatttgggtgcaaaaacagcaagtttgatagtgcagactatatctcaaggcttaggctttggagcacttctgttttcaatttcttccactttaccagaggctcagtgaattccatcaagaatgtgaatagatctgtggtccacaagtatgtaattgaaagaagtttgtagcacccaagaactggtttaagactcatctgttccaaaactcaccgctcaatctgttaggagcaagaggtgattcattcttgatttggatctcagtatctttcctgagttattgtttgcgggcgacataagaatcatgaaactagaatctcctctgtttctttagagagccaatga

SEQ ID NO: 148014 - DNA, 343 bp, Arabidopsis thaliana landsberg
acaagaagaaaacaagtcttggtaaaatcgcaattggaacggatagggttgtttcagttgcatgtataactggagaaactggatttggatttgataaggaaagagcgaacaagaggagatatctcacttgctgatcagatccaagctgctaagaaccaacgaggaagtgatgttttatcgagatttggtctttttgccatgaaatcaatggattttgattaactcttttctactcctagtttatagagctttctctttttttttcttgtgccactaaataaataaacaagattgacttgaggatataataaataaatagattgacgagtgctggctacaataa

SEQ ID NO: 148015 - DNA, 251 bp, Arabidopsis thaliana landsberg
ctctctttcgcagaaaaactgcatggcgttcaaggatcccctctgtagttcgaagaagaaataagcgaatggggaaaattgcgagatcgacagcttatcgccgatagcgcgtttctacttgtgtgattgggccttaattcaaaatttatcagaacgaagcccaattctcagtgatacaatataaacttataacattttttgtatggatcccggcccgcgtaaaccatttccagtcccgtataagaaaagtt

SEQ ID NO: 148016 - DNA, 356 bp, Arabidopsis thaliana landsberg
caaaaaacatgttagatatatactttgaataatagaaaagatcagtaaagaaacctgaatgacatggtttctgaagttaactttctctctttcctttctggttctgtattcaacatagagaatactgatgaggtaagcagtccaactacctaagatgccataaaagagctgaaacagaatccctgagagcatccccagctgtgagaacgagtatggcagtgtcaacagcacttgtgccacctatataatagcacattcatgaatcagaatcataagcagagagactaaatatatagttaaaccaaaacttgttcatcattttcatctgagagaaagctattacctgattggaagca

SEQ ID NO: 148017 - DNA, 181 bp, Arabidopsis thaliana landsberg
tcttaggctcaaacaacccttagtgcattactttgtatgttcgaacataaagagaaagaataggcgacaaagaaacagaggttaggtgagttttgggtatgtttgggagcttggttaatcgttagttgtaactatactagctcaagaaagagaatattgtttctagtggattctgaaactc

SEQ ID NO: 148018 - DNA, 284 bp, Arabidopsis thaliana landsberg
tctgggagatacttcgtctcatattgtcctgatttggtgcgcagtgtctctagatatcttttacgtcttgtggcaactaaaatgatgcacattgtttatattcctgtattatattaatcatcttctacatgtattaaactcttctttgcttcaaagctgttactaagttcaaggttcaaattaataacttttctgccgttttatagctcaaatacaagttcaatgatcagtgtacatctgatatagccagaggactgactcttctatatatgttggatagaatt

SEQ ID NO: 148019 - DNA, 776 bp, Arabidopsis thaliana landsberg
cttttctctctgttacttacttccattattttcgagcttattcttatcttcatcgcttaaggttcgaattttcgaattcgatctctttttgtagctataccaatcacaaggtccgttctctactcaaatctcgcatattccttatgtcatcactgagctaaatcttttctgtattatgattcaatcgtgtctatgctttgtctctgtttctccggtaacctaattcgttgcaaaattaataattagatagaattcgaatctattgcatgcttaccagatcaattttggataaattgaatccagtaatttacgaaactcttggaacaattagtgttaatcctatgaattcttgttgctttaaacagttagagcaaatctaattatagatgacaggatcttaaaacgacttgtacctaatttctcaatctggcaaaaacttaatttattagttagttgattagtgttttttttgtttccacaattgcaatttattgttaatgttgaatgtgtttttgttttcttgtggtgattgtagcagtagctgaaatcaatagtattaagccaggctagctagaccagcaagtaaatttgctggctagcaggatcctcatgagccctcagagcgtatcgaagactagcaaatcccttgagggtgtccatggggttcatgttgtgtctcattcacatttcggatttgagagtattggccaagtctctggctttgagtctgcggatgcaggaacaaagcagagactattcattgagtaagttcattg

SEQ ID NO: 148020 - DNA, 460 bp, Arabidopsis thaliana landsberg
ttctggagaaatttctaatcaacttaacttttcatttgtgtgggtttgttcccttaacattgttatagattagaattcatcctttgctttgtttatttgggtgtttatctatcgcaggaattagggtttttggtctgcttcgatggatatggatcaagagataggtcaaaattctcctgggtaaattcaattcattaagaactatcaatatgtttacacttctgtataggtttctctgcattgattctaggaaactttgagtcatgatcgattttgttttgttattgggaatagagtaatgaatatatgtgattataactgcaaagcaattagttaagttatgttatttgattcaatcacatttatgaatctgcacagatttgatggtgaatcagtagtgtcaatgagtaatagaagcaaggagactgaaccagtcccggttgagaatgactattggggg

SEQ ID NO: 148021 - DNA, 197 bp, Arabidopsis thaliana landsberg
agactgactctctctctctctaactcttcattcttctctcttttaccttctctccaagaaatcttcactttctctctagaaaaaagttggaagctgactcgataaagactctctttttcttcttcttcctgcaaatggcgatcgaggatcaagagaacacaatccgtgaaatcaaacctaagaacagaagaatcatg

SEQ ID NO: 148022 - DNA, 237 bp, Arabidopsis thaliana landsberg
aaggtaaatgagatcttacaatacttgagaaggatcagctccaaattttctaaattgtgacgaaattgaagaatacaacacaacaatgcatctttagatctaacacttacagatcttcatcgaatctatactcaaaacataactaaaaaccctgagaatccaggtttcgtttgttctctaggatcagaatcatcaaattcgagcttctcaaactcgtcctgcaacaacagaagcagc

SEQ ID NO: 148023 - DNA, 440 bp, Arabidopsis thaliana landsberg
tttactaattttcatatcttcatatgacatgccatggaatggaagtacaaaatattctaaaattaaattagctgatcacaattgcctgatcaaattcaaaacacaagttttcttttttttaataactcaaactgatcacacttttcttcaaaagggtctttaagttcatcttcatggtcaggtccttttagttgcggaactcgtccatgaagctcttgtggaaatctgtcagacgattcactatcgctggaatcttgtcttcttgtggaagtattgtgcatctaaagtgccatgttccaggaacctaaaccacaatgaatccaaaacccattattcaagttcgatccttttgtaagacatttaaagttatgaagatttggttatattttacctgtccaaagccagaaccagggactacaactacaccagtagcattgaga

SEQ ID NO: 148024 - DNA, 345 bp, Arabidopsis thaliana landsberg
atcttgcaaaaattctctccacatttcaaacgtctaatagttaaagagagcttttgttctttttttcccatgtctatcagtatcaccaccgagaaaatatcatcaacaccaccaaccaaacattaacccacccgagagtacccaatgccatgtactacttatcttcctcttcttcttctcctcttccttcttccaccaccatctgtacaaagcaaagttatcatcaaaggaaaccaaaccattctgagtttcaaagctattttccggcttggtttcttcagcaccacaatggtcctccaattggtacttgggtactcttacgcttctatgccacgtccacccacg

SEQ ID NO: 148025 - DNA, 143 bp, Arabidopsis thaliana landsberg
ctctgtttttttttgtttttctggttttttcaatgcattttttttttcctgtgagaatgtgtatgtgtggttgatcaatgattaaaatttcatgatgtatcaagacttaattaatgtaatttaaattctgattcctttaataa

SEQ ID NO: 148026 - DNA, 485 bp, Arabidopsis thaliana landsberg
cagtaatcttgtttctcttcatcttccattgacgtttccttctatcctcgttgccttcatttttcactcgcacgctaatcttcgcctgctttgttagattttcggttttgggtttttgtcttttggtcgatttcccctgttcccagaatctccgattaagctgcttccttaatctcttgtctgaatataaactttttccggcgtgtaatttagataggtggttaaaattacgagtagtgagaggagtgttgttgctgttttgtttattcggtaaaacgaaatcggaagttctttgttgtcgtttgattccttttgagaaaaagagatgttgggagctggatttaacttcactcagcttcagagagctcaaattgacgtctcttatggctgcagatcgagtcacactaaggatcgtgagaacggctctgcattgttgaaacaccatgtttctgaggcatcgtcaagtaatgtggaacggtttttgg

SEQ ID NO: 148027 - DNA, 267 bp, Arabidopsis thaliana landsberg
tgttgctatgaaatctatgtcaaagctgtgatgaaaaaagaagctctggctgcagggaaaagctcatgagtgttcttgtctttgtatgcctttttgttttatcctttatacagtgtctctttctaataatctcacaataatgtttgtttactcaatgaaaatggcatctaataaagtagactaaaagaaaaagacattgtccagggaaaccaaactctggttttttctgacgttgtgtggaatctctgctttttcttctttttaaat

SEQ ID NO: 148028 - DNA, 451 bp, Arabidopsis thaliana landsberg
aaagaccaattgtgattatataaaagaaacgagtatcacatttataggatggactaagccctttgggtctaccaccaaaactatcatatgatatttgtaattaactaccgcattagaacttttctcatctaagattttctaagaaaactttatgtataagcgtcccaagattcatgaccgacgaaccatgtttatacctcgtcgcttcctcggccaaccgccgccactcttccgccttttctctcagctttttccccttttctccatccataagttctctaaccaccgtctcgacctcctctctcttcacatctttaccaatctctatacccactccccactcgtcacaacaaaacttacaattcgtcggttgctccgaaaaacatggccaacatatcatcggaacaccaccagcgagactctccaatgttgagttccacccgcaatgcgt

SEQ ID NO: 148029 - DNA, 674 bp, Arabidopsis thaliana landsberg
atttggttatttgttttgcatagacaatgctttgtttactttcctcaaaatcatatacataccaaaaagaaaagttatatgttatatgtttattttcacaaacaaaaataaaaaccattatttcattattttattctaaaatgatgattgatgaagactaattggcatgatcatcttcgttggaagttgagtttgcccacgaagaatgcaaacatagaagctaaggcaatgggaaaagcgatttgaacaaccgcggtaaccgccaaaaggtcatgatgaaatccaaaatagtctttcaagaatcttgcaaccgtcgtggattgtccaaagacattgatctcttcatgaatatcgccgtattgggacgagataaacccgttgagtgtccaagacgttggtgttagataatataaccaaatccaccaccctggtacttgctgcaattttcacaaaccaaaagaatacattacaaaacattttcttcttggtaaagattcttgttcaagaaactaaaggatgggtgatcttaccgtttgggggatcaaaaaccccgaaaaaaggttgaaaccaacataaaagagcgattgaagaatcgcggcaaccatgaagtttggcgtgatggagacgaggaacatcgcaaggtagttgaaagtgagtagtgagcaaaacataga

SEQ ID NO: 148030 - DNA, 163 bp, Arabidopsis thaliana landsberg
cgtgatttcgctacttgaagaagaagagacccatctgattttatttatattacaacagtttttttcaggattaatttcttcttctttttttgcctccttgtgggtctagtgtttgacaataaaagttatcattactctataaagccttagcttctgtgtacat

SEQ ID NO: 148031 - DNA, 120 bp, Arabidopsis thaliana landsberg
gcggcttttaaactatgtgaaggaggagaacctccataacaagaagcggattctctcagttttccggcggcggaggaacacaaagccaccggtttttagacacacagatttcattttcag

SEQ ID NO: 148032 - DNA, 210 bp, Arabidopsis thaliana landsberg
atagattgagtcatcttgaattccaaactttcatataacgttaacaaggacaaaggaagtagaaaccctaattcactggcgatctcaggtgagatctccgatctaacgtcacgcgcttcgtccctcgatatatagttttggttaaatttcgtatgggactttgttgatgagagcgcgtcgacgacgaaacctaaacagtttggtttttgt

SEQ ID NO: 148033 - DNA, 290 bp, Arabidopsis thaliana landsberg
aaataatatgcgtcattaattcttcttctttgggagagaatgtcagggtacattcaaatattcattacactttctttttgaattattgattataataaacaatagcttgactagtttagctacctgatcaaaccgggcgctgtctcaatccaattgaaccggagaaagcaaaggccggttcgagaaaaacgccttcaagttagctaaagctatctgtgcaacattgtccaaagaccctggtgtagccacagcaaaatgaggagacaacacaacattatccaaaccaaaca

SEQ ID NO: 148034 - DNA, 257 bp, Arabidopsis thaliana landsberg
attttaatgctttgtcctacaaatttattgctgtacttgttgcgagttttgcattagcacgtaacatgcaaagatcagaggtttgttttccacctatgtcacattttattggttttgtgagcatactggagtctcatttttggttcaacttctcaccagattgataggcgtatgcaagatgatatcagagcggcaaaccgtctatgcttgggaagccgtgcttggcgaaaacttattcgttacttggcagggatgct

SEQ ID NO: 148035 - DNA, 305 bp, Arabidopsis thaliana landsberg
ttaataagaaatgttttggatatcatgattctctaaaaacatgaattactccatataactgataataaatttaatcatcgccttcacatctctatttgactatcaaccatataattcgctctcattttctttagtgaaatgttttggtgggtgaatatgcatgaaattcatatggatagactttaatggaacataaaataaataaataacgaagtggggattagtagtagtatgtggagaaaagttggacaactcatctgtttttgcaaactttgcaagtgtcccatttatttctcgtctcttat

SEQ ID NO: 148036 - DNA, 773 bp, Arabidopsis thaliana landsberg
caatgccaactgttcagattcagacgacgggtggtgatgatgatgggatcgatgctgcatttggtaggaatcttgtgaatgttttccttctgttacatgcttttggggcatcaggtaatcagatcagacgctctgattcagattcgaatgactcgacaacaatcaaccgaggaacaagtgagctgaatttctctgaagaagaagaggaagaggaggaggaggagaggcatagtaacagtaactctttggcaagtcgaatgaggcgacaaggacgcgttctgctgggacgttcaggtaggagacgtagagatagagaagctaaccagaacacaggtcctcctcctagatgagagagaatcacacgaattcaaaagaaaactctgtctgattttgggtttcaggtaagctttatggtatggttaggtacaaatgtagtttcgacaagtttaaaacaaaacaaaaaaaggcttttggcctttctgctatcaccattggagaatttgggaatttgactcgaaattctttcatatgctagagaagcaggcttgcaatctcatgttttatttactgtattctgatgtaactttctgggtggaaaattcacaaatatctatccttgtgaataagcatgatcagtgatgatgaccaatgaagtcttttagcgaattatgaaattgtgtttccttgtgtttatagattccatgtgcgcttagagacttacctatgaatcgttgtagagtcttctaagagacttagaccacacacactcacaa

SEQ ID NO: 148037 - DNA, 435 bp, Arabidopsis thaliana landsberg
ctcaatctctcctctcaaatcaaacaactttgattgatcttcgcaatcgattccacatgaagcgcagtactaccgactctgatttggccggtgatgctcacaacgagacaaacaagaagatgaagagtccagaggaagaagaaatcggattctccaatttagacgagaatctagtgtacgaggtgttgaaacacgtcgacgcaaagaccttagctatgtcatcttgcgtgagcaagatctggcacaaaacggcacaagacgagcggctttgggagctgatctgtactcgtcactggactaacatcggctgcgggcagaaccagctcagatctgttgtgttggcgcttggtggcttccgaagactccactctctttacctctggcctctctctaaacccaatccgcgtgctaggttcggtaaggacgagcttaaac

SEQ ID NO: 148038 - DNA, 333 bp, Arabidopsis thaliana landsberg
ggctaaaagattctttgtggtggtcccatggtgctcttcaagtacaaacaccttacctgcatcaagatccaatttaaaattagtacactagagagagatttagaaagaaattagacacaatcataggaacaaaacagaatcatacgttttgccaattcttcttcaagagcgagacgaggaagttaacactcatctgcacattctggaagagctgcttctcttccatggaaaggttaccaacagcaacacccatacacagaactttcttcaactggaacttcactgttgctttggtctcattcacctttgcttccaatgactcttggtgactca

SEQ ID NO: 148039 - DNA, 346 bp, Arabidopsis thaliana landsberg
ccacaaatctttggttcactttaacacaacaaccaaaaacaaatctttggttcatatacatagcaatgctttaacaatgctcataactcttgaattattttgctacatataacatgataatgaatgtctatttaaagtgcaatatcagtctaagacgtacttctacagtcatagacaatatcttccgtttcgtacaagcaggatccgattattgggtggaatgccttgtgattggggttatcaacccacccttagtacagaaatgggtactaacttccaatttgggttgaaacagagagggtttagggatgatgttcatcagagacccgcacttgggtctccggag

SEQ ID NO: 148040 - DNA, 322 bp, Arabidopsis thaliana landsberg
caggaatcaagacggtggagtggaacggagagcattacttgctacctcttgcgaatatatgggccaatctgatcagccgcgatccaccgaaccttcctggccaccattttcctattgtctcttagaataaagaagaaacatacactacactcataactcacccggcaagctattctcaccgcagagcattttcgaccaaaacaaatatacacctatacttatttgtttataatgtttgatttgttttggtcgttgtattgtaatttacatcgaatgggtttgggtttcattaattgagaatattcccaggttttacggagga

SEQ ID NO: 148041 - DNA, 286 bp, Arabidopsis thaliana landsberg
acacggttctgacttctaataacattgaagttttgacaagaagtctcgcaggagcattgagtttcttgttgatgattttggaggtaagtagcgacgagatggagaagattatcttccgctggcggcggagaagggtggttggatttgttgcagcagtttggtgacgtggcgaattgaggggtgttattgtggtggttttggtggcgtgagcacacgtggttatggttgtggtggtggtgagaagccatgtaatcgacggcggagtcgcgtgactactagatcgaat

SEQ ID NO: 148042 - DNA, 622 bp, Arabidopsis thaliana landsberg
taaccaacggacagggatggaatctactttttcttctgatattttatctaaacaccaaagaaatgggcggcttttggtttttaaagactgttgtttttgtttctgtctgtaaaacataaaagaattttattgctcttgaagatattaaaaatcagacaagctgttcaagaaaaatattattctgttgaataaagtaaactgatggggaagagaaggtttcagaaagcaaaggaaacgtcgtcagtgacggcgacggtagcagaagcttcatctccgacggagtctcaggctacaaggagacgaagaggaaggccaaggaagaatcttgagaacccagaagatttcaagaaggaagaatctgaggaagacgaggattacgaagagtacgaggacgaagaagaagaagacgaagaagctgaggtggttattaacagagagaagctgaagaagaaagttaggagcagtagtggtagtatggaagaggagcaaaagatgaaacatgaagagttagaggaggaggagaagccggagatgacggtcaaggtagtggttccaccgccgtcgtctagacggtcgaggaggaaaagcacgccggtgaagagctggtaaactttaattaccg

SEQ ID NO: 148043 - DNA, 645 bp, Arabidopsis thaliana landsberg
aacactcaataacaaattcaaggaaaaaaataacaaaaccccatttcaactcaaatagcttcacagttttactaatctctctcatcttcttcccaacatcaaagaagacctttacttctggttagaatagaccaagaacactgagtacgacaaagaaccatgatgaatctttcttctcgtcgcgcctcttccactctcacattgagcttcactgttctccttttagcttccacaggtataaccagaagaagaagaagagtctctcactcacttacttcaaagtttacttcaaagtctatcacatctacttacactcgtttcaaagtttcattttttttagtgatttgtttctttatcttttggatgttaaaaggttcgtatggctcaacattcacattcgctaatcggtgcggctacaccgtatggcctggaatcctatcgaatgctggctcacctactctctccaccaccggattcgagctccctaaaggcacctctcgctctctccaagctcccaccggttggtccggtcgattctgggctcgtaccggttgcaagttcgacagttctggctccggtacatgcaaaaccggtgactgcggctccaactctgtcgaatgcgccgggcttggtgccgcaccgcct

SEQ ID NO: 148044 - DNA, 358 bp, Arabidopsis thaliana landsberg
ggtctttttatgaattaagtgtttatctatgatgacgaaaaaacactagtataaagcatagacattgaatagataaagtgaagaaaaagaaaagaagtctttcattttatttatttgtatagccatgataacacacattcgaggaggaatgaaaaaaaggaattcgaaaaaaagaagcgttcgatgggtttggcacaaaagtaagattttgcaaaatacaaagaatcacaacaaagagaaatctctcccaaaataggtaaataaccaaacgcaaaccggtttgaatcatctctttcctcttttcctttctttcatcaggcagtaacttggccgaacaacgacttacggatctgttaaa

SEQ ID NO: 148045 - DNA, 377 bp, Arabidopsis thaliana landsberg
aaaaatccacaagttgcttcattttcaatccacccaaaacgaacaaagcagcaggggtgttcactgtagtgttcagtttccttataccaaaatggaaacgccacaatcacaatacgcaattgcgattcttgccagaggttttcacacttatctctaatccttcctgcctcttctattctatgtacctatgaatacaaaagtggatatctcttggaattgtatatctggacgaccttcctctgatctttgagctgtttttgggggctgagcaaaaccgttatgtttttaccattcctctgtttatatgtcaaaacgtggcactccaaagagccttttcaccttcaccgcaacgtctatgaacctctttgatgcgatct

SEQ ID NO: 148046 - DNA, 138 bp, Arabidopsis thaliana landsberg
tgtgatgcaaacagatgagatgtgatcagaagtcaccaagtcaagccaagaaataacagttttggggtttctaacagtcctaagcgaacatgcagaaaacagaaacaataacagaattactaaaatcactcgaccaca

SEQ ID NO: 148047 - DNA, 141 bp, Arabidopsis thaliana landsberg
  unsure (1)..(141): unsure at all n locations
attagtccttttaagcaaattaatcccaaagattgatactttgttttcctgagattcttcttttacttcactgtttctgggctttgcaattngatggtgatggatgataaagataaatatcgcgaagtagtagaacattgg

SEQ ID NO: 148048 - DNA, 221 bp, Arabidopsis thaliana landsberg
cttggaaatatcaatctctttcaccgattcaaaagacaaaattggtaaagttctgtgagatatttgttcttgatgtctttcatcgtcatcagggttctttaggaaactttccaaactcttcctccacctgaggtttgcgaaatacgagttaggcagtgttgacagtagcaggctggcttcatttaactgtggacatcctgagagatccaatatctgattga

SEQ ID NO: 148049 - DNA, 202 bp, Arabidopsis thaliana landsberg
agatgagagcctttggtcagaagtggtattgatggactgtgtcatttcaggaaatgtgaagaatgagaaaaagatggagaattgggagggctcactagatagaaacgataagggatataaccatgacatggagttttggtttgaccatctcactagtagtagttgtataattggagaaatgtccgacatttctgagttttga

SEQ ID NO: 148050 - DNA, 329 bp, Arabidopsis thaliana landsberg
tttatgtgatgaatccatctccacaatattgataaaaaaaagaaaaaagaatccatgaatgaaacaattcatgttagtaaccatacaaagattgtatagcctctgagttatatcattcttcaacccaattcttttatacaacagttaaaatattgaggaaatcagattgaaaatcgcacagcaaatacattttctctgcaacccaagaacgagaatccaattcaagttgaagaaaggcagacaaatgttacctcgccaatcccacatcagtatttgacattatgtgcttagaatctagagtcaggagagtgattttgttggcttgaaag

SEQ ID NO: 148051 - DNA, 167 bp, Arabidopsis thaliana landsberg
gttggtctttcttgtaagcagccaactacaaccgaagagatatatgatacaatagctcatattgatttggctacagagtcttccccgagcttgagttcctctgttcagtctccatataatgtaatttgtagtcatttggatgacatatataaaatgattctggacaa

SEQ ID NO: 148052 - DNA, 782 bp, Arabidopsis thaliana landsberg
gatataagtaaaagacagaactttcagccaaccaggcaaacttatatctctccacaacaattggtccatacgataaagcaagaagaagagttaagaattagagcaggaagaagaagaagtagagaatgaagcatgaaatgatgagcatcaagccaagatgcatagccatcttctttcttctttgtgctatgcttcttggaaattatgtagttcaaggtctcattctttcacccctcccctttgtattctatcttcctaatttcaatatattaattccacattaataagactaacaatgatttttttttgttgaatttgctcgcttgtgtgtgttcttgttttttgaaccagcctcaagacctcgttctaccgaaaatacggtctcccttctctcacaagtacatctcctggtaaattcccatttttcagtaaatactgcaaggaaacaatggatttacagctaattcggctgtataataatgtactaatacatattataatttgaaaatatttcaaagcagaattcaaggaggaggcatatgatagggtcgacagcaccaacttgtacgtacaacgagtgcagaggatgcagatacaagtgcagagcagagcaagttccagtcgaaggaaatgaccctatcaacagtgcttatcattatagatgtgtttgtcatagataatagttgttaaatctcttctctttttgccctttcattgcaatttttgtacgacttaattgcattttggtttttgaatgagatgttttggaaaaatatattatt

SEQ ID NO: 148053 - DNA, 161 bp, Arabidopsis thaliana landsberg
tgaaaacatactgacgacaactccttctctctcttaaaacaaattttttttttctctctacaaagctccgccgccgcctagggttaaagattccggtggctttttcagcaccggaaccggatttctttgttttagtgtctctagtttcgatttcttggggg

SEQ ID NO: 148054 - DNA, 411 bp, Arabidopsis thaliana landsberg
ttgagcttcgaacgaaaaacgttattctctctctctctctccgccatggttcgttccctctccgcggtaatctatatccacccgtcgtcaatcggaactttacgaactccttatcaatcgtattttcactttccaattctgagttctcttctcgtttcgtcctctcttcctccgtatccacgggtctcgctttcggtttctagggtttcgcggttctgatcacaagttctgcttcaattgtaagcgatttgatcgcaagtagctgttaaatcggtgcgtaattcaacttttgaaatctcaaggtttagtctctgcaattctgattttgaacacagctagctagtagcagatttaagagttcgtcaaattaggattttgggtttgtttgggtccctttctcaccgaagttct

SEQ ID NO: 148055 - DNA, 295 bp, Arabidopsis thaliana landsberg
attttcttttcgcacactttctcgacacccaatcagaactcagctgagagaaacgcgtctctcagatttcaatccttcactttcccttttctttttttctcgttatcggatcagaacaaaattttgggaaattcgaggtttccctggattgttggattcgattattgttgaaattcgatatgggtgtttgttgtttgtgttaatcgttgtcaaagttttgatttttttcctcgagaaaatttgagattttttcgttcgtctaatcgagagaaaacgcagccattttactacgtaa

SEQ ID NO: 148056 - DNA, 377 bp, Arabidopsis thaliana landsberg
gagattagagagatgccattttttttttgaatgggcaaactaaggttagagagataccataagaatataattgtgcattttagtataatggtgatgaagtcgaaagattgtgcagtaaaatgatagagaaattaagcaaattaattgatctcaaccaaaaaaatttaacattcaaaattggggaaattctctaaataccacatttttgagtttttcttccaaaactctacttaaatggaagaaatacaaactttaaattgaaaataggaaacttaatataatattttaattttatttgtaatttcttttgatcgaataaaaaatattttacataaaaatgtgtggtattattagaaaaataaactaattatcgtatt

SEQ ID NO: 148057 - DNA, 117 bp, Arabidopsis thaliana landsberg
attccaaattaaactagagaaaaaaacgaaatcgagacagtatctcaaaggaatcgacatgaacgtatgtgattcatgtgaagtaaaccataaacaaatcccaaattgtcgactatt

SEQ ID NO: 148058 - DNA, 379 bp, Arabidopsis thaliana landsberg
catgacacgtcatctctcctcgtaatcggagattttctctccttctcttttcagccgccaatcgccgccgcaatcttcttcatcggcctccgttctacatcgacggtgtttgccgtaacttctgtcaaactctcagaatttgcttaagtataccacctaactcgagacgctatgaccgttttctcagttcagtccactatcttcagtcgagcctccgtagctcttctctcgagcaatggcttcaaacgattttcattcgtttcttcgttttcttcctccgccgcttactctccacctaaaatgaggaagcgtcgctacccaatcgtctctgctggtgatattggtggcgtcgcaatcgctagaaatggttcgttcttag

SEQ ID NO: 148059 - DNA, 518 bp, Arabidopsis thaliana landsberg; identical to SEQ ID NO: 13877
  unsure (1)..(518): unsure at all n locations

SEQ ID NO: 148060 - DNA, 107 bp, Arabidopsis thaliana landsberg
taaaaagtcttagctttacatgctcgttcgatttcacctgtttccaatctttattctctggaattaggatcatgccctcgtcgtcgtattcaagaacgattcaaatc

SEQ ID NO: 148061 - DNA, 267 bp, Arabidopsis thaliana landsberg
caggggtgcgatgaagatcaagggtagtctcagtgctgcgcagaaattcacccctgacatcttccctaaaccttcaaagttgtgaacaccaaaaagagtggtatgcagcaaaccctaaactcaagctcaatttatgttttcaaaggggttggctttttagtacaactagtcagaaataaagttctctttcaaggatctttggattctcttttatctttggaacaaaaatattggtattgggttttaataatatgaatcttctctttg

SEQ ID NO: 148062 - DNA, 271 bp, Arabidopsis thaliana landsberg
aaagagtctaagaagatgttggagccaccaagcctgaaaaaggtggcctcgctaggagctctagctgcatgccggctttagctaaggagcttaaagatcgtaccttggttaattagcttatttgtatactcacgtacacgtatgttatgttcatatatagatttgaatttacatgcagacggagatgtgtattaagtgagttatatatgtagttaaaaactgatggaagttttacgtgtgtaaattgtaatgtataatattttttcgtcta

SEQ ID NO: 148063 - DNA, 450 bp, Arabidopsis thaliana landsberg
tttttacttaaggagaacggtagagctcaaacattacaaatttaagatattatgaacaaggaaaagtaaaaagggttcacacacactttgcataaagttcatcggcgaaaatcacacacacgcctttgtaaataatgtaacttatagtatacgtaagtcaaaagcaaataaatatatttggttccaatgcttgtctaacttggagatatcttatcaaactgtcccttcattcttgcgtgagtgagtccgacgcaggcatcgacaaaatctccttcaatgaaatcagtggacaaaatctgtaacttatctccatatcccttggaagcacactgagatataaaaagcctagcgtgttttctgatccgatcagtaacctgtttaacccacacaaccggattatctgcttgcggcgtaaccgtgttctcaacccggtagaagaatttcctagaa

SEQ ID NO: 148064 - DNA, 1636 bp, Arabidopsis thaliana landsberg
ctatatgtatgcaagataaaggcagcaagaaacggtgagttttcttcacgatcataaatggtttgttcgtctttctgatttttgattttatagatatgtaactttttttattaggtcaatttcaagtggtccatggtagattcaattcatgttaggtcatcatcttcaagctaaaacgcctaccaaacatataataacaagtattcttttaatcactagttttagtttcaaaatatttctgactatcttaagtgcatttagattttagttcaacatgatggaaaaagataacttgactcttgtttaacttgcatatgttttgtttgactatttgttatgtttgagaggaatgatttttctttgtaaaacagctttatataaaacttgtggcttactcggatgaattttatatttgttttgattatttttcaaatgttgtttttttcaaaaccttttgacagtaaattacaatataaattattttcaaagatcttaatatgtcttatttaagtgaatttttaattataattataagtaaattattaaatatagattataacaatgaagttaaatcttattcactatatctttaaatatttttttctcttatttttttaatattttattcactatttgtaacaaattataaaagccaaaattaccaaatttctgcaagaaaaaacaaaaaacaaatccttggctcctcctaaaatccacctaccttacccttttatatataagatacaaccaaaaacaagatgatttggtgctttcaatattaaagatataatatttcataattaacatattctcccttaggttttcctgcacactcgatttaaatcgtctaacaaggtcagaatccataatttatacaaccattttctgctttatttgtttcctccctaattacatgttattaactattaagcatatccttaatacaaaacccaaactgaattatctttgtcaatagttgtcttctctctcgattattcttaagataactactttggtagttttgtttttttaattactactgcaccctcttgcgcttcaagttacttggtaaaaaactctcttaactttggataatttctcgaagtctctgaagaaagaaccctttttttcttctctcataatcgtctctgtaacgtccttctccttcttcatcttctttgcgtttcttctgcagccttttgcggttcacgtgttgattgcttctgtctctactttttgtccgttttaaagtttaaacttattgttacaaaattggattttctctgatcaaacgataaaaacagagtcttttagtatcttcttcttgggtataacgaagatttttgtggtttcttctgatgtaattcacaaaaccatttgtataatccttgaaaagactttttgttcagaaatgaagtttcttactttgctctttcttttctatatttcagtaatgatgatgataaagcttgagagaagtgattagtctgtagaagaagaagagttaaaaccattcaccaaagaagaaattgagaactagagacagtcatggagatcaaatcttaccaaaatcaagcagagtattttggtggacactatttattagcagatccatttcttccatatacttctggtc

SEQ ID NO: 148065 - DNA, 264 bp, Arabidopsis thaliana landsberg
tgtgcagaggtaactgatcctcttttattgaagggaaaggagtttcatagatcaaggtaagtcctcctgactttctcaagaatttctacaccagcaactaaaaaacgttttctctgagactagaaacagattcaaacaattcattcccttggagacagaaacaaacaaaatattgtccacagagatttgctctctccagtttccttatttgcttcgtttcttcttgacggcttgtttcttggtctcaatcggagcagccggttg

SEQ ID NO: 148066 - DNA, 668 bp, Arabidopsis thaliana landsberg
tgactttgttttggttcatttcagactattggttatttgtttttgaaacttgttgcacttattttcctatgctttgttggaactattgatgtgtgttttagtgatttaacagtctaactgaaggatccatgtgaaaacactaaccaagggtctacaacaatgagcagaattcacaaaggtaagcgaaacgaccagagtgtcgatcgacaccaacatggtatcgatcgacaccaacatggtatcgatcgacaccactctcaggtggcaactcacgtttctctaacttttaacttttgattatttttctttcgattcctctagcttaataactctggggacagtgttatctaagtctgggggagtcagttactaacttcatcttttctcttcttatgagtcagttgcgtcattctaacttagatagtcgtttattgagttaaaacttttgtctgaaattatgatctatctctcgagtttattgcctggatggtttaagtactgcagattcaaatcaattcgactaatggaaaatccagaaagccaatcaacaaacttaaggacatccattcccaacataatccacagaggctggagctaatctcattgctcttccttttacctcatcaaaacggttagtgttcataggacttgactgcttgttcatacct

SEQ ID NO: 148067 - DNA, 804 bp, Arabidopsis thaliana landsberg
ggccaaagcaaaagaagagagaaacgcacgcactttgctttttttatttaagcaacagggagagaatcttcctgctcctccaaggaagtagttggagtgccacttccaccatttagcaccgtgacgttaccttcagcgtcaacgtccacaatcaccgagtctccttctttgatctctctcgcaagcatcttctctgccatactatcctctaaaagcctcatgatggctcttctcaacggtcttgctccatagctcgggttataaccttcgtctactactctctctttgaatctttcggtcacctgaagctcaatctctttcttcttcaacctctcgaacacttccttcaacagtatgtcagcaatttctttcacttccagctttgttagctgtctgaacacaatcatctcgtctagcctgtttaggaactcgggtctgaagtattgtttcagctcctctgttacaaggctcttgattctgttgtaactgctgtctttctcgtcgtagtctaagtcgaatccgatacgtcttcctcctttctcaatcacgctgcttccgacgtttgatgtcatgatgagaagtgtgtttttgaagtcaactgttcttcctttgctgtctgttaatctaccatcttcaaggatttgaagcatcatgttgaaaacatctggatgggctttttcaatctcatcgaatagaacgacggtgtaagggcgacgtctaaccgcttctgttaactgacctccttcggtgtatccgacatatccaggaggtgaaccgatgagtttggagacagtgtgcctctcc

SEQ ID NO: 148068 - DNA, 444 bp, Arabidopsis thaliana landsberg
atctcagtcttggagaatttcaaacaaagtttcaaactttgctcaccaacttttatttatttattttggtggtagaaaacagactttgatggctttgtaggaatactagatgtgtagatctaaagattataaccattttctgtgttcttgttctttcagaacataacttcatgtctttttgtctctctgttcactagctctctgtttccatggactccacactatcttcttcttacagatttatttcatacacatacactgatacacatgtgtgtatacgtatgtgtttatgtgtgcttattatactctttttggattcaagaaactaatctttagtatttttgacattctggtagatttatgctcacttcttaggccttgttgacttttacagtgatggattttgaaactctggttgatttgattttctttttggtttgatgc

SEQ ID NO: 148069 - DNA, 375 bp, Arabidopsis thaliana landsberg
agctgagttaataaatcttgtttttcttactcaaaagaattctaaagttttcttgagagtaacgtttgtgatgattatgaagcacagtaactgggcctagcgtgaaagcataaagcccaatagaaaaggcctttttcttttttttcttcttattcccggaatccgacaatgttcaaagtgtgtagtagattgatgaagaaaaccagtgtcattttggtagataatcgtatggaggaattttttcttgcaaaagtgatatatatggtggaaaaatatatatgtaaacatagatgtttattgctcttccgcatttgtgttaaacaaatagtgtaacaatatcaaacagtttttttgtttcgtccattcgattgataa

SEQ ID NO: 148070 - DNA, 380 bp, Arabidopsis thaliana landsberg
ttatcataagatatgaataagaaaatagatcgtcttggagattgtttcgaagggaactaagaagcctatggcctctttggagagatgggttattgggtgtacattgagctatttgtacggcttagtttatggatgctgcacgattaatatatgtcttttaaaattaatagaatgtacttacaatcatattaagtaaaatattcatatcaataagtactaaaccatgagttatctatattgcaacattttctattcacattatattcgcgagaggacgatgaatatttggccagagtcgttaagaatcagaacttgtagataacgaatcatagatagtcataattatataatagtatatagtatgaaaatggtatgtaagg

SEQ ID NO: 148071 - DNA, 144 bp, Arabidopsis thaliana landsberg
tgtgacatgcttagaagagaacttccaatgattagagaggcgtgtcttcgggttcttgttctctgtactattttccttaaagaagcttctgcatatggtctgtgccttgccgagattggcgagatgatgactcgggaatttcgt

SEQ ID NO: 148072 - DNA, 139 bp, Arabidopsis thaliana landsberg
ggagatgaataatgataatctggaggatgtatcgttaaacacaaacactagaggataacagagaaagaaaaccattccaaagcgacaaatattaataagcacgcaaacttaaaaactaccaacttgataggaaatagta

SEQ ID NO: 148073 - DNA, 385 bp, Arabidopsis thaliana landsberg
ttcccttttcataagcaggtccgagattcccattgaagtaaaacaatgttttccgcttctcccgtggcctaataataaggaacaagacaacaactttcaggcttcttgtttccagcgatcgaacatgactgaaacaatgtccaagaactatcagagaatatacctttcccagtaatttttgcgcattgagtaagggtcaggaactttccaggctggaatcacgagatctttgcgggggtcaaagcaaggatgatctcctctcctctcatcagatatatcatcccagttatcaccaaaataagctgttgttgaatggttgtgcttagagtttgtgttaccccagtgaactagcatcatgctattccatatctctttaggagcatag

SEQ ID NO: 148074 - DNA, 510 bp, Arabidopsis thaliana landsberg
cttttgcagttcaagaaactatgcttgagatttatgttaaactatctattgtatgcagttcttgtctggtggacagtccgagttggaggcgaccttgaacttgaacgcaatgaaccaggcaccgaacccatggcacgtgtccttctcctacgcacgtgccttgcagaacacttgcttgaagacatggggaggcaaggaagagaacgtgaaggcggctcaggacattctcttggccagagccaaagccaattcgctggctcagctcgggaaatacactggagaaggcgagtctgaggaagccaaggagggtatgtttgtaaaaggctacacctactaagctatttgtaataatggttccatagatcaaaactcaaaaacttgagcttgattctggtcatttgagttattatactcttcttcaggtataaaagtcagttctgtgttatcatgtgagactagttttgtttcttcatggttaatatcttagtacctactcgttactactaataa

SEQ ID NO: 148075 - DNA, 137 bp, Arabidopsis thaliana landsberg
gactcagttcttgttagacctcggatacaaagaaaactctgaggaaatggagagagttctcaagaatttccgtggcaaaggatctgaactccgagagagatttaatgtcctcgtgagtttgggtcttactgagaaag

SEQ ID NO: 148076 - DNA, 679 bp, Arabidopsis thaliana landsberg
catatctatttattcaataacccttacaacaccgaatataactttgaaaaaaaaaacaaatggcttcaaagaactcaacctctcttgctcttttctttgccctcaacatcctctttttcaccttaaccactgcaacaaattgcaactgcaagccaagtcctaaaccaaagccagtcccaagtcctaagcccaagccggtccaatgtcctcctccaccccgtccttcagtcccaagtcctaatcctaggccggtcacacctccacgcacccctggttcatccggaaacagctgtcctattgatgctctcaagctcggtgtatgtgcaaatgtcttaagcagtctactcaacatccagttgggacagccatcctctcaacaatgttgctcgctcatccaaggtttggttgacgtcgacgctgcgatttgtctatgcactgctctgagggctaacgttcttggtatcaaccttaacgttccgatatctctcagcgttcttctcaacgtttgtaacagaaagcttccatctggtttccaatgtgcttgagcaatatccattatgcatacgatgcgatgccagtgcacaatatcgtcttcgaaatttattatagtttgaataaatgcatgtaaggtatagtttatgtatcaatcttaatttgttaaagagaaaaaataaatgtg

SEQ ID NO: 148077 - DNA, 515 bp, Arabidopsis thaliana landsberg
tacctttcatctcagtaattatattagttaaattattgcaactctcattacgaaaaccgtcacacatactaaatctgtttgttatgctaatttgttcgtttcccagtttttcattctttatcataaaacccccgtaccatacaaattacatatctgatcaaattttctacgaactttgtgtgtctccttccttccactgcttgtttgatccaatctcaacctcgggattcggtaccgtcttctcggggttacccttaggcttactcttggaatctctccacctgaaaccactgaaaagctcatccatatcctcaagcatcctcccttgcgtctccggcaagaaagtgtaaaagaaaacccaagccacagtcgcaatccctccaaacaagtaaaacgctccaccagtagtcatcgctttcgacattggaagaaacgatatcgagatcacaccactagtcactctgttcaccaccacacccatactcgagccctgtgatctcaacctcaacgggaat

SEQ ID NO: 148078 - DNA, 139 bp, Arabidopsis thaliana landsberg
  unsure (1)..(139): unsure at all n locations
tgacaatccgaaattaggtaaccatgttcattgaatttatcgtttcaacacattcgaatcactgagtcctacgtttcagtttaattccctgatgcacattttgatttcggtttgcgtattggtcttcgagtnttccgtc

SEQ ID NO: 148079 - DNA, 67 bp, Arabidopsis thaliana landsberg
gcttgatcccctggttcctcttgcctggcaaaagaaaaccgggattgattatcctcaactttactgg

SEQ ID NO: 148080 - DNA, 139 bp, Arabidopsis thaliana landsberg
aaaaaaaaaaaaaaaaaaaaactctgaagcttcttctttgattaattctctcctggggaaaaaaaaccctagctcttccttcttctctcttcttttagaattatctgctttcgaattttttgaaaaggagaaacctttt

SEQ ID NO: 148081 - DNA, 392 bp, Arabidopsis thaliana landsberg
cagcctctgaagtgggaattaaaacaaaagccgggcttgagtcctcctcgtggtggttttgatcctgatgatccaaatcaacaaatcgtcgctgaagatatatttgacgaatatggaggtgaatattttaattccttaaaggttttttttttcacaaatcccatctcattttctacatacttatttcttttgatacctcagggttccttgagggcagcatcccaatagaaatactgaagagtatgtcgtcggataagaaaagaaaatccaaaaagaacaaaaggcacaagaagcattcatctcggactgttgaggaaactgatgaatcttcaacaggctcagaagatagtagagagaagaggggatcaaagaagcgcaagaaacttaagaag

SEQ ID NO: 148082 - DNA, 1059 bp, Arabidopsis thaliana landsberg
gcgttagggttgtttttctcaacaatggtgtctctggccaagtttcactactgtgatcaaacactccacctccgactcgacactcaccgtaaaccgcagcctaaacctgtttcataccgaatcttacataaacctcctccttctcgcgtcatcagagcttcttcgttttcatcaaaccctaaaccctctttcctcaaaaccacctgcgtgaccttaacaacagccgccgctttactctccgcttccctccacctctccaccaaacccgtcaccgcagcaactctcgtctcacctcctcctccaccatccacggcggcggatctcacttccgatcaaatctcgtcgcgtccaaaggaagaagaagaagaagcagcgctggagaagcacctcactaagaatccaaacgacgtcgaagctcttcaatcactgatgaaaatcaaattccaaaccaaaaacatcgaccacgccttagagattctaaaccgtttgatcgaaatccaacccgaagaacaagaatggcggatcctaaaagctcaggtacaaacctacggcggcgatttcgattcagcgacgaaaggattcgaagaggttctatctaaagatccatttcgtgtagaagcttatcacggattagtaatggcttactccgaatccgaatcgaaattatcagagatcgagagtagaatcaacgaagcgattgagaaatgcacgaaggagaacaagaaagattttagagatttcatgttgttgattgctcagattagggttatcaaaggtaatccaattgaagcacttagggtttatcaagagttggtgaaagatgagcctaaagactttagaccatatctatgtcaaggtttgatttatacattgatgaagaagaaagatgaagcagagaagcaatttgcagagtttagaagattggttcctgagaatcatccttacaaagagtatttaaatgctaatgtactcaatactaacaagcttttcgctaagaatcagtgaaaatttgtgtttttgtttgaatatgcttagaaatgtgattttgaacttttattt

SEQ ID NO: 148083 - DNA, 429 bp, Arabidopsis thaliana landsberg
attttgtttactgatttgacaattatgagaaaaattgtatgccattaaaaaaccctgaaaatttcatcctgattccgtttgttcacacctctacatgaaagtaacaaaaaactacttatcagctccaagggcaataaattacacaaaatttgacatcactactacaacagtgaagactggactggtcatttgtttctgctcttctctttctatctaattttgttgatgtatgagctcaactttaagaatgtggttgaaggagcaaagatgcgtagataagatggttccaaacatcgggaactcccggcaggcaccagtggctgcaatcctgtcgccttgtcgacactttcttaccatccgtgttggtcttaccgtagattgatggatgtccgtctttgcggaaattagtcagctttgtcacgtttagaa

SEQ ID NO: 148084 - DNA, 336 bp, Arabidopsis thaliana landsberg
gtccatgtatgttacaggttttgcatgcagaagtgccttcctttatcggggacaccaatgttgttaagctttcttggaaagaagccacaaagccattagcctatacaagaactttgttagtattgttagttttgcaggtttcttatcatgcttcccaaatatgataaaatgcttatcatggctcatcttcttttctgatttttggtttctcagatatacagacctaatgtatggcatacccccggatattgatgcgtttcataattttatggacaaactctcagaagacttgctgaataaactagatatggagggaatgtgcgaattagaagatga

SEQ ID NO: 148085 - DNA, 377 bp, Arabidopsis thaliana landsberg
cacaaaccatggcttcttcttcttcttcttctttattatttcctttctttcttattcttttttcatgtttaatcgcggtttcatcgtcaagaagatcattaatcgaccgtactcttccgaaaaaccttccgagatccggttttcgattgagtcttcgacatgtggattctggtaaaaacctcaccaagatccaaaagattcaaagagggattaaccgtggattccacagattaaacaggttaggagctgtggctgttttggctgtagcctctaatcctgatgatactaataacattaaagcacctactcatggaggaagcggtgagtttcttatggagttatctattggaaacccggcggttaaatactctgctatt

SEQ ID NO: 148086 - DNA, 230 bp, Arabidopsis thaliana landsberg
taaacaatatgatttacttttcacattagtgatatctctctaggaacactggtctctctctctatctatacatcagctggagcatgccttcttcttttccacgaaattgctaaaaacaatcagagagcttctgataagaaattcccacccaacttgacaatatgatgaaaaaagaatatattccaacaagaaaagataagatgagaaaacgaattcgaatccaacttctg

SEQ ID NO: 148087 - DNA, 74 bp, Arabidopsis thaliana landsberg
catgttttcgatttttcggctgtattaaagataattattaggctttgaggccaatggaatcagattctatctac

SEQ ID NO: 148088 - DNA, 223 bp, Arabidopsis thaliana landsberg
aaacaatgaagaagaaagactctgtaacagactccattaagcaaacaaaaagaaccaaaggtgcactgaaggctgtaagcaatgaaccagaaagcactacagggaaaaatcttaaatccttgaaaaagctgaatggtgaacctgataaaacaagaggcagaactggcaaaaagcagaaggtgactcaagctatgcaccggaaaatcgaataagattgtgatga

SEQ ID NO: 148089 - DNA, 209 bp, Arabidopsis thaliana landsberg
ttatagaaatcctctgataaaatggagaagaaagatatcagatgtttctggggcatgtctttgttttacataagtctccattaggcaaagaagaggacaacagatacacacgttacacacaggtagtagattcacaaaagaaagcaaactaagaacaaaagccagattttaaatagaactcaatcagctttagcttctggacttgaatg

SEQ ID NO: 148090 - DNA, 95 bp, Arabidopsis thaliana landsberg
aaatcaaaaagcttcgttgtggaggtaagtaggaggaagacgatggcgttagagaagcacatagagaaggtactcttcagcgatgaagtaattgc

SEQ ID NO: 148091 - DNA, 164 bp, Arabidopsis thaliana landsberg
caattaacttttttccgggaagatctcaccggagaaaagctaagctagggtttctccaccgtgaagattctagaagcgagaatttggaatttgctaattaagaagatgtgttccgatctttcttaattaaaaaagcattgaaattgacgaattaagggttgtga

SEQ ID NO: 148092 - DNA, 267 bp, Arabidopsis thaliana landsberg
aaattaccttatataccgtttggcttaaaacaaatcaccttatatagtgcaagtgaatcactagaatcttctccgataatcacaaactcgaaaagaacaaataagctttccattatagattaggacattgaattagaacactaaagtaaaaggttagctataaatgcatacaatctatttaataatacattttaccgccttataaatgatgaattcccacatttctttattcttcttcgtccttcaagatttaacaaaacacacaac

SEQ ID NO: 148093 - DNA, 308 bp, Arabidopsis thaliana landsberg
aaactgagaatgttttgtatgtgtaagtgcgaaacaacaagtcaagtgaaatattagctgcatatgaagatacaagctgatgcagcgcatctttagtagttttagggattttatcaaacactcgtattgggagtgttcgacaagtaacgggttttagttttattttacttagcgtttcctttattgaagggaaaattacccatctcttgtagattacattaggattattcttctaggttttatctgtatctcttatatatagtgatcctaaagaaactttgtcattttgtgatttctagagaaattat

SEQ ID NO: 148094 - DNA, 588 bp, Arabidopsis thaliana landsberg
gcgttgcgtttatatctcagaaaatggcaaaaatcgtgatattatttgatttcgatcggactttgatcgacggagatagtgacaattgggttgtcactgaaatgggactcacagagatcttccatcagctccgtttcactttaccatggaatcgtcttatggtatttcatttattaaagcatccaaaatctcatcctcttcttatgatttacgcatattgaaatcaaaatttgaattggattttgaaaaggataggatgatgatggagctacaatcacaaggtagatcgattgatgacattgaatcttgtttgaagaaaatgcctattgattctcacattattgaagctatcaaatcagccaaatctttagggtatgaacaatgattagttcacttaaatggtctcagtttctttctttggttgagtgttgtttgtttggttcaaatttgcagatgtgatttaaagattgtgagtgatgcaaatcagtttttcattgagaagatactagagcaccatgatttgttggattgcttttctgagatctacacaaatccaacctctcttgatgataatgggaacttgcggat

SEQ ID NO: 148095 - DNA, 448 bp, Arabidopsis thaliana landsberg
gcgagaaacaaagaaaacttaagcctcaagaaatcaaacccacaaaaaatcaattcaacaaaacctctttctgctctctctctctttttcattcccatatgttgcttccttgagtttatctcttccgaaagaatgggaagcaacatctgaggatccatttgattatcatacatatattaaaaacaaaaacatatatctttgtgtgtgcgcgttaatgatgaaatagcagattgagagcaagaaagaggtaatagctgataaccacaatggagattcagaggatgaggcagttgatgtctctttggtctaatttgaagagtagccgcgtttctctcaccggtgggaatcatacagccgcaaggttctgcactcgctaggctcgcctcttctctcgctagctttgtctttcttctttctcttcttcttacttccttttgattctctttta

SEQ ID NO: 148096 - DNA, 325 bp, Arabidopsis thaliana landsberg
cttgttgtgatataggaactatttttcatagatggaaaatctttgttgtatatataatagactcattacaagctttagtggtatcatcctcatcacgtttgatctctcgcaaaactttgaattacagaaaaagaaaacaaaaaaaaagttgcatattaggggttaagaagacccataaaatgagagagaaagatcaaaatttataaagcaaagctctgttttgtagttcatcatcacagagttagcttctgtgaagtcgtcaaattcacctgcttcagatgtaaagctgccaacaagccctgccatgtgtctgctgatgtggcac

SEQ ID NO: 148097 - DNA, 218 bp, Arabidopsis thaliana landsberg
gcaacggctatatcatgtaagggctcagatcacacctgctggactaggtgtcccaccttcaatgtcctcaaaagcatcgttaccaacaaacagaatcgctgcaaattttgctaatgtagctcaaaggcctccaatgggcatggcctttccacgcccaccaatgccaaggcccccaggtttccctgttcctggttcttttgtagctgctacaacaatga

SEQ ID NO: 148098 - DNA, 153 bp, Arabidopsis thaliana landsberg
gacttgttaaactaaaaacagcttttaagaatttcagtttggtgttgtgtaaaaatggttttttttgtttctttctcagaaaacaatatatgtttggtaaatgtttcgttattagtctcttttacttgatgtatatggcaattatggaaacaa

SEQ ID NO: 148099 - DNA, 118 bp, Arabidopsis thaliana landsberg
agagagtatccagaaaaatccgacaggcctggagagttgtataataagatgataatccacagtcgtgttcttccaaatcatggaagacagatattaagaacatccctttctcttttca

SEQ ID NO: 148100 - DNA, 319 bp, Arabidopsis thaliana landsberg
ctggattctccggtttcctccgtgacgacgagtcaacaacaagaacatcgaagctaatgatgatgaaacgcaacggaaacaacgacggaaacgccgcggctacagggagggttagagtagaagcagtagcggaagcggtggcgcgtgcagcgtgtggacaagcgtttgaggttgtttattatccacgcgctagtacaccggagttttgcgtaaaagcagctgatgttagatcagcaatgaggataagatggtgtagtggtatgcgttttaaaatggcgtttgaaacagaggattcttctagaatcagttggtttatggg

SEQ ID NO: 148101 - DNA, 235 bp, Arabidopsis thaliana landsberg
tttacacaacaacaacaacaacaataataacaacaatcttcttctccaacatgtctctatatcttatactcatatagttacatatagaaatcacacctctatggttttatataagtaacattcatatatatatcttaaaagatctttcaaagtagacttacactcagcttgttccatagtccaataactcccacctgaaccggtgaaaaacatagagcactttcgggcaactttt

SEQ ID NO: 148102 - DNA, 709 bp, Arabidopsis thaliana landsberg
tccttcacattcatcccaaaacattacaaaacgttacaatggcttctaaggctcttgcagttacagctcttcttattacacttaatcttcttttcttcacctttgtaacctccacaaaatgtccaccaactactcctaaacccccaaaaaccccgaaatcgcctaagaaggctcctgccgtgaaacccacttgtcctaccgacacacttaagcttggtgtttgcgcagacttattgggcctagttaacgttgttgttggttctccaccaaagactccttgttgtacacttcttcaaggtcttgctaatcttgaagctgcggtttgtctctgcaccgctcttaaagccaatgtcttggggattaatctcaatgttcctattgatctaaccttgctgttgaactattgtggcaagaaagttcctcatggtttccaatgttcttgaagatttgagactttaaaagagaaaaatctctttggtttgctatgtttttatatgtttggttctactgttatctattgtttttgtgagaaaaagctttgttctgtcactgttgagtttgatgtaatgcttgagcttgttcatgatagaacctttgttctctcaatattgagtttgatgtaatgcttgagcttgttaatggattttatgtttttagtatttctcctcatgtccataaatgacattctataatgccgctgctctatttg

SEQ ID NO: 148103 - DNA, 346 bp, Arabidopsis thaliana landsberg
ctctgacatctccgtgcaatcgggagagaactttttttgtgttggtggtggttggctttcgtacatgcaggatcagtatataaatcacattatgaatgaaacaggagcaactgttgtattaagagggcgtggttcagcaagccttgagaatcaacatggagatggtaatatttccttcgtttgtgtttttatttgcctacttatgaaggtgttatttacctcaaggcggatgtatctgaatgatattgttaatgtaaatccctttaacgcattatggtagaagcacagctaccgctgcatatattattatccggcagcaacccaaagagcatcgacgatgcagaac

SEQ ID NO: 148104 - DNA, 268 bp, Arabidopsis thaliana landsberg
  unsure (1)..(268): unsure at all n locations
gagaaagaaactcatcaacgccacgcctgtacaagagagagagagagaataataagtttacagagtagagaagcttttaaattcgaatcaggggcaaatccgtaaaatattcctttttttttttcctttttcctcactactttatatctctaacctttaacttttttttttcttcttcttcttcttactcttcgncttcttcttcctcctctgggtctgttcatcggaaaaggagatnttgttttttttgtttggtttttttggtttg

SEQ ID NO: 148105 - DNA, 243 bp, Arabidopsis thaliana landsberg
cgtatataaaattgatgcttgggcatatttatttacaaaaccatcctcataggaacgaatttagaaagaaaaacaaaaaacaagtccatggtgaccaactatgaaatataatgtacatatcttagaaatatcttcttaatggaatgtctatttgcttttgcactgtccatggtgatttcaggaccaactatgatctcacaatctaatcttaaaatagaagccaaaaaaaaaagaggacgagac

SEQ ID NO: 148106 - DNA, 86 bp, Arabidopsis thaliana landsberg
gtctccgtccccaaatctctcagctaccttaaatcagaattctagggttcttccgattagggtaaaatcgaatccagatttcccac

SEQ ID NO: 148107 - DNA, 590 bp, Arabidopsis thaliana landsberg
ttatagaactcatccctaaggattgaagtatcaactgataaataaaactgaaatgaggtgataaatcttaacagtgatacaaggaagaaaacaaaatctgtatagataaaaaccaaaacaagagttaaaccaaaagatagatgctgattttctcaagtacttgatcgatgcaagaacatcgagctgggatccaagtatctcctctgcaaccttctcggcctatgccctgagcttggtgagttgcttcttacgctcatacaaagcttgtgacctctcctttctcttcacctcaagctcctgtaaaatcattaacccaacagtaaattcccagtttcttccacagattaagtgagataattttctcctgactaaactaagtacaatgatatgatcttaaggttataaattaaaacaatcagcaaaagacccagaacaatgacaaagatgtgtcagtagatgctattcaaatcaactcataggaaacttacaaatacaattttagtaaatgaagcaccttttggtccaataataaggcagacgaaaaggacaaaagggacataccttgatggtatcgtaatggttccagccaa

SEQ ID NO: 148108 - DNA, 257 bp, Arabidopsis thaliana landsberg
gggattattatgatagtagagtctcaccatcgggctcggattcgcttggtgcaggtcgggaaccaattcggctgacacagcctcgtgacttttaaacctttattggtttgtgagcagggattggatcccgccttgcatcaactgaatcggatcctcgaggtgtaaaaaaactcgtaaatcctatcagatctggaagatttctacgcttctccttctttatattcgttttcttatgctttttatttttgatataacct

SEQ ID NO: 148109 - DNA, 394 bp, Arabidopsis thaliana landsberg
  unsure (1)..(394): unsure at all n locations
tatcgaaaacgaatgggattgtttgcgcgggtgtgccgaagctgagagagactgagtatccgccgtagctttagcaagagagaggagatttcacgacggtgccgnatgcggtggtggtgnagaagagagcatcttcgtcgggttttattgaggtgccgtgtttgagtttatgagctctagcgattgaggattcagcgagacgacggagagagaggtaagggtcttttggtgattggtcggagtgggagaagggagagagaggtagtttgacggcggagacgacggagaggaagataaggaagaagaagaagaagatagaagaagccattgttgtggtgtgtttgggattgatggcttatgggttaagtaagtgagaaggagaagaaagaagaca

SEQ ID NO: 148110 - DNA, 523 bp, Arabidopsis thaliana landsberg
aaaaagcgtcgaaacctctcactccgtctctcaatcaattctccgatcagccatggcttctgattcttctctcggcaacaccaacgacggtactatctctctccctctctctaaatctgaaactgcttcataattttgacgaatctcactacctcaggtcctccttctcccggagaaaacgtttcaagccctatcgaaaacacatactcttcccccgccgcacttcaccgtcgccggcgaggaagatcctctactcccacgcaattcgcaactcctccaccaccgccttcacgtctcgcatcatccaattccactcctccaacatctcgtccttccgccgccagatctaaaggaagaaatggacacggaggtggcggtggtggcggtggtggcggagacccagggacgccaatgtccactgacgagccactgccttcttccgatgacggtgaagaagacggaggcgacgatactactccgactttcgtttggggaactaacatcagtgtgcaagatgttaaat

SEQ ID NO: 148111 - DNA, 151 bp, Arabidopsis thaliana landsberg
taaccatgcaactgccaattttcttcttttcatgggtaaaccaaatcagacacattgaaaaaaacgatatcctggtttagaaacagaccagggacaatactcatcaaagagaccaaagaggttataaaacagtgtttggagatctttcaaa

SEQ ID NO: 148112 - DNA, 360 bp, Arabidopsis thaliana landsberg
aaaaccggattctgtacagggagaaaggtgataagctatgttgctaacgttgttttcatgtttttttgcaatatgtgtgagcaatagattatcatagcgtattgaacttgatgcagactttcgcacggcggatgaattggttcatatgattgcgcatttctactataaagcgaagaggccttcgtgtgtcgacaaggctaatgtaaccccgtactgttagtttgtaacgggcatagagtagtttcactcaaaaggtcagtctaggaaaatttacataaacttcactcatagattgttaacatttttgtatgttctatgcaaatataaacttgttcccaagtaatggattttactcgtcaa

SEQ ID NO: 148113 - DNA, 90 bp, Arabidopsis thaliana landsberg
ttttgattctaacatttaattatataaagtagaagctaagaaaccgtaagacatatctacatcactgatacagatcttcttgaggagtgt

SEQ ID NO: 148114 - DNA, 342 bp, Arabidopsis thaliana landsberg
agctcgccaagttccgagtcagaatccgagtcggaaccagaatcttgatcacaccagcatgactcatcatcaactgtatcaacttcatcttccaagaacccttgtactagatcagagagacaaggcgagtcgtcgtcttcgtagtcttcaattccgtcgccggtatgttcgctgccgctgctaaagctgcatccaacgagacgagccctaacctcttctgcaagtggatcagtgacacgttttgctctagagaaacccatatcagagaatgtatatattataaaaacacttaactcgaattttctcaaagaagtttgaataagagagaggaggtggagatgg

SEQ ID NO: 148115 - DNA, 548 bp, Arabidopsis thaliana landsberg
gtgtggtaatgttggggtggagtatataagaccgaagaatcggaacacatcagatgaaggatttgagttcatggatctagactacaacgaagagccaagtcaatcttcggttaatttgtagttttcgaaggtttattttagatgatgtgaacatcttttgcttacaagtggaagtgatgaatgatgattttagttcaggcgtttttggatgcaaaattctgtaaaacttagcaacatgtgtacgcattacagattaatcttacaaaatcgccatagttcgtgaaggaattagccgttttctcaactttttgactatgaaaatttaaagagcaaaatgataccacaagggattaatctcactagttcaacataaagattttacgaatttggtttttaagtaaacataatttcaaagaagatgcttcaccatgtaaggaccttccaattcataacccaactttctgtagtaatgtctggttcctacaccagaaatcacaccgattttgttagatcgatgttctcttctagcaatcctctctgcttcttcc

SEQ ID NO: 148116 - DNA, 345 bp, Arabidopsis thaliana landsberg
aaaaaactttttttaaactccccccggatattctttcatagaaaaaaaaaaatcttatgatgattttattgttggtgttacctgttttctcagcattgatccatctctgctcaatccttacaccaaattttgatggtataagaggattcagtgacaatgcttatattaaaaatggagtttatagtctctctgaactatctatgtccaagttcttgggagttcggaagcaccttacatcgttgacatttgttctaagttttcctatgacaattcttttcgtttgcacattcagagatcagtttgagatccactaaagttgatgtggtctgatactcacttcttatc

SEQ ID NO: 148117 - DNA, 411 bp, Arabidopsis thaliana landsberg
tttgagaaattatttgttctattattatattttgctaaattattaaacaagcacaatacacacatagcatccttcaaaacattacatagtagggctctaagacagtaagtaaccttgatcaagcttaatcaacattgaatttgacattgtgcagacggagaactactacaaggatgcggtttcgcgggttctgaatttcttgaagaagccatagatatggtcagtgacctcgtcaggcttctcttgatggaggaagtgacctacaccttccattaccaccacttcttgtagaaacggtacgtgcttcttcaaaccaccttcatgtatgtattcctttgttccggggatattgtatgttatgtctagatcacccactatgaatttcacagggactttgatttgtagaccggt

SEQ ID NO: 148118 - DNA, 701 bp, Arabidopsis thaliana landsberg
tcaagggatggctgatgaaactctagaatcagctaaagagtatctaaggaacttgattgattcaccggagaagaaggaaagctggtgaatcttcaaaccagattgataaaaggtctgatcttagtaaggagacgttatcgaaatgtgttaaagatcagcttgatatcttggtagctgtaagaacagggcttaagtatttcctctctggtaagatcagaatccctatgaacgaattggtagagatctttctcttcttgagatgtaggaatgtgaattgtaagagtctcttgcctgttgatgattgtgaatgcaagatctgttccaacaacaaaggcttttgttgctcttgtatgtgtcctgtttgtttgagatttgattcagctagcaatacttgtagttgggttggttgcgatgtgtgttcgcattggtgtcatgctgcttgcgggattcagaagaatttgatcaaaccgggacctagtttgaaaggtcacagagggactactgtaatgatgtttcattgcattggatgtgctcataagtcagagatttttggatccgtctaggatgtttttgtgtgttgctctaagaattggggacttgagactttgatcaaggtgcttgattgtgtttgaaaggttttcccaggaagtgatgatgcccaatgcaaagcattgcatcttaactcctatgaaatggttaag

SEQ ID NO: 148119 - DNA, 237 bp, Arabidopsis thaliana landsberg
agtaaataatcgggatcaattgtagaagagctcatcgagaaaagagagaacctaaactttaaattcaattctgtattgttctcaaactcgaacccgaaactttaaatccttccttatttgttttctggagttcttgtttagaactgttttggccttgtttcttttgaggagatgctttagttaaataggtttaattcgagctgatcgctgtgtggcataaaccctaattgcgtggaa

SEQ ID NO: 148120 - DNA, 1079 bp, Arabidopsis thaliana landsberg
agcaaagagcatcatcgttgctgaagaagaagaagaagaaaatggactcatctttgtcgcagaagttcactcttgcttatgcttctctcctcggaggtattgaatctgatcgcttccttctttgagttttcaaatgatttcgttgacttgatctagttattatacaattaggtattgagatagtgcaagagaggaaccattagataggttggttcccatgacttcacatctctaatatcattgtcactgtcttgagtactatttatccaggctttgtaatgtgtggttactagtctgattgtagtttagcatgtgttgttttgtcaataagtgtattagttgttaaattcatgatagaaaactagttctattgtcttcttctgtccataaatgcgagtgttagatttggatcgtggtgaatagcaatattatatctagtgatgagataatcattggagtttctactgtgatttcttgatcataatgtttcgataatggtgtgtatctaacatataacatgtaatgcgttgactcatggcaattattgtggcagttggtgggttgatgggttacctgaaacgcggaacaaaatatcacttgtcgcaggaggaggttcagctgcgttgttctattatgtatacacggagctcccaggaaatccagtcttagcatcctccattggcattggtaagaaatcatacttcttgttcattgatcttggcaaatcttaaaccagcttatgatgagtccaaagttcaagtatgttaaacaatatgcagtggggtcggcggcactgacagggatgatgggatcacgttacctaaggacgaggaaagtggtaccggctggacttgtgtcggtggtgtcctcgtcatgactggagcttacttgcacggcctcattcgctcaagttgaagtgtctctgctatcttccttggacctattttccaatattgttaaggttttttgggtgggcattcaaatttctgaaaattgttgtataaatgctttgtggtgttgttcttttacaagttcttatgccttgtgtacttttagagattaatgatgctcgagtcgtc

SEQ ID NO: 148121 - DNA, 142 bp, Arabidopsis thaliana landsberg
ttacgtttatttcatcaataattgtatcgaaagtagacaacactcaaaagcaaagagatcatcaacatttgtctaaaaagtaaaaacaattgaacatgaaaaaaaaaaaaaactctcgttattgtaactataatcaataatc

SEQ ID NO: 148122 - DNA, 468 bp, Arabidopsis thaliana landsberg
ggatcattcaagaaacacaaaaattcaaacttattcaaagaaaaaaatatagcaaaaactagaatgaagaagacaatggaggatccaagcaagatcatgagaaggtcaattcacactttcctccaaaactaccaccgtgtcaccaccgcagccgccgtggccctccctttctccgccggtctcctcctctctcaacctttcttctcttcttcctcttccacccttcacatgaggctgaacatgctctttcgcggagcgggtttctcttcttctcatgatttcttcaacatcttaagccttaaactttcacaaaccctatcttcctctttattcactcttcctttctccctcacattcctccttttatccaaagcttacgtcatcaaacttctatcaaacaatcactctgcagattcctcctctgttttctacctccgccttctcaaaacttacgtttgcaacttcttc

SEQ ID NO: 148123 - DNA, 288 bp, Arabidopsis thaliana landsberg
tttttaaaaacagagctcactcaaattacataaaaattgtagaagcagagattatcaagaacatgatctcataagctcttctaagtattcagcacctaaatcctcaagaaccacaagtgttgtattactttcttgcgtcataacaacactctgttttctacttcttgacgacaaagaagaagaagacgaagaagatgaataggaggaggaggaagaaggagaagatgtcaacgtcgaagaagaagaagatttcttctttcctctaggacggtttctcatggagtgttt

SEQ ID NO: 148124 - DNA, 439 bp, Arabidopsis thaliana landsberg
taaatttgttagctataataatcatacataaaaaaaactatgtttcataatctaatgtttagtgcaattcaattaatttggttagaattgagaaatggtgatgcatatctctagttatttagaaaatttatattcggagcgaaatcgagctagattgtgaacagtataactagacctcataactagaataaatagataatgttgaaatatactttgaaacgaattagatgtgaaatgaaatgttccattgaagactttttattataagctacaaacttcacgtgaataatcttcaacatgtcagtcagacacacatgagacaacacaaaagtaccaccaaattcgtaattactccatggaagatggaacaaattcttcctttcatacatacacacaacatagggtacatagccaaagttactcatcatttattcttttt

SEQ ID NO: 148125 - DNA, 230 bp, Arabidopsis thaliana landsberg
tgaatcgtggaaaggggaatctattatgtgttaagacaagaaacaaatcctctcttggcagttctgaaatctttcgtgacagcctttgtgaagttttggtcagagtaataatacattgtagagatccgttggttaaacttttgtagttttcattagtgagagttggtaagcttaatatggtttgaaatgtgctgtacaatttttgtgttgaatgtttaggttacatataa

SEQ ID NO: 148126 - DNA, 435 bp, Arabidopsis thaliana landsberg
ctcaacaaaaccatctctctcgcgtaatttccatttttctctcttttattttcttttcttaacacaataaataattattcgatttatttacaaaaattttgaaattaaaaaattgagcaggctagagaaggagactgaagtttatagtgaagagaatgcgagattcattcatggtcatggtgtggcgtaccggcatatttaaagacgaaccggtttcagtttcagtgttattaccaaacccatgtcacaaaaacaaaaggccggtttcttttctccgcacagaaccgggtgttgtcttgaatcttgattactttggttcggttttattttctacattgctttttgttttcttgttcatccctcaagttattccggtttaacaagactatattgcttactaagaaagaccgatcttcaattacttatttcttcaca

SEQ ID NO: 148127 - DNA, 375 bp, Arabidopsis thaliana landsberg
gttttcaaatacaacccaccagccccgttcacgcacagcgtctacttgttttcgaacccatcgagctatgaaaagtgtgacgtgaagaaaggcaaaatgattgcgtctccgaagcaaggtgctggaaaaggctttgagtttgttctaaaacagatgaagccttactacatttcgtgtggcgagcatgacggtgctcattgcagcaatggtaccatgaagttcaccgtcatgcccatgctaccccgttggtaatttggtggtattaaatccaatgctaaagtatcaaacattaggtttttgttttgtttttgtgtcgtcaataaatgagattacgattatttatgtgcgttataccatattcacattttgttggga

SEQ ID NO: 148128 - DNA, 320 bp, Arabidopsis thaliana landsberg
gtgaagcttcatcttcatttgttactggtgatcatgaaccacaaaacagtgattttgttgattttggcggtttatttgatgagcctgagactactgagggacctgtttttggacctccttccaaggctgaagcctcgggagttggttttatggcgttcagcagcgagtctgatcctgaagaaatcgatgattcggatttaccggtgtctgtagagaggtgtttgggtcatttcacaaaacatgagatactgtcagatgacaatgcttggaactgcgagaactgttcaaagaacctgaaactccaacggttgagagaaaac

SEQ ID NO: 148129 - DNA, 72 bp, Arabidopsis thaliana landsberg
atcaaatataaagttgacatgtttgattgccaaaacaaaaacaaattggagaaaactctcgagttatgagta

SEQ ID NO: 148130 - DNA, 744 bp, Arabidopsis thaliana landsberg
aacaaaagacaagagttttctcaggtttctatctctctcgtcaaacacaacgaaagacattgaaactgagagaaatggctcttaagacattgcaagctctgatctttcttggtctatttgccgcctcatgtctagctcaagctccggctccggcacctatcacgtttctccctccggtagagtctccttctccagttgttacaccaactgcagaaccaccggctcccgttgcttcaccccctattccagccaacgaacccactccggttccaacaactccaccaaccgtctcacccccgaccacgtcgccaaaaacataaacctgtcgcttctcctcctaaaccatatgctttggctccaggcccatcaggtccaacaccagctccggcccccgctcctagagcagacgggccggtagctgactcagcattgactaacaaagctttccttgttagcacagtcattgccggagccttgtacgccgttttggcttaaagagtgccttgcgtattactctatcattctctctctctcactctcctttgttttttcttatcatgatttgtttgagagatctctctgtttttccctaatacatttcgtcctctttgttgttgttttctttttgggatctttttgatatttgtataactttgattggaccatgggattaaacctgagggaagaagttctgattgtaattttcttcattatttttttaattaataaagtcttgtttaatat

SEQ ID NO: 148131 - DNA, 168 bp, Arabidopsis thaliana landsberg
agccggggccaacgagattcccatgacggagaagaagcttgtcaaggtttctattcttactttgaggaacttgaggaggaacatggagatcagccattgaaaccgagagagtggcggcgattcacggagattgatcacggcggagagagctcaaaagacgcaaagccg

SEQ ID NO: 148132 - DNA, 373 bp, Arabidopsis thaliana landsberg
catatgtatgtatatcaaccttttatataatcatatttcaactcaaaccacaatgataagtacaacaaatttatgcaaagttatgatactcatataatataaacattgtatatgcatttgttgagatatgatatatcatatatgtatatgtcatatttgatattcataaataaaaaaagtatagtaggataatcacaatcaatatactttgtgccctcattgaaagctaaatgttaagatcatcaagctttgatgatcttgattacaaccatgttttattattgttaagcagaagaccaaaatttttaatatcaagttttcaccaccgtcacaaagcgatcctttatggtaaacttctatttaactctaaaaa

SEQ ID NO: 148133 - DNA, 443 bp, Arabidopsis thaliana landsberg
gaattggtttgagaagtcgtttttggttcgggttgtttcgatggcttggtgtggatgagtgtattgtgaagggggggtggagtaaggtgtctaaggagactaagaagaggattgaagagaagatgaagatggtggaggctaaggaacttgagttgttgtcgcagaagatagatgttttgaaggaggtggcttctgtgattgctgaaactatctaagaagaaggacttggattgtttaggtttaatggagatgtaatgcctcttttgtaatttatcgtaggatatatgtttctcatctatgtttctggttcttattagtcttctttttttgtttcttgtgtgagaattagctaaggaacttaagaactttggactttgtaagccttttggtcgatgggtgtaatgaacttaagactttgtaagctatggctccgactggtaaag

SEQ ID NO: 148134 - DNA, 142 bp, Arabidopsis thaliana landsberg
aatccgctcttctctcatctgtgtacaatatttgaatatttcatagcatcagatcagtccagagctgctacactgtttttcttttctatctttttttggaaatttacttttatgttctatacttgaatgctatctctttgcc

SEQ ID NO: 148135 - DNA, 576 bp, Arabidopsis thaliana landsberg
aggaggatatgttgtgcagccagataagttaccgaattacgtagtccctgatctcaccggctttaaggtttttcatttcaccctctaaactcttatgttccttttgtctttgatacttctagtatgtaccttgcatcttaattgaaacttgagaactaaacattagtgagaaatcttcttacaagtcttgttgatagaatgtccttaggttcatcctgatgattatcttggtttgttcttgttgtaaggtttttgagttagtgacctgaaatgggaatgcttacttaattacattaacctttgttgtgtgatttagctgctctgctgatgtatatctatttgtattttacagctgaagccatatgtatctcagtgccctctacaagtcaacacaaacgagtcaactgaagcttccaagtgaaaaatagtcaatcaggagaaatatgtttttaagtcttcttcataaagctttaagttaggactctgttcttctattgtccgtaatccttttgtgctattcttaaaatgggagatttgatttgatattttcacgaaacgacatgcaaagtaattggt

SEQ ID NO: 148136 - DNA, 226 bp, Arabidopsis thaliana landsberg
tccaattactttgcatgtcgtttcgtgaaaatatcaaatcaaatctcccattttaagaatagcacaaaaggattacggacaatagaagaacagagtcctaacttaaagctttatgaagaagacttaaaaacatatttctcctgattgactatttttcacttggaagcttcagttgactcgtttgtgttgacttgtagagggcactgagatacatatggcatcagct

SEQ ID NO: 148137 - DNA, 453 bp, Arabidopsis thaliana landsberg
ttttacaagctcttgatgttgataaaaactaacaaatgtttacatgcattatataatttgagtagagaatacatatgcatctctcaactctttgagcgtctaatccaatacttgtgtgatttaagacttattattagaaactaattaattaattgagtggaagagggtggacgagcaaggaccggacatgattgacggtcttagccttgtcaggacagccatggccatcaccgtactgataaacgcactgagccacacgtccaagattagccgcagcttctaggaaaccttgatgtagcctacaactctttttctccatgtttaagtcatcccaagccacaccgataattccttgaatgtacgcgcgtgactctgcctccgaagctccagtttcatgcatgtgacattgtacggatttcatagtgtcgcctctcgctaattcctcctgttaaa

SEQ ID NO: 148138 - DNA, 318 bp, Arabidopsis thaliana landsberg
gtttgctttgcgtaatgttggttctgtgtgtgatgcggtgtcgttttgcgtcatgagtgtaatgctcgcatggttttatttgtgatgaaaagctttttttttttttgtgctgataaattgttattttttattactcatgattttctgccatgtgggtgattttggggatatatttgtgtcttggttttcatacgattttgtgttaatcaatccatttgttttttatattttcgtttatttttattaatacaaatcatattttccgttttcgtgcgagtgagaattgtgtttttgttaatatctcgtttatctttgctt

SEQ ID NO: 148139 - DNA, 274 bp, Arabidopsis thaliana landsberg
aatcaaaacacaaaagtgactgtgcacaaactcaatgatctctaactatcgacagtagtaaagtttcacagaaaatataaatgaaaacgcgttcttagattttttaaccaattcaactctacaatcttgagcttatccctcttttcaaggtagggatgtgcgatgttactaatatatagtaagagtatccttcagccaagttttctagataagtttcttcttgtggaaatacctcttcagatacagtatctgtgaacccgcaaccacaacgcaa

SEQ ID NO: 148140 - DNA, 245 bp, Arabidopsis thaliana landsberg
ctttgtggagtctctctctctgtctgtgtgtgaagtgagaggatctgtgtttggttctgcaatcataatttcgtgatatactaaaaaaaatgcattttcctcttctctcttataagcagagaccctactactctttgatcgaattttccttgctctcttctctttggtctctcatgtttttttctccctaaattatgggctttgctctctctctagccacactcacactctaaagcactcgtctt

SEQ ID NO: 148141 - DNA, 598 bp, Arabidopsis thaliana landsberg
aaaacattcttcctcatccaatgtttctctttttttaccaatacaaagcattaaaacagatctcatggtgtttaaacgcaacaatcccatgcaaatgcataaagagataaaccaatgcaaaagcagccaaaccctacaaaaaccccagaaaaaaatttgttcaacactcagagtcatgcatcagttccttacagataagagagggaatccctaatacagagagatatggggagaactctccaccaaatcatacaatcagtaacgtcttctcggacttcttgaacgttgcgacctcccatacctgtaaaaccccaatgatcaatggatgatgatttaaagaaaggtataactacttgacaagtcacaagtgatttcgattcattagcataaagacagtaaagtttggtaggtgcttagtacaatatactaccttgtcaactgttaaaacttctaagtctatatcttaattgatactgttagacactcttgacttcatatcggcacaagatcagacaagtcgtagcagaacagaaaagagattaggatacaaaccacgagttctttctcctgtaaggttcaccaccactaagaccactgc

SEQ ID NO: 148142 - DNA, 353 bp, Arabidopsis thaliana landsberg
aaccatctctttctctctttctcaaaatcttgtttatttttttaataaaacaaagaaattaaaaagatgatggttacattagtactaaagtacgtcctcgtgatagtcatgaccttgatattaagagtcctatacgactccatttgttgctacttcctcacaccaagacgaatcaagaagtttatggaacgtcaaggcatcacggggcctaaaccccgtctcctcaccggaaacatcattgatatctccaaaatgctctctcactccgcttctaacgactgctcttccatccaccacaacatcgtcccacgccttcttcctcattacgtctcttggtccaaacaatatggtat

SEQ ID NO: 148143 - DNA, 797 bp, Arabidopsis thaliana landsberg
  unsure (1)..(797): unsure at all n locations
tggagtgtactttttgtaggtgtggagaaatctggtaaaaattctgagggtgactcttggtgggaaacttggcaagaagtccttcatcaagatgagtggaggtctatgttataacattccctttaccagatatagcttcgttgccaacggttntcgcgctgctagattcttacagtcctctcattgtcaacttgatcaaatttcagtaatctagcaaggattgaaaggagtgcacaaaagcaagcaaaatcaggaactgaaaatgctggttggtacgagaaatggtaggtcaataacaacaccagttgctaatattaccctgcagtgtttgcttttgtttgatgtaaaggtgaagcttattcttctactggactaaaactatcattcactgaaaatcaggtgggagaagtacgatgctaaagggtggacagagaaaggagcacataagtatggtagacttaatgagcagtcatggtgggagaagtggggggagcattatgatggaagaggatctgttctcaaatggttttctattctaactactctctagtcctcaattttttccttactggtttatatataaggctccttgttagccagagttacttgaacattaatttgtgaaattcttgagatcaaaaagattgtgttaatgattttgattttgttgttggtgaacaatccacaggacagacaagtgggctgagacagagttggggaccaaatggggagacaagtgggaagagaaatttttcagtgggattggttcacgtcagggggagacatggcatgtatca

SEQ ID NO: 148144 - DNA, 543 bp, Arabidopsis thaliana landsberg
ctcgctgtctgaactgaaaaataagatcgcattaactcaaaactctcacaaagacaaagatcttctcctccttctcttctctttttcacttttctctcttcccctctctcgaagcttgaaaggtaacaacaatggagaaccctccggatcaaacagagtcaaaggagactcttcaacaacccattacaagaagaagaacaaagggtggtcttctcactatgcccttcatcattggtaacaaacgatctctctcacttttttagacaaaaacccaaatcttgttactaattttatctcatcttgtttgttactcggtgaagcaaacgaggggttcgagaaagtggcgagctatggattattacagaacatgattctttatctgatgagtgattacagattgggacttgttaaaggacaaactgtcttgttcatgtgggttgctgctactaatttcatgcctctcgttggagcttttctctcagattcatatttgggtcgctttctcaccattgtcattgcttctctctccagtctcctggtaat

SEQ ID NO: 148145 - DNA, 455 bp, Arabidopsis thaliana landsberg
gtcaatgaccttcagcatgtaaacttgtctgaggaagctgatgaaataacagggtacgatgatgagttgccaagagaacccgtcgtgttgaatgagcaagcaacatcttctgctaaagtagatgccatcaagttaactcctggaatggaagctgcgaaaaagtatatatcctctctaagtgcttctgcaaccacagcccagctggttagtcatggtctggttgtgataccattcctcagtgcatttgttggtctgagagttctcaatctctcaggaaatgctataggtagctaaattttcccttcttgctaatcttcttcacatactgattgtttttgtttcttctatttaactggccttattacatctttcagttagaataaccgctggtgctcttcctcgaggtttacatgcattgaatttgtcgaagaacagtatctcggtgattgagggcc

SEQ ID NO: 148146 - DNA, 362 bp, Arabidopsis thaliana landsberg
aaaagccatttcccttgtaggattatatatcaacccgagagctttttgacatcgggtagtatatcttgaacatccatgacctgcaattcaacttgagatcaaggcaagaaccagttcattgtcaatttttcttcacaggtctctttcagcttaagacctcgtctggttgagtgagaaaaactgcgaaaaccgatctttctctttgtatagacactttgtcttcattgatctctgcctgtgtgtatagtagattcctagggtatagctccattatattcattttatatatatataaacccaaactctgtcctcttaactatgaaacagcttgtatattgtgtagtaatagtaatggctcttga

SEQ ID NO: 148147 - DNA, 228 bp, Arabidopsis thaliana landsberg
tctagatcccccaaagcgagttcatcatcttcttcgcctggattcgatcaagactagcactttcatcagatttgattacaatctctcttatcttccaagttataatcataatatccgagtaatttgggatctgggtctttcctctacattcaatttcttaataaagctggcctctttcttccgagatggttcttgagcgatgatgagtgactctcagcgtttactttt

SEQ ID NO: 148148 - DNA, 194 bp, Arabidopsis thaliana landsberg
gagctgcaaagggctcagcttctgatcagaaacctggtcctgttccgttcttcgctgctggagtcagctcggtaatgaatctctcccttcaattttacgattcttggaggttctcatgttttatcattacgatttctgtgtgattctaggttttgcatcccaagaacccttttgccccaaccctgcatatcaat

SEQ ID NO: 148149 - DNA, 508 bp, Arabidopsis thaliana landsberg
gttttagtattatccatcttgccgaggacgggctagccagagagaacttagagcttgaagacggtggaagtactccgcaacggctagaagacaccgtgcttcttgacgggtcgtcaacaattggttcagcctatggatcgtttggtgcctcaaattatccgcctgtaagtttctaatgtattagctagttcaaaactaaataagagttatagggaaaatggagaaatagtaaaagcaaaacaaaatatggacaaagtagtgcacatgttattgactaagaccaattaaggacaaataatcgaattggaccatcattaatctcataaatataagtattaaagactaactagagaggaaaaaaacagataaaggactaattaagcattataatgattgtgcatgacccgaaattatgtggcttgtttgacgactaatcgccgattattcaacaatgttgatcgatcaaaaattcaaagcttgctagtaattcactactaagaacacgcaa

SEQ ID NO: 148150 - DNA, 553 bp, Arabidopsis thaliana landsberg
ttaaaatgttttgaatgttatgaataaagatggatgcccattataagacccatcatctaagcccatcatctagatgtttctaaggtttaccttttccttgtactcctatataaacaaccattttctcaatggaataacacactcatttcttctatctctttctctggttataacacgttatcagcatgctctaaaagatagatatagagattcttacatttttttaagaaccatgtttacttatcgacttatggttcatagtacttattttctattattgaaacaaaacaatatgagtcgatcgatgattatagtatagatcggtaaaagcatgttttcaatgattcaataaagaagagaatcatgcttatcatttgtttttataattactattgcatgattcaatgattctacaaagaaaatcgttaaagaagagaatcatgcttgttaattattaatttttgtgatttactattacaatattgaatatataaattaccaattttataattatataactaattttgtaactattcatagcccggtggtgggt

SEQ ID NO: 148151 - DNA, 709 bp, Arabidopsis thaliana landsberg
acatctgacgactagaaaagtaggtaggattatgaatctttctgggtttgtagtgagtttataggaaatcctttgtctagtgttccgaaatttgagtagatcttgaacaactatgcaaatcttgttgatcgatctgtttgggaattgaaaatctactaggttttgaatttctgaggttttgtgtcagcaattgaagcagtaggtggttgagtcatgtttggtctgtgatgtcctgtcacacgcatcacatgaaccttggctttggatttaacggccattgttagtattaggctaattattaacatggcttttgttcattgtagttaattttcacagagtaaagagattttgatacattggacccaaagtgcaattttcaaaaatgtttcgctggaagaattcttctcaaaccgaacaagagcataaagaggcagctctcagagaggcaaaggtcaaatatttcaaggccttgttgatgattttcatttcacttaattacctagttgattcgtagaagctataatgctttctgatttttatgattatagatgaaagagcttaagactctcataggtcagctttctggaaggaattcactgtattgttcagatgcatgtctgaagagatatctggaagctaggaattggaatgtaggcaaagccaagaagatgctcgaggagacgctcaaatggagatcgagtttaaaccc

SEQ ID NO: 148152 - DNA, 107 bp, Arabidopsis thaliana landsberg
agccaaaattacactgtaaatttggcatttcgagaagaagaagagggagtgatggaattgcaaggagaggaaaggcaaacgccgacgtattgcgtgacgggtgcaag

SEQ ID NO: 148153 - DNA, 203 bp, Arabidopsis thaliana landsberg
acttaatcatcgactttttgaccatttctccatctgggttttattatcttcagttctttgtgtcacaactccagtttctttttgtattttgttgtttttttcacaaattgagattgttgtttcctataaagtaaagttttattctatttatggaagtctcttgatttcgcttttataacctcaaaaagcatctttcttgatag

SEQ ID NO: 148154 - DNA, 453 bp, Arabidopsis thaliana landsberg
gtttctcctcgccctgtctctctctctctcttcaccgcaatttcagacaacaaaaaatatgtcacgaagagcatgcaaaagagtaagctttaacccgaacccagaagccacagacgaacccatattcccaaaacacgacggtttaagctcgtcacatcacagccggagaagggtggttctcgtcggaattctcagttttggtctaaggagctcgccggccgcgaggaaattgatccaacgtattggagcaagattcgccaaaacgctgcgttttatttccttcagaagaaatactactgatagaagaaaaacgtcatcgtttttgttgccttcgtcgtcgtcgtcttcttcttcgtcagctatttatatgaagaggtcaaagtctgtaaacgagacagagtctcatcgagcagaagctattgaagattgcattgagttcttgaactcttcttt

SEQ ID NO: 148155 - DNA, 364 bp, Arabidopsis thaliana landsberg
accttgagcttagatttatcaatggaagggccgtttttggaagacatggcgttaggatcgacattgacggctgatagagctgcgacgacttcggaagctgtctgaagacatcggaggaaaggggagacgaagacacggtgaatcgggaacccgatctgagatcggatcctttgaccggttcgaaacgctcgaatcataccgtcttgaaccaaaggtggatcccaaggtctctcggcggttgaaacccagagtggctcgaaattgtcgattcgatcaccgtgacgcatgacgaagatgttttggtagccatcgtcgacgttagatttgggagactccattgtttctttcttcttctttctctttc

SEQ ID NO: 148156 - DNA, 133 bp, Arabidopsis thaliana landsberg
gagaagagcggtgagactcagagaaagctgagattcaatttcttagaatcatgatgagcaataagagcaagctttagaacctttttggcgaggaagagcacggcatcaacagtaccctcagcataaattgatc

SEQ ID NO: 148157 - DNA, 257 bp, Arabidopsis thaliana landsberg
gaaaagtaaatatctattgtcactgatcgagaaaagagagacatgtaaacatccagacactaaatttgagtagatagaagcaaatggttatcaattacactacaaaaacgaccagcagcagtaataggctcagtagtacgtgttgtagtacgcttgaggagcaacagcagcagccggttgctgcaccggtgcagccgctggtgctgctgctgcaactggaggtgcataactctgcgttgggtatgtctgcaaaaaat

SEQ ID NO: 148158 - DNA, 467 bp, Arabidopsis thaliana landsberg
actataaaatcgattttctctcacaaatcttattctctttcgacttcagtggcggcgcattcagggattcaaactcaggtgagtgatcatcagatcttttcgctttattgatttcatatgtagtctctttcgattagtgtgaaagttttggaatcgacaaatcttcacgagttactactactagagtacatcgcgatttgcttattgaatcctttttggagaaactcaagttcgtcactaaaatcagttttggaattgagctggtgatattagaagatatatatagctttggattatcttaagagaaccatataagagtagatctgagattttgttcttgaactaaatatgtcatgattattgaaattgccagacaaaatggtggcgacaggcttattcgtggggctaaacaaaggacacgttgttaccaaacgcgagcaacctcctcgccctagcaacagaaaagg

SEQ ID NO: 148159 - DNA, 1152 bp, Arabidopsis thaliana landsberg
atggcgtcggtgaagttgccgtgggatttggaggaagagatactgtctcggcttccacctcgatctcttgttcggttcaggaccgtatgtaaacactggaacggtcttttcagcgacaagaggtttgtcaaaaagcacttggtccgtgcccgtccccaattcatcttccttaccgaatcgaagaagatgtactcgatagagatcgatctgggtggaacgatagaggtgcgtgaggtaccctacgattttcattgtcagcctatgaagaagaattttacaactatcatggcttgcgatgggttattgtttcgtgatttttggaaacaaggtgttgcggtttggaatccgtggttgagacaggttgggtggatcgagtatgaggataaaggtttccgtttttgcggtgtaggatacgatagttgtaaacccgataagtgttacaagatcttggggtattttaattgtacgcgtagactcagcgactctctccaggaaggttactaccaagctgcgatctacgagtgtgcatcgcaggcgttcaaatttattgatacccctaaccctttcaacctgtggcccaacaaggatcctttgtccgtgaacgggaatctttattggcttgctcataaccaccctgagactcttgagtatttcatcgaaacctttgatttctccatggagattttcaaacccttttgtctactgccgtgtcggaaggactttggtagcaatgaacttgtcctggcggtttttaaggaagatcggttttcattgttaaagcaatgcttcgaaacaacgaagattgagatttgggtaacaaagatgaagattgatagagaggaggaagtggtgtggataaagtttatgacattgccgacaaccaacttgcctaatctagatgatacttattgtcgcagtagttacttcatctttgacaagaccataatcatgtgttgtggcgattacaaaactggagctacttgcatctatatggtgaggggagatatgttcaagaagattcagatcaattctgggatttttcagttttcttactgtgtctatcttccaaatttgatctcggttccttttgaatcacatcaagtttaaaagcaatttctgctctccttgttacagagagtagctataatacct

SEQ ID NO: 148160 - DNA, 181 bp, Arabidopsis thaliana landsberg
cacagatagagagaagagacagagacagagagtgatggaaacagctgtatttattatgagacgaaacaagaacctctgggtttctacttaaactcttctctctttcctctctcactttaaaaatccacactttagagcacacaatacaaaaaataagggtttcatatctttacgttcttcc

SEQ ID NO: 148161 - DNA, 430 bp, Arabidopsis thaliana landsberg
gcttcgatgatgatgatcaaacctccaagaatccacgggaactactactcagtacaggccttactgtgttggtgaatccagtctgattaaaccaatttatgctagaggcgggttcaacagcgtcatcaggaaggacattttgcagtggatggtgcagaagagataaagccgccaaaattcatcaaaggcccttctgtttcttagattacaacatactcagaaggaaacacttgtctcaaccgtatcactttgtatgagtttttaataaccggtggattgataggaaaatctcctggacaactaaaaattgtgactagtattacttacttgactaacacgtctatctgttcttcttcttcttctaattacaaccaggaatgtcttctgagagattttgggttctataatcaataacaaaacaatcaggttt

SEQ ID NO: 148162 - DNA, 130 bp, Arabidopsis thaliana landsberg
tccgatcacaaagcacaaagggttcttggtgtttaaatttgaggagtacaattgcacagtggagtactacagatctccatttttggttcctcaaagcagaccaccgattggatcacctgggaaggtcaag

SEQ ID NO: 148163 - DNA, 904 bp, Arabidopsis thaliana landsberg
cgtttttcttcggcattgactctatcaatcacaactttctccgggatcgccgatttatcttcgtttcaaccatgactcatatccttttgattctctctttgcttcaatctctttagattctctgtttctcgtccgattgcagaatttagggttttgttttgcagaattagaggttaaagttttcaattttagggtttgtttgggagaagatgcaattgtagtttcgtttctagactgctctgtttagggttgtataaagattatatcttattgagtctatcttgcttatggatcttataaggattctgaatttgtgaaactagaacaaagtgtgttgttttctttaattcaagcttttgatttttgatgcgtaatcgtcacgtggaagtcagagagagcgtgaccgtgaaagagctgccgctcgtgctggtggaaagggtaagaatggtgacgatggtttgacgccggagcaacgccgtgaaaggtataaacgaatctgaaaaaacgaatctttagttgggattgttctgatctgtgtggttgttgtgtaatgattcgatctgtgtggttgttgtgtaatgatttgatctttgtgtaatggttgttgttgtgtaatgaatgattttagagatggaaaagcattgcaagagaaggcggctaagaaagctgctcaagctgcaggtgcgagttctggtggtgcagctggaggaaaaggagctgttgctaagaagtgatgatgatcatttggtttgtcttttgagcatattgtagactttatgtttgaaattgggttgtttagacctgaagctttgactcttgtctgaaatcccattataatgtctttgtgttgaatttgcaatttgatgcttatggtgaaatcttatttggtctttctttgatctgt

SEQ ID NO: 148164 - DNA, 694 bp, Arabidopsis thaliana landsberg
acagaaacagcgtcgttttgaaagctgagttttttttgtgaagcgagcgagcgtgagaaggtgtgacggggaagagaatggcgaaggaagcggtcaagtatgtatgggaaggagcaattcctctgcagattcatctccacaaatccgacgtcgcttctcaccctgctcctcctcctgctcttgtaaatcacctttcttctccaagctttttttctcatgtctggttttcaaatcggtggtgcaaatctgtggtctttggtgttggatcatgatcgatttcgggttttaggggtttcgtttccatttcgtattgaatcatacgatttttgaccatcaaattgattgaaacgaggaagaatttagacgaaatttgtgtaactgggtcgagataagatcatacttctgaatttgctatttgtttggcacgcattatcaggtgttagcaccaagaataggatatttgcctctgttgattcctcttataaagccttatttcaaggattcacttcctcctggtgaagattcaatttggtttgattacaaaggatttcctctaaaatggtacgccattgtttcatctcttagtataatgggagaaagtgtttgttttttgtgatatgaaatgtgagagtgtgaatcttctttggttgcaggtatataccaacaggtgttcttttcgatctcctttgtgcgg

SEQ ID NO: 148165 - DNA, 278 bp, Arabidopsis thaliana landsberg
ttcacattgatcctgtgttttataaagtcccatatcaaaccgaattttgattcagagatcagctcaaaaatgaagtttgatgaatcgaaaacgctcttaccggtgagaatacctgtaaatggcaaccgcaaaaccgctggttacaagctttgggttctaatcgctgttctactcttggcctttggttctatgttaaccggttccgtctctctcaaaggaatcggtttgttccattctgctgacggcgttaacgcattctctttggcgatatctgcgtc

SEQ ID NO: 148166 - DNA, 1253 bp, Arabidopsis thaliana landsberg
tgaaaattagggttttttgggggattctcctgtggataaaggttagtcatttccttaattggttaattgaattgaagtacccagtaatccattggacttagtcatggatttaggtgtgctcagaagaattttcgttttcctgcttgcgtatttgacgtttatactctttgattcgattcgttatatatgtttattctgtgattcttgtgcattcgaaggtatttcactttttttgttgatgcttctaaatccaattcacatccatgtaaccctagttttgttataattagtgattgaaaatagtgtatttagtttcaagttggtattttaatccatcccgggatgtcttgtaaatgttatccctgagttctctaacatctatcataacttcaaatctctgctttgttgtagccatggctgaacgagaagacgcagcagaggtttctctttcagtgagaaacgaagaagatctttctcctgaatgtgtagcttgggctgattcttgcatcatcagttttccagatgattcagacaacaataattggggaactttaagagatgctttgacagaaatcatcgatatccatcccgagatgtttgttttttcatcaacaacgggaacaagaggtgtcatgtctccagacgaggttatgactgaatccgagactattgatctacggacatttgaaccagaagctgtttcagcgaacagtagaactaattcatccaatgaagaagttagcgagattatctctatgctaacttttgaatcagacccgtcaaagaattctttagaagattattattttccagagtctatagcagagaatggaaaccgtgaaccagcggacggttctaatacagatcttggagatgtaaaaagcatagaagaagatgggtcagtgagcaatggagaggctgaagtagaagaaccagcgtcagtatcgtctcgagtattcaaggatgatttcatgagcacatacgttgaagacaatgctgacgactgtaatgttacagaggatcctgtcaaagtaacttcacaagagattttcaaagtgtgggatctagaggttgtgggggacaatgatgaggaagatgggttggtgctgcagctgaagaaggccctcgatgagtcttccactgtccagccccttccacagccactgaatgataatcaagttgtatcagagaagagcaatatcgatgatctgatatctggaatatcggatctgtctcttgcagaaacttttaag

SEQ ID NO: 148167 - DNA, 273 bp, Arabidopsis thaliana landsberg
tgttatacctaatttactttcacctaattcaatccctaaagatcacagcatctgcaatctccataagcggttgcaatgactccggcgtgaattttctggcgaagaaatagtctaaactcgaattagatctccgcagagagtgaatcagctgcggcgagatctcagaggcatcgtacgtgtgaggatgaccaccaacactaccggtccaattaacacgtgtgagtgtaaagtgactacatccttgaggatcctcaagagacaacaaagtcggaa

SEQ ID NO: 148168 - DNA, 704 bp, Arabidopsis thaliana landsberg
acgcaactatcacgagcctctctgtcgttatatacgactttcagtttttcttctgatttgggaaagaatcaaacttttgaatgtgaagttgcttctttcgtctcaagatctctctttatctctctatctgtttgattggtaagcttttgattcgagtgttgtaatgattgatgaaatgattgtctatttacggcattaagttgttcacgtagtctctcttcgattctcttgtgttaaaattagataaagattatgactttctggattatttggaagatcagtgttggtgaattgagtttcctttaatagtaatgtgaagtagctgtgtttgctttgtttgtgagtgatttgatataaaagttgattacttttgaatttgtatgtagagggtttttgttggatggcactttgtggtgtttgttcgactccaaatctgccgaatttacaagtgtttcgttctgttaggaactcgagcattggttataaacgaaaccatagtctatggcagctcagaagttcatcatttcgtgctaaatctgtgatatttcattgttcatcgtccttaagacagtcaccatctaatgtggaggagatagatgataatccttcggtatcattagaggatgaatcagcacatgtgatgcagttcaagtggtctgattttaggattcttgatcgtgttagcattggtcatggcggcaggg

SEQ ID NO: 148169 - DNA, 247 bp, Arabidopsis thaliana landsberg
cgccatcttgatcttacgtgcgccgttggcgcattctcttataccaccattaacgtgcgtcaacaccggaaccgttgaatcagacgttactggtatcaggttcgatcgttgcctcgataccgattctctcgccgagatctctctttccaccgtcatgtcgaaagctcgtgtttataccgatgttaacgtgatccgacctaaggattattgggattacgaatctctcaatgttcagtgggggtaagat

SEQ ID NO: 148170 - DNA, 397 bp, Arabidopsis thaliana landsberg
gtcttttgggtctttcttgttcccataggagagggttttttggacgtgtttgtattgttttggacagctctctactaaatacttcaagacagaggaaacaatttttcttttcttttttttcttctcccttttatgaatgagaacaaaatggttccaacctttaatttctgacacaaacaaagctttaattctttactaagacatgttctaatatttggagaattattagaaagtttagttattttcttttaaacgtaattcaagccgtgtatttataaactactagagtttggagcaagaaaaattaaaactaatgaagtatgttggaactaatagatatattttactttccagttccacttcttattctaaaatgttccccaatgtcaaacaaata

SEQ ID NO: 148171 - DNA, 249 bp, Arabidopsis thaliana landsberg
cactcccctcatctcgaaggtcctgggtcggtcgacagtttagaaatttaagagtgagttggtcacatcaatggctttgtctaccgactaaaccccatagtattacaactcttgtttagtttctcttttaagtccatcgataaatggagcacggaatttttgggtccaaggtagagactttaaggtattagtgtagtaacatttggaattttcttaacttgcaatgtggcctcacaaatagagccggtc

SEQ ID NO: 148172 - DNA, 73 bp, Arabidopsis thaliana landsberg
ctctgacgtcaccatccgacgtgtcagctttaaaagctttcaaagccaccgtgaaacccaacgcaatcccacc

SEQ ID NO: 148173 - DNA, 283 bp, Arabidopsis thaliana landsberg
caaactattcatggtacgttcactgaaacctttggtgttttgtagcaatgtttgtgctgatattgtggtttgaatgtctttggataagcataaattcattgtagctccgtcatgtgtagataaatggattaaggcttttgtggtagtaccggaattttatctgacattattatgcctctctagtcaaatagttggcttaaatgcctaaatatggatattcctaggaggaactgctacaggaattaaataccttaattatgtctagaggtaagtagcattgtca

SEQ ID NO: 148174 - DNA, 602 bp, Arabidopsis thaliana landsberg
tacctccaccggcacctcctcctgcgccaccaccaatacctcctccaagtcctccaccagaacctctccggcaccaccaccaatacccccaccgtggcctcctcccagtcctccaccagcacctcctccagcaccaccaccaatacctccaccatgacctcctccaagtcctccacctcctccggcaccaccaccggcaccaccaccaatacctgctccaagtcctccaccagaacctgctccggcaccaccaccaatacccccaccgtggccttctcctagtcctccaccagcacctcctccagcaccaccaccaatacctgcaccatgacctcctccgagtcctccaccagcaccttctcctaaaccaccaccggcacctcctcctgcaccaccaccaataccttctcctacaccggcgccttctcctaaaccaccaccggcacctcctcctgcaccaccaccaaaacctcccccggcaccaatttctcccccaaaaccttttccaccaccaaagccaccggcaagttcaccaccaccaccaactgctaacgtctccttctcaaatcttctacactccacaaccccaatcaccaccacta

SEQ ID NO: 148175 - DNA, 720 bp, Arabidopsis thaliana landsberg
gcagcaacagtgggctaatcaaacgcctggtcagcagcaacaattggctaatcagacgcctggccagcagcaacagtgggctaatcaaacgcctggccagcagcaacaatgggctaatcagaataatggtcaccagcaaccgtgggctaatcagaacactggtcatcagcaatcatgggctaatcagactcctagccagcagcaaccatgggctaatcagacaaccggccagcaacaagggtggggaaatcagacaaccggccagcaacagcagtgggctaaccagacagctggccagcagtcagggtggacagcgcagcaacagtggtctaatcagacagctagccatcagcagtcacagtggttaaatcccgtgccaggagaggtggctaatcagacaccgtggtcaaactctgtggacagtcatcttcctcaacaacaggagccagggccttcccatgagtgccaagagacacaagaaaaaaaggtagtggagttgaggaactagtttgacaaactcgctatttcttctgcaccaccattctcctcatagttaatttggcttttgctttgtggttcctattttttgcaaactctagtagttatttctttaggatcaacatcataatctactacgttcgttgcccttgcttcttcacttgtatgtatggttcttttgaagccaatggcttctaaagagtaatggaattcaaaatcagt

SEQ ID NO: 148176 - DNA, 263 bp, Arabidopsis thaliana landsberg
atggagaatggtgtgttgactgttactgtgcctaaggctgagacatagaaggctgatgttaagtctattcagatctctggttgagtaatgggttcgagttttatcatcggagttgcttgtgtttttgtcatggttatggttcatgttttacttgagtgtgtgagtactctatctaaattataataatatccgattgagctatgaattatgatgtatcggatacatttgatcctaatgaagtatggaataaataataattatta

SEQ ID NO: 148177 - DNA, 408 bp, Arabidopsis thaliana landsberg
aattataacccgttcattacattacgttaaccaacagacccaagacaattcatacaacaaaaactattctcttctttggtttttgtttgagagaaaaaaaatcaaacccccagtgaatacccaaacctggtaacccacaaaccaagaatatgtaagaaaaccaacgaatatcaaaagatgatctttaattccaatcaaagaaaaatcagaagaatatttgttttgttttgtgttctctcttcaaggtctatgaagatgctctatcactcgccttttctccttcggtagtcgccgaagacatgtagctcacggccagagacgtgctctcatcggtacaatgcgtctgaggaggaggaggaccaaagcagccggagcttgaaaatgttgcttgcaattgtggcaagttat

SEQ ID NO: 148178 - DNA, 235 bp, Arabidopsis thaliana landsberg
ggtgaaggtcgggttggtgtatatggagactcaaattgtttggatagtagccacatggtcaccaactgctactggctcctgaagaaaatgctagattttagcagttcaaatatcaaagaccctgtacttttctcaaaatttgctaagagatattcaccagtaatcatagacgagaagcaactgccatcccgaagaactgatgtaaatttttcaacatactcttctgtgatcggaa

SEQ ID NO: 148179 - DNA, 391 bp, Arabidopsis thaliana landsberg
attaacttattaagtaaagagtataacatttgttacttctttttttttccccgggaaacaatcaatatttacaaatatgtccctatctctacgttattttttcaccgtggaaatttcgaaaagaaaaacaaaacctattgggcttttaattgctttttcctcttccgaccaactcttttatcggcccacgagcccatttgaactataacttcatcttccactctccttgcttctctctcccatactaaacgctgcgttttacggtcactgaatttctccaacacccaatccctaagcccaatatcgctcacctcacagaatctctcagcccaatcagacggttcaacgggtcgggtccctaaaccaggtgcccgatctttcgacccgacat

SEQ ID NO: 148180 - DNA, 363 bp, Arabidopsis thaliana landsberg
aagcccgagtccattgacatgcatggagtcaactggaaaggcgttgactttttttttttcaacatcttacatttggtggatgaacacattcgctatgaaagtcctgtaagtctactactacttcaatattattacctctatggtgtgttatgtattttacaaattttgtgaattgagattgtggaaattgacgatcaaatcagacgaggatcgttcgataaaggagacaccgagtatgaggagatcgaacggccagtagcgtataggagagtgatgaggacttggggagattgggtggaacgaaatattgatcctctacgtaccactgtcttctttgctagcatgtctcctcttcacatcaag

SEQ ID NO: 148181 - DNA, 278 bp, Arabidopsis thaliana landsberg
caccataacaattacttccaacggagaatggcctcaattgtcggaattcgaacaagattcctgagtttcgggaagctttcacaaatctcttcttcactgtcgagaatacacaatcctcgtaatcatcagaatcctcttattctccctcttccttgtttctctgccgctcctagtcgtcatcgtcctctgctttggcttcgctcatctccgcctgtgtcctcgatgaccactcaggctgaatctgggtcttcccagcgatccgattcttccaaaacggt

SEQ ID NO: 148182 - DNA, 604 bp, Arabidopsis thaliana landsberg
ggcggatcgaagtcggatcagaggctttcttagagaagaacatgtgacgtatgcttccattcttctctacatcactctctctagcggtcaaatcttcttcaataaggttttaagtcaaatctcacattcatatgttattggatctatgttttctatttgcagtctttttgctcaagatttgattttattagatctggtggacattagtagattttaaagcttttaactttgacaatcttggtaaagttctgttacaatgcgatttggttttggacaagaaatataataataataaaattcttgttaatacaacagtaggttcaaatgtatggttcaatggtgagttatgtacttccattacacaaatgattattcgcttaaacaacttttttactgttcaaacttttgtaaattttggttcattccatttctctttagcttctttcagtttcttttttccagcactaatttttatttctgactcaatctgatgcagtgggtattgtcatctaaggaaataaacttcccttatccacttggattgacattacttcacatgactttttcctctgttttgtgttttctcctcacgaaggtttttaag

SEQ ID NO: 148183 - DNA, 225 bp, Arabidopsis thaliana landsberg
caactcggttccatactcggtggcgactcaaaatgggtcaagaatcgtttatctatagcttcgtcgccagaggaactatgatcctcgccgagtataccgaattcacaggcaatttcccgtctattgctgctcagtgtctccagaagcttccttcctccagcaacagcaagttcacttacaactgcgatcaccataccttcaatttccttgtcgaagatggctacg

SEQ ID NO: 148184 - DNA, 714 bp, Arabidopsis thaliana landsberg
atttaggaaacgagagaaaatgagtttcttcgccgttgcttgctccgcgccaagatcttatatgcttctcaccggcttgaattcgagcttctccgatatgcatcgcagcccactatttgttttcccggtgactatatcttcccggagcgtgaaatgcctcaccgctgtttcgtctgattccgtaccagaccctgaatccaaaaatcaaactcggtcccgtcgcaaaaataaggaagcagttacgccaattgctgaaaccgagaacaatgaaaagtttccgacaaaggtcccgcgtaaatcgaagcgtgggcggcggagtgaagcagacgctgtggaagattacgtgagaagctccctcgagcgtactttctccaccataaaggagcagaatccggaggtttttgagaacaaggagaaggcgaatttcatcaaagacagaggcgttgatgaagaagaggaagaagaagaagagatggtggtggaagaggaagatccagattggccagtagatacagacgttggatggggaatcaaagcttcggagtatttcgatacacatccaatcaaaaacgtggttggagatgatgggagtgagattgattgggaaggtgagattgatgatagttgggtcaaggagatcaattgtttggaatgggaaagctttgcttttcatcctagtccactcgttgtccttgtattcgagcgatacaaaag

SEQ ID NO: 148185 - DNA, 127 bp, Arabidopsis thaliana landsberg
cctctaagagagaagatagaacgtgaggaggacatgaaagagcgagagagcagcgaagaaactcttcttgatgccatggctaactttttttgttcttcttctctttctcacggtgatggtctctttt

SEQ ID NO: 148186 - DNA, 303 bp, Arabidopsis thaliana landsberg
ttcgtttaccaacgtccaaacgacttcaaacatactcgagatattattcctcaatgattttattacagataagagcacaaaactacaaatctttatatcattacacagcgatacgagaaacattttaatttcatgaattagttggtatagttacttataactccgctaggctccagtgccttagcttccggcgccggctctatgtccttagacggcggtaccggtgttccggtgagctccaacggcaaatcattagccaaccctttaaggtaaaaagtgtagaacagttttgtcggatataca

SEQ ID NO: 148187 - DNA, 686 bp, Arabidopsis thaliana landsberg
ggttctttctgatatcccagctcctcataggtttgacgttttaagagcccttgtcacaaattcccggtctccttcaatggttagtatatttgtatcccactgagctttatgaatagtaaatgccatcatggtcacctttggcgttgaccattcataaactgcatagtttaatgtcttcagtagtcatactgagataatatttttaaacatttggttccaaaagagaaaggtatcccatttcaactaatatcttttgctaaatcaaccagacagcaatccttctgggtctagttaaagacagcatgagcaaaagcagtttgcaagatacagattgtgcggctgttgatacgcatgttattgagctagtggagttggtcttaaggcctccacagggaggtcctccactccttccggaccagagtgatgcggtgatcttttcttttcctatatcaattctttaaaagtatgttttgtttctcttttcatgtgcatactataagccctttaggcaatgcaatgatatgggttaaggtaaatgcttaaaaggacaaacattacatacataccgagaaatagagaaaatgcccctttctgtgcaaatgagagtagcttgcttttctcgctaattaaggaattttatgatgttgcattgttttctaacttgtcgtaaggaaaactgcgataac

SEQ ID NO: 148188 - DNA, 389 bp, Arabidopsis thaliana landsberg
acgcatgaaatgccttactcgatccaattggataacttttcatgatacaatcaaatccagagcttgagagcaacaatgtggcggattaagcatagccagatcagatttagagagactaactcgtgggatcatcaaatattcgaaatttaagagaaagattgaggctttgatcaaacccagatcattgactttatagataaatctcgacaaccattaaaaaggaaatttgagcacaacccatgtgaaaagtttcagaattgagacagagaatgtaacggaaaactaaaaaactcacgggatttttgttcagtctccggtgaattctacggaactagaggcagagttttgcttcgattccgttgaccgagagtctgagattatttttgttg

SEQ ID NO: 148189 - DNA, 363 bp, Arabidopsis thaliana landsberg; identical to SEQ ID NO: 8679

SEQ ID NO: 148190 - DNA, 387 bp, Arabidopsis thaliana landsberg
tttttttctcttgagaatctcactgaaaggcaacggagctgcaaatgaatcccttgatcgcttatgactatgatgatcctcttcaaagcttttcctcttcccaagagatggctctggcttactttcctctctgctgcttttaggagctgattttctttcgtcttccatttctcttcttctcgcccatggagccccgaaacctctttcctgattaccactatggttttcctctaacctacccttaattctatctcggagtctaccctgagaaggtaactcgcttctgtcccttcccctctcacttctcctgtcaaagtggtgaccctcttcgccattgcttctctcacgaagcttaattctaccctgaagacgactactgctaatgga

SEQ ID NO: 148191 - DNA, 351 bp, Arabidopsis thaliana landsberg
taaaaacacaacaacaacattgaagaaatggccatcttctgtttccttgtagaccagagaaagaaagtccgggggaggaagccagcggccgggttgtgctcaagatgcggaggaggagcagttgttgccgacatgagaacctccacaagattctgtggggtccctttttaccgcaaagcttggaaagctatcgtctgtcatatctgcggtgctgtcctcaaatcataccactgagtctgatgaaccaacaacgttttttgttttaattcattcgtttttttttttccaacaagctacttgccattgtatgtcgcttgattgcctactttagactctgaagtcttagctaat

SEQ ID NO: 148192 - DNA, 469 bp, Arabidopsis thaliana landsberg
gtataactgaaaccctattctcggaaaatccctagaaatgtcggataatcgtgcactccgacgagctcatgttctcgccaatcacatactccaatcaaatcctccatcttcgaacccgtccctgtcgcgcgagttatgtttgcagtactctccaccggagctcaacgagagctatggattcgatgtcaaggagatgagaaaattacttgacggacacaacgtggtggatcgggactggatttatggactcatgatgcagagcaatctgtttaatcggaaggagagaggaggtaagattttcgtgtcgccggattacaatcagacgatggagcagcagcgtgagatcacaatgaaacggatctggtacttgcttgagaatggggttttcaaaggatggttgacggagacaggtcctgaggccgagctcaggaaattagctctgcttgaggtttgcgggatttatgatcac

SEQ ID NO: 148193 - DNA, 374 bp, Arabidopsis thaliana landsberg
aataaaaatgctcgttagtccctattcggtcgcacaatatttactcgagaaacacttaataaatttaacaaaattttaaaacgttgcacaatcgtcgcaatttagtcacaaaacagttacacaaacgttggaacgtgcgactgtgttctgctgtcgtcgcaaaaaagttgcacaaagcgactgttttgtgacattttggaataggtcacaagacaaacttttgaaatccacatagtttgatccattctatagataaacattactgaaaaacaaccattttagtacataaagaactttacgtatacaaatgattggtttcaaacttatttgagaacttgtttgaaaagatcaatcatgaaaatgaattcacatga

SEQ ID NO: 148194 - DNA, 239 bp, Arabidopsis thaliana landsberg
tccaccggcaaaatcactgagaacaaaaaaaaagctcgttgtgttgttattcctctcatttgtttcttcttcttcctcagctcctttgattttgaatcttgatctgtgaggaaggctctttgaaatatcttcacaagacgtgaatttgaggcgaacccttttggattctcgtgttcaattgtttgaagcaacaatctcccagaggagtaaggcgggaatctcaaaattcggattgggtg

SEQ ID NO: 148195 - DNA, 119 bp, Arabidopsis thaliana landsberg
gaaatttatgaaatggatcacaaaaagaaaagaaaagccaaactcaagataaattacaacaagcccactaattttctacacaaactattgacagtttccttttccccccttgtttttct

SEQ ID NO: 148196 - DNA, 121 bp, Arabidopsis thaliana landsberg
gattttgcagaaagagtcattgttctcttgagtgggaaaccttgaaaccattcctatgggaaatagcagcgaggaaccaaagcctcctaccaaatcagataaaccatcttcacctccggtg

SEQ ID NO: 148197 - DNA, 251 bp, Arabidopsis thaliana landsberg
aagtggtaccacataactttctttgtctatagaagaatgtggataatgtctttaatttacaagaatgccgagtacaaaacagaaaaacatttatgagtatacaaacaaatacaaaggcatatacaacaatcacatattgtttaaattactctaaatctccttccctgcctttttaactaccaagagaagaacaaaattcatggaaccctgatcagtgtgagacgcttgaagaagaagaagaagaaaccttt

SEQ ID NO: 148198 - DNA, 144 bp, Arabidopsis thaliana landsberg
caagagaacatagtttcttcttgcttttgagaaaaaataattatatatttttatataggaaagggttaatttattaataaaaaaaataaaaagaagccgaaaagagataatgcagggtggtaggcttttgacggtgttggtgtg

SEQ ID NO: 148199 - DNA, 254 bp, Arabidopsis thaliana landsberg
cacacacatacattcaacgtatagctaaatctttatcattgctttcttatattaaggttttggcttttgtaagaaggtttcttacatatgagattcatatagtgtttgattcttaaggaactgttctgttgagtaataataaagttgtgtattgaaatagagttgcatttgttaattttgtatagtgatgaatccctgtaatttgtgaaactcatttttatcatacatcatcaaactaggggtttataattaca

SEQ ID NO: 148200 - DNA, 885 bp, Arabidopsis thaliana landsberg
cccatttcttcctcaaatctctcttttcacgccaaatgaaagtttaaaacctttgaattgtttattgaaagtttacatttttctgttgaatccaactatgtttagattgagaagtctcttgtcgctgaaaagttcttcgattgtagaattgtcatcacaaaacgtcacagaagcaattcgtttcgctccatttcattcgacaagtgttctgtctgaaaaatcgaggagtagatttggttctgtaagatcattctctataaagatttgcttccttattgaatctatgtacactgtaattagacgtattgatgctcttagattaatcttggtttcaggctagagattccgaaggcgaacgatcttcaaaggtaaattttttatgatcctatggttaatgcattgatcgtattggaatcaggaatatgaattgttacatgggtttgtacaaaattagataggattgattgttggtagaaatgctatccgcattgatgagttcatgttaaaacctgtgtttgtattgtcatgaatttgatttttttttttgtgtgtgtgtggtcctttgttgatgtatatattgaaaaattgtattcataagagagttagttctcctctgaagctgaaaatgttgattccagaactcctccataagatttacatgtaccgtaaaggagaagggtcgtaccagtgctaagaagactgtggataaactccttttccacaggggaattaatgatccgcttcaggtgaattcttcatgccattgttgtcacatagaattctggttttgttaggatgtgtttgctcaagttttcatatgtactgtatacgtagaatgagtggcatttcgggccaagtccgcttatccgggataggcatatgaag

SEQ ID NO: 148201 - DNA, 277 bp, Arabidopsis thaliana landsberg
catacatattcctcctttcttttcttcgcccaaagacaaaaaattctcaaacttggtgttacaccattataggctacagcagaaaacaacattcaacccaaaaccaaaaacagaaaaataaatctgaacttttctttcacatcttcgaaaactactttaaaatcttgttctaattatcacgtctcggttgccttttgcgtggtgccgcggtttcttccttcttctccgcctcatccccactctttgaactctccgctacttctggtttcttcttttc

SEQ ID NO: 148202 - DNA, 400 bp, Arabidopsis thaliana landsberg
  unsure (1)..(400): unsure at all n locations
agagctcgaagaaggagaatatggatttgagaactgataatattatggcttcgtttcgaggtggaatcggggtttctaatggctgagtcatctcggtgcttctgtgtgttnttcgtcacgagcaaatataaaaaagtttgtaactttcttgtttttttaggtgtgtgtgttcagagaaaaggtcgaatcttttttcggtgtttgtaaaagggaaagttgtaatcttaaagtctgtttttctttcttgtgttttggtatttagctcttaaaagccgaggagtaatataaaggataggttttgtctttgtctgcccttttgagattgcatgaagaaaaaaagcctctagtgtgttttgaaggaaacagaattcgatatttatgcggtaatgtgatttgtgaa

SEQ ID NO: 148203 - DNA, 174 bp, Arabidopsis thaliana landsberg
ggtcccgttgcaatctacggcttggtgagaaactacgcgatgaatcttgtaccgatttgatatccattgtctgagatgtgttgtgttgctgcttcttagggtggtggaacagctgcaagattgatgcttgagttgtggcctacaatgcatctggaaggttgggaaattgatgaa

SEQ ID NO: 148204 - DNA, 389 bp, Arabidopsis thaliana landsberg
agccctggcacattttagtagataatccgtggcccaacggatggccacacgggagttctggagttcggatcccatcttcttaccgtactccaaagagctccaggagagcatagtggtggtgaatgccatcgggaaattgaacttcacattgtccccagcatcatagtagcctccggtcaagtccacctgcaactcataccgtgttattcagatggatttactatgcttttactacttgactatgggtatacagttttagggtcttacgtgagcagatgagccatcagagaggccagagctagacctccatgagagttgttggtcactagggaggcgaccagaccgctgaccttggaaaaagagtaatgactttgagagtgcttctctgt

SEQ ID NO: 148205 - DNA, 433 bp, Arabidopsis thaliana landsberg
ttttccttctctctgcgctttcactggagaatacctatgcaagtcccaattacagagaagcactctcaaagtcattactctttttccaaggtcagcggtctggtcgcctccctagtgaccaacaactctcatggaggtctagctctggcctctctgatggctcatctgctcacgtaagaccctaaaactgtatacccatagtcaagtagtaaaagcatagtaaatccatctgaataacacggtatgagttgcaggtggacttgaccggaggctactatgatgctggggacaatgtgaagttcaatttcccgatggcattcaccaccactatgctctcctggagctctttggagtacggtaagaagatgggatccgaactccagaactcccgtgtggccatccgttgggccacggattatctactaaaatgtgc

SEQ ID NO: 148206 - DNA, 280 bp, Arabidopsis thaliana landsberg
aagcaggtaagtaacaaaaagatcccaaacgaaaatattctccaagtattttgatcacatttcatctcatgtacacatacacactagtttctccccatttttatttttaaaggctttaattaatatcctgatttggaggagaagaacctgctgattcctctagaggctttctccggggtcgcgttggtagatgaacctgaccttgagagctcgtggcacccactcgtgatggcgatgtcgtcgtatcgctagtctctgaatcagaggggcattttggaga

SEQ ID NO: 148207 - DNA, 179 bp, Arabidopsis thaliana landsberg
gtttaagtactgcagattcaaatcaatccgactaatggaaaatccagaaagccaatcaacaaacttaaggacatccattcccaacataatccacagaggctggagctaatctcattgctcttccttttacctcatcaaaacggttagtgttcataggacttgactgcttgttcatacct

SEQ ID NO: 148208 - DNA, 203 bp, Arabidopsis thaliana landsberg
ggaaattgtataaaatctaaagtaaatgataatttgttattaaattagattgaagtttccaaattatctaataacatattaccaaaataaataagtttacatatatacaattcgaattaaaataacctaatatgttatggaaacgtttttaaatgatttccgaaaatattgggtagttattaatttattgatttaattcgttt

SEQ ID NO: 148209 - DNA, 223 bp, Arabidopsis thaliana landsberg
ctctccaaattaataaactacaactaagagtactatttaaaaaacgcgtaaaatgacacaaaataactcaattttttatatcattatcgcattatacgtatagaatttaaataataacatatacatttccatataggataaataacctcatcaaaaaaaaagaagaattttattattagtttagacttttttgtcaatattaatttattagcttcttaagttt

SEQ ID NO: 148210 - DNA, 331 bp, Arabidopsis thaliana landsberg
catggattcaagaaaggtcagttaagagagagagatggaaacccgcgcttacaagtatatcttgccctatccaagcataagagtattgacgtttaaccgcccaaaatacagcaaatgctatgcaaaagggacaaatagccagagtcaagtatgagacagcacccaggaaaggaactttgacatatgattctccaaagcggcggaaccatctgaaactataacaaatttaacgtcagtatcagattttcttttttacttctcaaagagtgaagaagcttgaataccctagcatttcatagtcaacaaaaagaaacaactcatggtttctatc

SEQ ID NO: 148211 - DNA, 129 bp, Arabidopsis thaliana landsberg
agaactgatccagctttgaaaagaaaaatgttgcctaagaatgctattgagaagatccaagcaaatgtgagcaagccttgcttctggaagtctctctctccaggacaaacttggaaatctaaatccatg

SEQ ID NO: 148212 - DNA, 505 bp, Arabidopsis thaliana landsberg
gttaggctgagtatatggacatgaagacccttttagaccgtacaaacgacgccatcaacacaatcatacgacttgatgagaccaccgaaacaggggaatttcttcagccttgtattgaaggtatacaatacaatctgtatattcgagctttcggggattattggctcagatcaatgagcaagtcttgtttattatgtagctgcattgcatttggggtgcacaccaaggagagcttcaaggagccaacggaacattaacccgagatgttatcttagccaagactcaactaacttggacaacatgttgtcccaagtattcatgaaaccaaacaactttgctccaaagaatcttgcagtagcacaagagaagtgccctgtctccaagtactctgcctaccctttatgctattcattcgggccaatcagtgactcgtgtaagtccaagaacagtagaccggcgtctctcattgacgcaacaaatggcattacctttggtgggtgtgaat

SEQ ID NO: 148213 - DNA, 274 bp, Arabidopsis thaliana landsberg
acacgactgatggacgtgatggcgttttcgttatggtacatgatctacgatctaatatgttgtcatttcgatcaagtgtttagcattgataacgcggttcatcatttcgttagcattcttggttttatagctggacttgcctaccaaaaggtatttttattgtttttgtcttgaaatttatgaatactattagaagatttatcatttattaaattttggtatcatttattgttttgaagtctggatctgagatcgtggctacactttgggtagc

SEQ ID NO: 148214 - DNA, 284 bp, Arabidopsis thaliana landsberg
agttagctcagggtcgtgggacggctaatgtggtgccttttcttatgtgggcggttgcgccagggactacgaggggaggtagtgcgttctggatgcttccgatgagcggttcgggtgggcgggagcagatgcagcagcagcctggtcaccaaatgtgggcgtttaatccagggaattatccagttgggacaggacgagtagtaactgcaccaatggggtcaatgatgttgggtggtcaacagctaggattaggagtggcagagggcaacatggcggctgcaatg

SEQ ID NO: 148215 - DNA, 94 bp, Arabidopsis thaliana landsberg
aaatctagaaaaattcttgacttgagtaatgtagccaaatacaaaatatgacatttgttactatataaaacaaaattgtttcagataaaacaag

SEQ ID NO: 148216 - DNA, 388 bp, Arabidopsis thaliana landsberg
accgaggtcaagcaaagggaaatcaaacaacaaagggaaaggaggagataagaagaagagagacgataaactgttggctccgagtctggttgaaatcacagtcaccactccgtacgaaactcaagtgatactcaagggagtttctactgacaaaatcattgacgtgagaaggcttttagcatctcacgttgagacttgccatttcaccaactattctctctcccataaggtattctcaagtttatatcaatcaaacatcagttttgttcatcaaaaaagacatgactgataattatattggttggcttaatgtgtaggtgaaggggcataaattgaatgacaacatccaagtactttccctcaagccttgttttctcgcatgattcag

SEQ ID NO: 148217 - DNA, 134 bp, Arabidopsis thaliana landsberg
gtttcaaccattagcacaaaaaatctgagctccgaccaaaaattggggaacgacgatggcgacgactcttcagaaactctcctttcaaattcaccgactctctccattcaccagatctctaatcgttcgcacat

SEQ ID NO: 148218 - DNA, 414 bp, Arabidopsis thaliana landsberg
aacaactaaaacttattcaccaagacaatttattaccttgtttctaatgaatcaagaatctgatccttatttcactgaaaatggccaaacctccaaagaatgtccggctaagagacaccgaaacaacaacaagacacataaacaactaatttggattatacgttaaatgaataagtaatgaagttcgagaagagacttatgaggaggagatgaattgtttatatgttggagccgaatccgccaccgcctggagtaagaatctgtaggatttcaccggcttccacgtgaaccgtattcttgcctccaagatagattcttcgtttgtctttagtgatgagatagtttgctccacggagtccgttttggccaccgttcaatccacgtggtgagtgtactcgtctctctgagaggata

SEQ ID NO: 148219 - DNA, 189 bp, Arabidopsis thaliana landsberg
ggcatagttgatcaactttattcagaagcaaagaggtccatggcatagataattagataccgatcggctattcattttctgatgctatttgggtttgtatgatatgttacaaaattgtgttcggatcctctcatcatgtgattcttgttacactaaatttatagtttggaaactatatatatactatta

SEQ ID NO: 148220 - DNA, 599 bp, Arabidopsis thaliana landsberg
ggttactcagtggttaaaatcaaatctttgttaggtaaactttttgggagttttcttcggatgtgatggaaccaataacgtttttcactacagatactgggattattgttggttatgcttatttcttgatgacttctagagatccaacgtatcaagatttcatgaaaaggttgtttctttctaggcagaggaagttgcttaagagtcataagtttgatgctgagaggtttaaagaacttgagaacaagtggaagattacgtcttgctcttcttcttcgtgccacgctaatgcatcgattcggaatcgtgttggtgttgatcttgatttggaggattctttgcagagtcatcacagagattgattggttctaaccatttttcacttttgatgatattacttaaccagattttcttctctctggaggttgatcaagtttgattatttggtgttgattgatccaaagagttggagtagtcatggtgatttttatttgataatcttgagctactcttatttaaatcagctcatgtgttaatcttttctgtggttaaggattttgacggattataatagtctagtaactatgattttggctctt

SEQ ID NO: 148221 - DNA, 219 bp, Arabidopsis thaliana landsberg
caagtttatgaaaaatatgcattcgatctcgcttcatgtagtttgtctatcaacaatcgcattgtaaatgatttccacttaagctaaataattgaccgtcacagtcatacacaaatgttatgacaacagggttttaccaatggaaagaggagatttatatgaaatacgatgatatcagaagtttcaagaaaattatttttttctctattcaagaaaatc

SEQ ID NO: 148222 - DNA, 181 bp, Arabidopsis thaliana landsberg
ggcaaattacatttgtgtcacttaataattagacgaagttgtttttgtaggcatatgcttctcttcagcttactcagatgcagggaggagtaacgtcatagacaaaaactaaccacgtgcatgtcatagtaccatgaagtctaacaaacatgcatttttatgaaaaatatgcattcgatgc

SEQ ID NO: 148223 - DNA, 708 bp, Arabidopsis thaliana landsberg
caagttagtttacgtgttgttgcaaagagaagaaaggtttcgagtagcaaaagagtaaaactagatctttaggagaaggtaaaagaagcaattgatggcgacgacagtgggaagaaacatagcagcaccattgctgttcttgaatcttgttatgtacctgattgtgcttggttttgcaagttggtgtctcaataaatacatcaacgggcaaactaaccacccaagtaaatttatttttctctttctctctagctatttatatggtcatgtagctgatctagtggaattactaagaatattagtaatgtttgaataggttttggaggcaatggagcaacaccgttcttcttgacgttttcgatattggcggctgtggtaggagtagcgtcgaagttggccggagcaaatcatattaggttttggaggaatgatagtttagccgctgctggagcttcttccatcgttgcatgggctatcacagctcttgccatggggtaattactttatttatgatgtcctattaaatctcatgaagtgctaatttttgacgactatttttctttaaaacttggttttggatattttgtgaacttctttatatagatgcatggaagtgtcagtgtttggtaaatggtataataaacttaattttgatgaaaggttggcatgcaaacaaataaacataggaggatggagaggatggagact

SEQ ID NO: 148224 - DNA, 322 bp, Arabidopsis thaliana landsberg
agatcaaatcaacatacaagttttttttttctgtcaaaaatacatttttgatcaacacacttggacttcttctgcaagttatgccatacagatagcaattcaccgataatcacaagtccttgtttttaattattatatcaatcttacatagctgcaacggaagaggtagtactaatgggttgagaagacttggtattgccaatgccattgcagacattaaagccgtaccaaacagagttaggcaagaaaaggttgtagtagaaagtgactgatctgatggatgagccgtagatcttaacattctctggtttccagccggcgg

SEQ ID NO: 148225 - DNA, 861 bp, Arabidopsis thaliana landsberg
ctaaaaaacttgaatccgatcttcttttatcgtttctgcaattttggtttgttgttgtttgatttgcccaatgatgcataaaattatgttatagagcggttgtatttgggtaatctccggcgtgttgttttaacctaatagccttgaacgccgtcgtttcgtctccgacgacattcacacgcgcacacttccacccttaccatctatccgtctcacacgtgcgtcggatgcgaaacggtggtgttcagggattttttaggttgccggattttacccatttactctaagccgtgaatgatcaaatttatagctatgagatctgagggctttgttttttaattaaagtttcggtttttatgttttggtttgtctttgcccattgatgtaagaaatcatttctgagtggtgccctggtttttgaatgttcttctcgtagttaccattgttgctcctcatcatcattatcatcatcatcatctcaacagtcttcttcttcttcttcttcctctgcttcttgtgttctctgctgctgctgctactactggtttcttgcaatggtaactttgagtatatttgaaaacctgattttgatgcgccgtatatgacagatttttgtgaatactgagggctatttttcttttatcactaatctttgttgtttggcatggatgtagttaatcatgtgtagttgtatgctgttattttcggtgagatttaagccctgtgatgatgactctaatgagtttgagtggtgccacttgggtttttcttgctgagactcattatcttggtcgctgctcctgcttctctctctctctctctctctctctctctctctctctctctctctctctctctctc

SEQ ID NO: 148226 - DNA, 309 bp, Arabidopsis thaliana landsberg
cctgaaaatattgattcaaaactcagcagaatcttagagattcagctaaatgtgtctgtgtcaattacattttatttgctctatgtttgaattttctgcttctggacactctcaagaatcatactgaaatgttcgaacaacagaaattccactcctgtctggcaacagcttcttcatgtaatactttgatctcctagaaagattgattctttcccgtcttgcctctggtatcatctcgattggacattcctgaaacccgcgtctcacaaaccagtccgcggttctcgttgtcagcagaaatagcatctc

SEQ ID NO: 148227 - DNA, 643 bp, Arabidopsis thaliana landsberg
aaatatgtttccggccggtgtaatttgtctgcaatcgacttctctgatcaaaatgttgacataaatctcaaatcgaatcaattactttagagatttcccaaattccgtctcgaagatgtcaacggagagacgtgcttcgtcgaatccaatgaccaacgaagagaacgctatgtatatatctcttacgctctcataaccaaatttctctcttctttaaatcaattttaagcttaaatttcgatttgggtttcattttccatgcaaatctgtattaaaaatgcttcccttattcagtttcttgttatgaaccaaaaaaagtttacatttttaccaatggtgtgttctttgtaggttccttgatatattgcatgaagcaccattatttggtcacaggaaatctagaagccttgttggaagttacctctatatgcttctattggcaagtttcttttgattcttttgattatatggttcatatgcataatgttgcctttgatagtttttgcctttttacattaggcaggttatgctattttagcagctggagctccttggatgtttcaccgagtccaacagttgaccccttcattgctctgctgctgcgatgttgcgcttttggttgtcacaggttctcaacttttct

SEQ ID NO: 148228 - DNA, 636 bp, Arabidopsis thaliana landsberg
acttgaataatggggaaattttgttgaatttgatgagcctagtaatgtgtgggaggtgggggagaagcgtagatgtagacaggaggtgggggagattttacaggtggtggtggagagctgtaaaggtatggtggtggtggggatttcacggaggaggtggggagtggtaataatatggaggaggagcagatttcacaagagtaggaggtgaatggtagtagtatggtggtggtggggatttcaccggaggaggtggtgaatggtagtaatatggtggtggtggggatttcaccggaggaggtggtgaatggtagtaatatggaggaggaggagacttcaccggaggaggaggtgaatggtaatagtatggaggaggaggagacttcaccggaggaggaggtgaatggtagtagtatggtggtggtggggacttcaccggaggaggtggggagtggtagtagtatggaggaggaggagactttacgggagggggcggtgaatggtagtagtatggaggaggaggagacttcaccggaggaggaggtgaatggtagtagtatggtggtggtggggacttcaccggaggaggtggggagtgatagtagtatggaggaggaggagactttacgggagggg

SEQ ID NO: 148229 - DNA, 845 bp, Arabidopsis thaliana landsberg
cgaaggtacaaatccactcaatctcaaactcctataccactgcaacaacaacacacaactacagaactggtcactactgtcccttcctctcttttgtcggtaaatggagttacccgtcgtagatctgtctagttacctcgacttctccggtgatgaattaggatccgatctactcgaatcatgccgacaagtgagtcggatcctaaaagaaaccggagctctcattgttaaagatcctcgatgttgcgctcaagacaacgatcgattcattgatatgatggaaaattatttcgaaaaacctgatgatttcaaacgattgcaacaaagacctaatcttcactatcaggtttcttcaattaaccatcatcactctctcgattgtgattcaattttaatcgaatttcgtgttttgttttctcatttctggattaagccaaattagggcacaaatcttagtcttatgggaattactattgcttaatgtagttgtgttgtttgatccctttgttgattgtgaaatcagttgaatcgaatttcgtgtttgctatcgaattagttacgagaatctggattaagccaaattagggcatgattagtgaacttgtctcagtttaaagctactattgcttaatgtagttgtgttgtttaaaaattttcaatcttgtgaatgtaaacacaatatttcattgctatgtgttgattttttaacaggttggtgcgacgccggagggagttgaagtgccgaggagtttggttgatgaagagatgcaagaaaagttcaatacaatgcctaaagaatacaaaccacatattccgaaaggaccagatcataagtggagatattt

SEQ ID NO: 148230 - DNA, 156 bp, Arabidopsis thaliana landsberg
aagacttataagtatatgttctctattatacttgatccaatcatctggaagtccaagaacaattcttgaatcaatggaacaaaacaaaacatgaaacatgatgagtatgggggtctattctaagctacaagccacatgaagaatgtggccaaacac

SEQ ID NO: 148231 - DNA, 812 bp, Arabidopsis thaliana landsberg
ctctgcccgttttttaacaatttgtgctcttcttcttccgtttcttcttcgccgtcagattcgactgtaactgtaagttcttcttcttcttcatgttcctcctgatctcagtcgctgagcttgattagagtttgcaattgtttgactttggattcgatttaggctatcttagaaatgagtttggttcgttttgtgtagctaaagtttcgatttttgtttctgggttttaaatttatcatcttttatgaatctggtgaaatgataaattagctcaagtaacctaatttcagaacccaatcgctttgatttgcaaaaaaagaaaaactcctccttagttccaattaggtaactcctaaaattatagctgaaaagggttcgctagtgattctcttcttgatgataatttatctcaaaaacagtttttttaggattcatgagttaaaagagtatgttcgatacttgtggcccaaaaggagtcaaatctcaagtcatcagtggccaacgcgagaactttgtgaggtatatataacaatttttgaatctcatgaaattgtatgaatagtattaagctttttgagtattcctgaattcaaataggttagatagtatggactcaaggtactcgcaaagttccgaaacgggtctaaacaaatgcacattgaatatacaaggaggacctaaacgttttgctcaaggaagcaaaacatcatctggatcttttaagaaagggtttagaaaaggatcagaggggctttggtctataggtcggtcgattggactcggtgtttcgcgcgctgggttccagaagatct

SEQ ID NO: 148232 - DNA, 468 bp, Arabidopsis thaliana landsberg
ccattaatgacacacaacggtatgatgcaaatgggtgggtttggatttgatgcatcaaaggtaatcaaactatatatgaatatatgattgctaagtgttgttgttttgttcgctccgtggccatacctgatttggtatcgttgccttgcaaaattgatcagagtctgggtgcagagaaggatggtttagacataatccagcacgaatgggcactacctcgatttgagcagcgcgcagaatctgtattaagaaaactcgtgaagtagagagaaacacgataaggttttcagtgaaatctggtttacttcactcgatgttgaaaacattcgaactttgtagaaacttttacttgaaactgagtcttaacagtgagttcttgtgtttcagctcgtagataaaactctggttttcttttcgtcatctgtcaattattgtgacactcacgactctctcaaaaaaagaaaatgt

SEQ ID NO: 148233 - DNA, 169 bp, Arabidopsis thaliana landsberg
gttgcttatctctctctagacctaggcgcaggttccatgtctctcctcgccatctgggcctgtttcttgatctgaaactaacaaacaaacaaaccaaatgccggtcttttttctcaaatctgtaatggtgtttctaatctcagaatcaatactattctatcttgaacac

SEQ ID NO: 148234 - DNA, 255 bp, Arabidopsis thaliana landsberg
accctttccatcaatacataaatccaaatgcaggtcaaagcaaaacaaaaccaatagatgaattactactactaatactacttcattagtactttccatatcttcctcatataaacggctaaagaccaaacagatagtcctgctgatacataaagcaagccagcacctgaagctacgagccatccaacattgctatctcggcttgcaagaagtatggttagtgctgtcatctgcgtggcggttttccacttgccc

SEQ ID NO: 148235 - DNA, 272 bp, Arabidopsis thaliana landsberg
gcgaggccaagaccccagagcaaaggaagaggaccggagagagtaccggttcctccagcaccaccgaggaaagataagtttgagaacgacgagaagatcaaaatcgatatcgacgagtctctcttctctaattagaaatatgagattcttcacttgttgtctctcactgtaattttaatttgttttttgaaaagctttgatgctacgactcttttgttgttaaaaacatctccaaagttctcatctttttatgaaaagtttgcatctttatg

SEQ ID NO: 148236 - DNA, 570 bp, Arabidopsis thaliana landsberg; identical to SEQ ID NO: 36073

SEQ ID NO: 148237 - DNA, 427 bp, Arabidopsis thaliana landsberg
ctttagtgctctctgttttcttctgcttatgaaaaaacttcatggcgaattttgaggatatggaagagaatcagtggggatgttttgttttcttttctctttctcagttcatcgaaactataacccactaaacatacaaaaccaaattatttataaaaagcaaaagcaaacaaaaacaaataaacggatcaatttctatcttttgtttgtttcttcttcttttctccaatctctagtgtaacgtttcatgttacaacacttgataaataaaatattttaggaagaaagtgcgagaaactcgggagttatacaaaaaaataacatttttgtagaaaaaaagctctcgtcttttcagttacttttctcttttgtcacactttcatatttttttctctaatcatggaggcaacagaattgcattagcttc

SEQ ID NO: 148238 - DNA, 243 bp, Arabidopsis thaliana landsberg
aagcctgttttcacatgggatagacggcgccgttttggtgtctcagagcgtctttatatttgcgtttgcgtccataggtttggagttctgtgtcaagatgaatctcttaagaccatttcctagctctgactagattgaagagcaaattaaaaatgtagaaatgaacaaaatcttcttttgaagactttatttgtttttttttatattattaattgggggtctaaaatgtaaatgtttcatcct

SEQ ID NO: 148239 - DNA, 133 bp, Arabidopsis thaliana landsberg
cttcttcttctctatcctctgtttcttcttcatggagacttgaaagcttttaaagtatatctaaaaacgcagtcgttttaagactgtgtgtgagaaatggctctgtttagagatattgttcttcatggttctc

SEQ ID NO: 148240 - DNA, 417 bp, Arabidopsis thaliana landsberg
tccccaattcgtggattagggttaaaagaaccatttttattctcgtcgcgcaacaacaaatccagatcgaaaaaggaagaagagatcgaaatggcgttgagaagggtttacagtgaaatcagagggaagaaggtgacggagcttccaggctatatcaaatcgactttttcaatggagaccgtgaagacctctgtgaagagaggactcgataactacaacgaaaaatacattcagaccagctccgttgatcctatccttcatatctgcttctacggcatggctttctcttaccttgtcgctctccctaatgagcgtcgccatcttgagcatcagcagcatgctaaggagcacggtggtcattgatctcgtgggaatcgtttcgatctcgagatgattttaggtacttctgaatttcga

SEQ ID NO: 148241 - DNA, 749 bp, Arabidopsis thaliana landsberg
aaatggcaataatatctcagttttttgctccattaccatctctcaccggaaccctaaccctaaccggtcgttcttttctccctctaaaccttgatacccaattcccaaaacctagactttccagggacagagccgccacactcgtactccaatccaagggtgatgattccgtcgatgcatcggatcggataatctcagccgtctgttacttctacccattcttcgatgggattcaatacggcaaattcatcatcacacagtaccaaccttttcagattctcatccaacctttgtttcccgccatcagagctttcaagagcttccctttcaatgggtttcttatcttcatcactctctacttcgtcgttgtgaggaaccctaatttcagcaggtacgtcaggttcaacacgatgcaggcgattgtgcttgatgtgttgttgattttcccggatttgcttgagaggagctttaatcctagagatgggtttggtttagatgtggtgatgagtttggacagcacagtgttcctcttcttgcttgtctctttgatctatggattctctgcttgcttgtttggtctgaccccgaggttgcctcttgttgccgaggctgctgataggcaagtcctttgattcaataatatctttgtatgtaacacatttgctgtgattaaaccttctgtattggatcgctttctgataatcaaaacatacaatgtaactttttgatccaatgaaaaaggtttctgc

SEQ ID NO: 148242 - DNA, 254 bp, Arabidopsis thaliana landsberg
gcctcctccatccactccgaatcctccgccggaattttcacctcctccgccggatttagatacaaccaccgcacctcctccgccttcaacggatataccaatcccaccaccacctccggctccagtatcagcatctccgccgttaactccgccgagctccgtcgtccccagtcctgctcctgtgcatgccaagctagtaaacgattaaagacaaaacctttgtaaattccgacatttttcttgcgttcacattt

SEQ ID NO: 148243 - DNA, 232 bp, Arabidopsis thaliana landsberg
gtgaacacgaagtagtaacaactaacaaggtaattaaggatcattggcttatataataaatagatttagaaaaagtaatcagtcaatgttgatcatcatcttgacaaattcatcataattgacttggccatcaccatccaaatctgcctcctttatcatttgttcaacttcttcatctgttagcttttctcctagatttatcattacatgactcaactgcaataacaaagct

SEQ ID NO: 148244 - DNA, 344 bp, Arabidopsis thaliana landsberg
gatggaataggaggaggaggaggatctggatcatctaacggctctggattcgggtctttaggaagaaaagaagtgttgacaacaccaacaagccgagtaaaacgggcgctagggttaaagatgcttaaacgatctccttctaggcgaatgtcgacagtagggacagttgtaggggccgtctcagctccttcatccccaggtaataatggaagcataggaagtggttcaggacactttagccctggggctgggttttttacggtcccgcctgctcggcctcgacgaccgttaacctctgcagaaatcatgaggcagcaaatgaaggtgacagaacagagtgacac

SEQ ID NO: 148245 - DNA, 420 bp, Arabidopsis thaliana landsberg
tttcctcgtacaagttttataaatttcaaacttatgtcttaacacaacgcaaataacacgaaataaaacttccaaatgacagaattgaaaaaaacaaacaaaacacactccaaagtaaaagtaaatgtctcacatttgttccacaagatataagaagagttttcttgtttcaatcaagagttaatcttcctgcaattcttcctgatttcgccactagaacctgtcaagggagagatatttcccatcttgatcatcgattccgcaaattgctcaaaaaactctccttgatcttctgcatacttcttcacaagctctctcgatttctcgttactgctgaacagaacttggtccgagttcaacaaccccttgttctctatcaagttcttgaagtagctgttgtcgaagctcgcggcgctgatg

SEQ ID NO: 148246 - DNA, 552 bp, Arabidopsis thaliana landsberg
catcatctatgaccactactactagtcaagacactgtaggctccaacgggaaaatgaatcaagaatgcgaagacgggtactactccatggatgacatatggagagagattgatcagtctggagcaaacgttattaaaccggtaaaagacaactactactcagagcaaagctgttacttgaatttccctcctctggcttctccaacatgggaaagttccttggaatctatatggaacatggatgcagatgaaagtaagatgtcttcttttgctattgatcagtttcctctaagttttgaacatggtagtggtcgcctttagtctaggatttgattcatttggaatgtttatatgtgcagcatatatatgttatcaaacgacgactgtagtagtttcctatgacttacatcaaaaatcaccacccactgtactaatctcataagtagtcatcatcttatgcctttgtttagtttgtagagtgagtgaaaagatgtgtaatacaagtcagaacaaatatttccaaaataaatagacttttgaagtttctgtgaaa

SEQ ID NO: 148247 - DNA, 308 bp, Arabidopsis thaliana landsberg
aaaaaaaaaattagctccaataatacatgtgtgaagctaaaaaaaaagagcattacttgtaacaacaaaaataattcacacatataacattcaaaagtttatttttttgtgtttagaacttttccccgttacatactaataattataagcactgcaatacaagtttaccaaatgcacaatcacatagattcgtgctccatatatattgcgattgagagcatcaaagtttagagagtggaaacagcaaaatagcttttgtgatacgcggctgcatttgctggaaacaacatttggctaactccttcaac

SEQ ID NO: 148248 - DNA, 288 bp, Arabidopsis thaliana landsberg
taaaaaaaccccgacagagagaaagagttgatggacacgaccgtagcttttccacaagttccgtcgaaacttgaagagttactaaaaagagagatatccacttttacaggagacaaaagggatcggtggtgtccacacaaagaagatgaagattgtcggggatggaatattatttattatttatgattaccaggtaggttaaagctgtaattgaccagggccttttcttgaagttcttgatgcaggtctattgttgtctgcacctgatgatgatgtcgaagaaggtgg

SEQ ID NO: 148249 - DNA, 441 bp, Arabidopsis thaliana landsberg
ttaccagtaatctccacaagaacacactccattcttgaaatgatgaaaccttttgttgtccctcacaactatttccctttccatgaccttggagatcaactttgctgcattgtgacagtccacacagatccttaggttcttgtaaactctaatagttgttccttctgaagttttaatcaacccgtaggtaagggcaagcttctcgctgtgtccccttaactgttcaatcttctcctcttcacttagatcatgttgtactgacattgtgtctggtctgtatcccatcttcgatatcttcatctccaatatactccaaagacttttgatttcctcaaaaccatctaagaatctttcaccgacaacaaagctaaataccttcccgtttagttcgatccaagagcatccagcatcctttcgtaaactcatctcgttcattctctg

SEQ ID NO: 148250 - DNA, 323 bp, Arabidopsis thaliana landsberg; identical to SEQ ID NO: 67301

SEQ ID NO: 148251 - DNA, 309 bp, Arabidopsis thaliana landsberg
atgaagagaatagttcagggaggagttagactagccatgatactaaaccgggtttttagtgacgatcatgctattgctggtgttgctgccacttgaaccaaacccgacataccggggcatcaaagcatttgattaagagattatttgatacattcacaaaattaattaaggctgattatcggacattcttttcttttagtagctttatctatgtgacagctaatgcctgtggactgctttgtttagaagtgtttagcattagatcatatgctaattcaatgttattaattcatcgtatgatcgttttag

SEQ ID NO: 148252 - DNA, 148 bp, Arabidopsis thaliana landsberg
tgtgaaagaagagactacttaattttagctgaaattgtgaaaatataatggctcatcaaaatcttctggattgttgtactgaatagcgagcgaagtcagaaattttcttccaacacaaccacattatttctgcaataaagaaccaaat

SEQ ID NO: 148253 - DNA, 98 bp, Arabidopsis thaliana landsberg
atttattttagttttttcgtccaacggaaacgtatccactctttcgcttcttctttcttctgatcatcctcccgtagctgattcatggagtcaatcca

SEQ ID NO: 148254 - DNA, 131 bp, Arabidopsis thaliana landsberg
tgctttgatacgatgttgctgagataatagaccggagaaagacgacgaagagatcagcgattttgtttactccaccaatggattcagctcgagaggtcagcgatggtagactcaccgtcgaaggtttctct

SEQ ID NO: 148255 - DNA, 453 bp, Arabidopsis thaliana landsberg
gtttggcttttcccatgagcttttccagcacattcatctggattgattaaataaaaaacttgtttattctgtgatttaattcttacattcaaatacttatgcgtgaacttgctcttattatatagtctcctactacctattaagtcttttaacggttcataatcctcttagtcgatgagccttgtatgactgcttctgttgtgaccaatgagctcaatccatgttgcttcaatgatccttctcttgtttctcttcttgcatcattctgattctcgtcacctcgacaatgtccacattacagcgtctcggttttcactcgtcaaggttcttgatccacatttcaattcatcaacttttcatttactttcatgttcttcgtatttgcggtatctgtttatcaccttctcaaaactaaggcttctttttgtttttctgtggcttaggatcaaaatg

SEQ ID NO: 148256 - DNA, 138 bp, Arabidopsis thaliana landsberg
tgtgatgcaaacagatgaaatgtgatcagaagtcactaagtcaagccaagcaataacagttttggggtttctaacagtcctaagcgaacatgcagaaaacagaagcaataacagaattactaaaatcactcgaccaca

SEQ ID NO: 148257 - DNA, 487 bp, Arabidopsis thaliana landsberg
gaacgcatcagccgtctcgctgaacagcagaaggaaacggctcagtcacaaccggaagaagaagctgaaccaacacatccagaatccaccacagaagctgcagatacttaaagattgtctttgttttggatcctctggtcatctctttcacgtacgtatgtttattattctcactttttgtttgtgctactcatcctccctcgaggtaggattcacggtagacgcggaagaggaaaatggcctccttctccgatctacttttaactttatggtgatatctttgtgtggacagagcaatctcgtccactggagagaaaagcaaatatgcatacatacacgtcaacttgtatcattgtaacactatgtttgtaatcatttccacgagctttttttgttttcaatacaagatctctctgttcgctttcttaatagcattaaagagatattaattgaatataatgcagattccgatttttcatgaacagat

SEQ ID NO: 148258 - DNA, 135 bp, Arabidopsis thaliana landsberg
gaaaaaacgaattttgataatgtagggttttgcccttttcttctctcttgcgttatcatcggggttttgattctccggccaagtcccggagacttgtgatctgggggaatttggtgttcaatttcattaagacgc

SEQ ID NO: 148259 - DNA, 374 bp, Arabidopsis thaliana landsberg
ctaaattgcgtgaggatgcgaatgcttaagagggaagaatgaacagcaatgccttacatcttgtctgctcgtgagacgaggaagatgattgtgagagacctctttatcatactggggttcccccatttcctctcccttcccacgagtaagatgccaaccaagcatccgctctgaaattttctccttctgagggtagttgaactcaacagtaccttcatcagctaagccatcctcgtctttatcaccaggaatagcaggactacctagaatcagaaattagcaaattgctataaataccaatctgatccaaaattcaaaacatactgataaactatcgatgaacaatgaagacagtatacttcagaaggatcaaa

SEQ ID NO: 148260 - DNA, 395 bp, Arabidopsis thaliana landsberg
aggaagaagaagcgaaaaaatataatagggagccctagatttagcagacttgatttgatactggaggtcatcttcttccttacatggtttgtgtgagatttgagggatttctctgctaaatctagggattaaacaaaacaaatatctaaccgacaacagaatccgagagtcctaaccaaacctaatgatattccaaattcttctttattatcaatccgagagcaaaatgtttaaatctcaagtaaagaacgccagaaaatgaagctagagtagacaaaaatcaagctaccctttcactcttttgctcgtaaacatgcttgaaaggaacaattgcttcatgggaacaaaaatatgtaataattgtgtggcagaatcttgtcggtaataaaaggttg

SEQ ID NO: 148261 - DNA, 500 bp, Arabidopsis thaliana landsberg
gggtgaatggacagagcataggtaggtactggccaactagtatcgctggaaatggcggttgtacagaatcatgcgactatagaggttcttaccgtgcaaacaaatgcctcaagaactgtggaaaaccttcacagacattgtaagtactaaaccagcttacatcattcagcagaatagaacgcttcctcaagcctaagttatcttttgtaggtatcatgtacctcgctcgtggctaaaaccgagcgggaacatacttgttctgtttgaggagatgggaggagatccaacacaaatatcatttgcgacaaaacaaacaggaagcaatctttgtctaacggtgtcacagtctcattcaccaccggtggacacatggacttccgactcaaagatctcaaacagaaacagaaccaggccggttctttcgttgaaatgccctatctctactcaggtgatatcttctataaaatttgcaagctttggtacacccaaaggtacttgcg

SEQ ID NO: 148262 - DNA, 258 bp, Arabidopsis thaliana landsberg
gatgaaagcaacaatgatattcaaacgcaacgcagaacgtggcgatcctgaaacgtttcctcattctataatcttaagagaaatgagaggcgagtggttttaaactaaagaccacaataaaatgttaagaagtgtctgaataaacttttgtcaattagcttcattgagacattttggttccttacgaaagtgaacaaagcctctttatgtcccaaatctctagaaaccctaaaatcaaaagaatttgttcgtacatta

SEQ ID NO: 148263 - DNA, 89 bp, Arabidopsis thaliana landsberg
acatattagcaagctcattctccagatatgcttctctctgttttgtttcttctaatatccttcaagctcagcttctctttgttcttttt

SEQ ID NO: 148264 - DNA, 142 bp, Arabidopsis thaliana landsberg
aaaaaagaggaaaaaatagtgaatcaagctgtctcgtagcagtctttatagatcaaacgataatcgaatccaacgacccatttttttttattttttgggtctgatttcgtctctctttgttcttttcacctttttttttttt

SEQ ID NO: 148265 - DNA, 414 bp, Arabidopsis thaliana landsberg
ctgttgttaatcgagagatctctgtgactaaaaccgccattaatggaaccaaacagagcttgaagagatgagtaatgaggtaatgataacctagcttgacgtatttcatgttgacgctttgtaagaaattaggaagctttcgtctttcgttgttctctgttcggatctgtacggatccgccattaacaggctcattagcagcttccatggcttccgagaaaaatggaataaaaatgaaaactttatgagaatttgtgcatataaaaggaaatgggtaagtgggttttataggaatagaatcagtgaagtgacgccattgaagaacacgtaatgaagaaaacagttgatctgtcgaaaacttgtgtttttatgatttagagagaagaagaagaagaaaaaaccaaaagtgttttt

SEQ ID NO: 148266 - DNA, 88 bp, Arabidopsis thaliana landsberg
tagaataggcgtcttgatccatgatgcagataagagtttgggtttagtatctcaagatagtgtttccaacactatgagtatgttagat

SEQ ID NO: 148267 - DNA, 164 bp, Arabidopsis thaliana landsberg
aatgtaccagatgcaccttaatctcatagtacagtaacaataggaaagatacaaaacggtagaggaaggttttgatgtttaaaaagcacaagcttattcagtcaaaaacagatgtagagattttcatgggcttatgaagaccttaagcatccagctaaaggcat

SEQ ID NO: 148268 - DNA, 177 bp, Arabidopsis thaliana landsberg
gagaaacagacaggcttgaagaatccactactgaacatcttgtttactttttctaaaaagcttgttgtgagccattaagagtttcagacagcagcttgtaggttaagatttttcctgaacagctcaaggattgtaccaccatccttttttcactaaatgatattaaaactaccatca

SEQ ID NO: 148269 - DNA, 696 bp, Arabidopsis thaliana landsberg
caacaaacaacagtgaaagataaattcagcataacaaaacaaaatggagtcacggaaaaattaacctaatggcgacagaatagctttaatagtggtggctatggtggtggcagctgctgatgataagacgaaagacaaggaggagtgtacggagcagctggtcggtatggccacgtgtcttccttacgtgcaaggacaagcaaaatctccgacgccagactgttgctccggtctcaaacaagttcttaattcaaacaagaagtgtctttgtgtgatcattcaagacaggaatgatcctgatttgggtctccagatcaacgtctctctagctctcgcacttccttctgtttgtcacgccgctgctgacgtcactaaatgccctggttcgtagctttttcactgttaaaaatctacctatacaatgttctgtgaagtaattattttttgtagttatgaatatagcacattaattaagaatgaaaacagagtgtagcaaaatcataattgttttggaatgggtgtttttcagctttgcttcacttggacccgaattctccagatgcccaagtcttctaccagctagctaaaggtttaaacaaaaccggcccagcctctgctcccactggctcgtcccctgggcctaccagcatgtctccgaccgctggatccgatgctagtaacaacagtggtcgaaca

SEQ ID NO: 148270 - DNA, 69 bp, Arabidopsis thaliana landsberg
gtaaaaactaaaaacaaaggagatggcgaaagagggaacaacggtgatcggagttccatattacgcggg

SEQ ID NO: 148271 - DNA, 551 bp, Arabidopsis thaliana landsberg
gaaaaactcaaatgcaaagccatcagaatcgaagcaggctgagcttgattctacggtctagattcatcccttccttctcttcaccactctccctcttcgtcgtcctcgctgctgttcctcttccgatctacttttccggtctactctccggcagaaacaacaagccgctttcagttatggttcgtcgtcgctcttcctccactttccttctttattttgtttgttctgagatttgattcgccgattgtgtaatttgttagtgcagagactcaactccaacttagcttcttcaaggggggaagggaatatttcttgtaccactttcaatatcttggctccgatttataaacgcgttgatcaaaaggtttgcttctattcttctgatttcttcactctttaccttgttgattctggaatcgacgacattggttgattgtgttgggtgttattaacagaatcatagcactcgagagagcgatttccgcacgctttggttagctcgtaaccagaggattttagatttgttactccatcaacgctcttcagttatc

SEQ ID NO: 148272 - DNA, 500 bp, Arabidopsis thaliana landsberg
attgaaaattctgataatttcgaggcttcacagaccttgaaagaaaagcgttgagagctgcttgactataaaacggttgttgttgttgttgttgttgttgttgatgttgatgttgatgttgctgagccgcttgaaaatctgctaaagtccttttcccggagaatccattaccgccggcgactctgtttccgatctgatcaaagaagattccaggaatctggtttctatacgtcgtctgaggattattgttaccgacgttgataacagttcttggacctccaggtatagatctaccaccaccaccgccgtaaaaatccgacccaccaccaccgccggagaaaccagattccattttttattattctctcaaaagcttcggaaagaacagatcagatttcaaaaattttactgaattatgaaacgcatgataatatggaacgagagaagagagagagattagatactctgagaaatttagagagagaaaagaagaagttgct

SEQ ID NO: 148273 - DNA, 385 bp, Arabidopsis thaliana landsberg
tgagatcaacagattcgagagatgaggagaggaggcaaggaagaagacgaagttgaacagttgcttcaagcagctcaagatgagatgatactaaagctctctgttgattctcacacttctcgatcttcttccgattacttagatccagatgttcactctagatttctcgctctcaaatctcaaaagaagaaggatcagcagcaacaacagaaacaacggccgagaatgcagccgaaatcaaaggatgtggttgaagaaacaccagaagatgtcatgcttagattcgcggctctgaagacttctctcccctccgcgtcttcttcgtcctctgttcttcttcaggatgaaatcggagaagattctgatgaaatcggagaagatgctg

SEQ ID NO: 148274 - DNA, 256 bp, Arabidopsis thaliana landsberg
aacctggtcgagggaagagaagcggtcagggatgagagcgtacttcttcttggtggcgttggtattatcggcaagggagagtgaaggatccgacggtgatggttcatgagattgagacgacgtcgttcccagagtcatatttctactgcttctgctttttccacttccaaatctctttaagaaattccccatagtcatctcctttcttcttcttcttcttcttcgaattggaattcagattttttttcttctcttg

SEQ ID NO: 148275 - DNA, 136 bp, Arabidopsis thaliana landsberg
agcttttgagtctgcattatcttcttctggtttcttcacaatgctcacttctaattctaaagagaaggaaaggtctctctccttcttatgttgctggtacttaggtcgtcgacgagttgctatgcttctacttctc

SEQ ID NO: 148276 - DNA, 100 bp, Arabidopsis thaliana landsberg
gctccttaggcaattattgtacaaaggacactcgtggttagagctgctacataacgagattatcaacttaaatgtgacgacatagagagagagagagaga

SEQ ID NO: 148277 - DNA, 325 bp, Arabidopsis thaliana landsberg
tttaaaaaatttcaacattattgggaactttgagatgtctatacaattcacaaaactcacatttttggaagaaactacaaaaagaaagagagaaaaagatctcagctttctttcttcccatctctaaacacagacatttgatacaaacataacttacaatcaaacttataggtaaagaaattgatgtgtacctttggaagcataaactaccatggatgtagcaagagaagcagtattcgtttttctccaaaagtatagtattcacaagaactctatcgatgatgcaacctctttacaaggatctgtcgatatagcgtctttgtcc

SEQ ID NO: 148278 - DNA, 501 bp, Arabidopsis thaliana landsberg
cctccacattaaagtaaagtctctttctcttttttctcctacgtactccatagttatggcttcatcgcttctgacatcttccggtatgatccctaccaccggttccaccgtggttggccggtcagtgttaccctttcaatcttccctgcactctctccgcctgacccattcgtacaagaaccccgcattgttcatctcatgttgctcttctgtgtccaaaaatgcggcaactagttctactgatctcaaacccgctgtggaacggtggccggagtacttaccgaacaagcttcccgacgaaaactatgtgcgtgtattcgacacgacgctccgtgacggtgaacaagctcctggtggatccctcactccaccgcagaagctagagattgcccgacagctcgctaaactccgagtagacatcatggaagtcggttttccgggatcatctgaagaagagttagaaaccgttaagaccatcgccaagaccgtgggaaatgaggt

SEQ ID NO: 148279 - DNA, 449 bp, Arabidopsis thaliana landsberg
ttccctttaagatgaagcaacttagtccaaaacccagtcttcttcttaaccgtcgtagatttcaatttctccgtcttcttcttcgtcgaatccctaacaatataatccttgggaacatgagccatagatctgcttttcattaatcctccacctaaagcttcgatcagattaccatttaaagcttccctaacagcgaaagacatcgacatcgaaccagctctccgatgatccttcaccgccggagacgacggagaagacgaaacggtggtggatgaagaagaagaagatctgtgaacgatgtaatacgacgtagtattaggtaatcgagagagtttatctcttaaacaacaaggacaaactcctctgttgccttggtggttgtgttttctgcattccatttttctatcttcttcgttctcttttttttcctcttctttttacactttgat

SEQ ID NO: 148280 - DNA, 173 bp, Arabidopsis thaliana landsberg
cattgatgaacatctccttcttaaagattcaattaacggtttagttgtaatcgtttcccgccagttttgtttgattcggttaaggattattgaggcttgttattacccaaactgtggtttgttttgtctaaaacgatgaggttcttattagttattactccttcagcttaata

SEQ ID NO: 148281 - DNA, 388 bp, Arabidopsis thaliana landsberg
tcctcctttctgtgtgaccttgcaaacctgaatccatacaaaatgatgtattaggtgactgagctaacctgaacactaatacaaatagaggatcagaggatataacccttaccttttctgatgattctccagaattagggacattttcataattcttatactgttctaatctagtttgtctgtatttctctctagaaatattaagtctgtcccacggaatcccctggatatctttccctttccgagcttgctcagccgtggtatcagctactttattgttctgaaaccatataacacgaaattacaacatagtttaaaaaaaaaaaaagctgtaaaatgagattagaaagtagcatagccaacaaaacatgttccatctcatcatact

SEQ ID NO: 148282 - DNA, 1840 bp, Arabidopsis thaliana landsberg
  unsure (1)..(1840): unsure at all n locations
ctctgtattgaattggttccgctctctgctcgaacgattctctctgataacccgattgtcaactccacagcccacaggtcagattatttccgatttagggttaatcgagttctccgcttttcgaaatccatcaaatttatatttaatttaatttgcgcgagaatcgatggtgattgatttgttgttgatccagacagagnnnnnnnnnnnnnnnnnnnnnnnnnnnnnnnnnnnnnnnnnnncgtgaaaagctttcgtcatcaattcatcatcataaagaggtgtcgtgtgagcacacgcaatctcccaatctctcttctctctctctctctccaatctccatatctttgtcctctataatccggagaagtagctctaccatcgaaatctcccaacttgcttccttgtgagtttctctctcacttcataaattatggtttttgcttcagtagacgtagaaatttggtattttgattgttgggtttcaatgatttagggtaaagattcattgggttttctccatttctagctttagtgattatgatcatgatttcatatcatcctctctctcggtttttgttcatcaatgtcttctggttcttgagataacctcctaagctttttggtttaatgattcctcttttctatcttctatgatcacctgcatttctcttgttttggttagatgttaatctccttagtgtgatttattaacttggtactattgattttgatatcagctaggaagctttttgctttttgttttcgtctttgcgcgtgtcccattctcttctccaaagttccctataatagtgaaagctcatcaagttatttagctctcagtttctgaaagatggaggtcaagttatggaatgataagcgtgagagagaaatgtatgagaatttcgcagagctttatgctatcatcaaagctactgagaagctcgagaaggcttatattcgtgatctaatctctccatctgaatacgaaaccgagtgccagaaactcattgttcacttcaagacattatctgcatctctcaaagatatggtcccaaacattgagagatttgcagagacgtacaagatggattgctcagctgcagtttatcgccttgtgacttctggtgttccagctactgtggagcatagagctgctgcttcggcttctacatcaagctctgcttctgttgttgctgagtgtgttcagaacttcatcacttccatggattctttgaaactcaacatggttgctgttgatcaggtgtatccgttgttgtctgatctctcggcttctcttaacaaactaagtatattgccaccagatttcgaggggaagattaagatgaaggaatggcttttgaggctgtcaaagatgggagcttcagatgaactcactgagcagcaggctcggcaacttcactttgatcttgagtcatcctataactcgttcatggctgctttgcctaatgctggtaattaaccgatgtgccactagagactgatgtgtgttcggtttattttgtttagtttggctttatgtagttataatgatggctttaggaacaaagatttttgtttcatgacaatttgctacatatattttggggatgaatgttcgtagacaaaacaagcttttccttttgttgtgtaaaagatgatgccaatccagaaattgtttttttcatgaagtgtaatgtatgaatctaactcttttgtgctgattattggctttatatcgttacatgggtggctttatatgtggttatggaacattcctctcctttagtcttttcaaaacaaatgtaaagactctatatcaactataaaacgttaagag

SEQ ID NO: 148283 - DNA, 456 bp, Arabidopsis thaliana landsberg
gacaagcttccacttcttctctttctctccatactcctctgcctcaatcgccctgtacttagcgacaccggtaacttcctctctttcttccattgttttcttgttgaagtaaatctctgttcttgaaactctttctgtctctctttatagtgtttattcaggatctttagatctggtctgaaatctcttaggagttaggatctgttcacttcaattaaaagttcttccatagatctcaatcatgagaaagttgaacttatttgaaaaggttaatactttctcaagtgtataatttgcattccttctcttgataacaaataaagaacaaaaatttactttaactagagattgtgaatatgcttctgcaaatgatatagaccttaatcaagcgtcttctgagttacagatggagaggacattcttctcacaggaatcaacagctacagaacaacacag

SEQ ID NO: 148284 - DNA, 242 bp, Arabidopsis thaliana landsberg
tcctcctcttacgtaaccctaacgaagtcgaagattctctggtagatctatctcgattcgattcgattcctcttttttcccagaaaagtcgctattgaaatcgaacgaaagtgttgaagattttaccagtcagaggtatatatatatagagagagagttatggatttggatcaatggatttccaaggttaaagatggtcagcatctctccgaagacgagcttcagcttctctgcgaatacgt

SEQ ID NO: 148285 - DNA, 185 bp, Arabidopsis thaliana landsberg
gtctacgctttcttctcttccttcttctcctctttcttttcctctttcttctcttccttcttctcttctttcttctcttcttttgccggtccaaccgatatcaaatcgactttaccaaccttcttcaacttcttcaccaccgcaacggcatccattaaaccgatcaccgtcaatttttgatcctt

SEQ ID NO: 148286 - DNA, 121 bp, Arabidopsis thaliana landsberg
gtcttcatccttccacacacgccttccgcagtggagaacattcccaatcctgaccagttcatagtcttcatccactcctccgtcgaaacgacgccgtctcttagatcaagcataccttgat

SEQ ID NO: 148287 - DNA, 834 bp, Arabidopsis thaliana landsberg
aggatgatactgtttttggtagtcataatatattcttaatgcagaggaacccttgaaggagatgttttaatacttgaatcgacaagaatgcaaactatccaagtcgtcaagaaagcgcatcttggtttggtcacagcactgactttctctcctgattcaaggtttttctctactcattggggctcaagtatttactctagaactattgattcaatggttccaaacaagcaaatagacatatacaaattctgaagcaaagaaaatgaaatcattgaatggttccaaacaagcagatagattgaatttgggtttggttttgcaggggattagtgtcggtatcttttgactcaagggcaaggctgaccatgattgaacaaaagggggacaaacgtacgtatatatttatggtttcccctcttgcttctccattttaacaaaagggtttccaatagaaaactaaactaaaatgtggtttttcgatgatgcaattgcagctggagtaaggtggtggctactggttttattgatagtgttgctatacgtggttgcatactattatatgaaggcaaagggtatcataccttagaaaggcctttaagtgaccacacaggacgatacagcggaatggcttgtaaccaacatatcatacgattacgctttgagttagctttttatgtttgacatctaccagaaacttgcttgctttatatcaataaaacatgtaaactaacactaaaacagcaaaagttacaatttgtttcctctttttttttttgtagacatagtaaactagaaaactattatcatatgagggatcagtaagactctttcaac

SEQ ID NO: 148288 - DNA, 468 bp, Arabidopsis thaliana landsberg
aatggtttttttttttttttccttttctacagaacagaaacattctacatacaaagaagccgagtcaagatttacatccacaatagatgttaaaaatgtacctgagttggttttatatttttccccaatttcttggtgaagccaaaattagatttgattttttaccactctcttattggatatcctatgaggacccttcacattcagtttccttgacgaggtgtggtcttttctcttcatcatctctgtctctgtgaaaagaagggttcttcctgctgctgctgctagggctattcggatcatatttagaagaggctaagaagttgagagccaatactacatcagataccactggtctcatgctaggctgctcttgaacgcacattgctgatattgctagtgcttggtacagtcctctaactgggtattgtccctgaagcaatgggtcaaccatttttgggaaagtcc

SEQ ID NO: 148289 - DNA, 299 bp, Arabidopsis thaliana landsberg
aggaacgcaccacttggagacttcaatttcactgtccccaaggtcatggaagatactgttccccctgatccgaagcttggctctccttttccaagcactactaccactacttcagagaagagcagtgtcaagcagagccataactaatatgttctcttctaccttctttctgctccctaaagcaatgcgttttgagtctttatagatttgatgttctctaaaactgttatgatattaacatctctaagcaaaaaaatatgatcttttgtctcttctttaaccggaactcaaatgttaaa

SEQ ID NO: 148290 - DNA, 360 bp, Arabidopsis thaliana landsberg
taatcttattgtatatagagatctatctcaagatgttcttcgttgtctgaatctaattacataccaatacaagaccataagatcaacggaagcttaaaaaaagtcactaaaaaattaattaagatttctgttaaagaaaatacaaaatggaccccaacagcataaacaaagacaacatagtattaagagattagtctacatagcaaaagtacaacaacaacaacaacacaccatgaaaagaacacatccccttctcttacccagaatcctcctcttggcctcagttcactcattagattcaccagcaaaaagaagaagtaagaccgaaacaagccggatttaacatctattcaatgttgc

SEQ ID NO: 148291 - DNA, 314 bp, Arabidopsis thaliana landsberg
tattagttatacctgtagacagcgagaagcactttcggtatttgcatcaatggagagagctctttggtaaagttctctagctgttgttgtgtttccttctttccattccatccaaccccaagcctaaaccggaatacactttcaccaatcatttcccctttcatacacgattgtaaagactcttgaattcgctagccagatagaactgggtaaaactaaagtctgctaagtgttaatttacaagataaaccaataaaacgggcgtaaagaactattagcaaaatctaaagctcaaactttaaggaaaacgtata

SEQ ID NO: 148292 - DNA, 186 bp, Arabidopsis thaliana landsberg
cacatttcttttccttattttaatcaaaacatttgtttgcatcattcacaggcaaataaaaattctccctttttcttagattgctactacttataaagtagagagtgcagatagatgtaattatcaaacgaggaagcatcattatcattatcattatcatcattactgcttcatagattcatatta

SEQ ID NO: 148293 - DNA, 93 bp, Arabidopsis thaliana landsberg
cgcctctactcgccaatgtcgtccccggaaaagaagaggaagacgacgaagaagccatcgccgacgccgcaatcgacaaccccaaagtccttc

SEQ ID NO: 148294 - DNA, 242 bp, Arabidopsis thaliana landsberg
gagagacaagtcttggcaagttttctctgtttcacactttggagacgaaaccttaaaggcttaaaactgagaaaaacaaagccgttggcttttgtaagccgctcgttcttcgagacaaaacacactacactctttctctctcactcactcttcatctcttttcttctttctctctctcctaaaaatccgacgaaattatgattcactttaccttttaatcaggaatatccctgtttcaccct

SEQ ID NO: 148295 - DNA, 238 bp, Arabidopsis thaliana landsberg
gaaaccgtagcaaaaagcttcgcaagaagagcttacaatgcctgacttctctcatactcttcctcaagcttgtagaacgactcagacaacttagcggttttggaatcgaactttatgttcatcatttctccttctggagcaacacccgttagcttatgaatgttaagaactttagcaaacttgcgtctgagtctgttacccttaggagcaacaaccattggtctcacagtctccatct

SEQ ID NO: 148296 - DNA, 730 bp, Arabidopsis thaliana landsberg
ccccttcttcagattctcttcgtttaatgctcttcttcttctactctctttgtgggtttctcttgtaataatcacaaaccaaaaaaaaaaatggttaactcatgcgagaacaaaatcttcgttaaacccacttcaacgacgattcttcaaggtagtagatgaatttgtcgagtaatatacgagaatttcgaggtgttttacagtttgcgtaggagaattctgacagaatgtgttgtgttcttttctggttttgtttagatgaaacacgaagtagaaaattcggacaagagatgaagagggagaagagaagagtgttgcgtgtgattaaccagaatctcgctggtgcaagagtttatccttgtgttgtcaacaagagaggaagcttattgtctaagtaaatttaacaaaatctctaatctctcacaagttagtgttttttttcaatctgattgtgcttatgggttttgattgatttgaatcagtaagcaagaagaagaagaaggatgtcaaaagaagaagtttgattctttgcgtccttcagttacaaggtacataaagcttgaatctttcatttcgttttttgactttaaagaaagaaagatctgagtttgtttttgaatctgcagatctggagttgaggaagagactaacaagaagctgaagccctcagttccaagtgctaacgacttcggtgattgtatatttattgatgaggaggaagctacattgg

SEQ ID NO: 148297 - DNA, 278 bp, Arabidopsis thaliana landsberg
ttgtagctccacaaaaattaatatatatctcatttcaaagtacttcccaaaacatgtaaaaacaatcaaagattctttccatcattcactacacagaaggtaaccaaattctcacaccataatgtacagggtaaacctccaaaagaacataatctctcagtggcccttgcttcgtggatcttcagagtgcatagcgttgtagtcttttgtgtaaacccggtgcctcctctctctcgcatatataacccaaaacaccaaagatgacattacagaagccg

SEQ ID NO: 148298 - DNA, 477 bp, Arabidopsis thaliana landsberg
atctcctctttttaagaatcttgttttgaatcttcatgaaagctttgctcgttaaaaaatcaacaaactcgttgactctgcaaaaccctcatgtgctaagtttcaagtaagtatctctagctcctttatttgctccccagcaaaaaaaaaaggaacatagcatcatcttgtgtttgatccaattcttgaatcttgaaaacaggtttatgttcttttgagctcaatggcggatagatatgagaaccaacctcctgagaagcttcaggtgagagtttccaaagaactcaatactcagatccaaaaatctctcattgtttttctgatttaaaaacaaaacaaattcgtgtttgctctcttgactttaaaaaacaggggaagtatcaagcaatgggtggttgctgtattcttggaattggatctatcgtttcttggaacagtatgctcactatagcagattactactacaaagtttttccg

SEQ ID NO: 148299 - DNA, 173 bp, Arabidopsis thaliana landsberg
gtcgctgctgaattaaaatcttccggcaaatacaaaaagtcagacagaagttaggttcttttattttcaagtacatagtttggtaataactggagtttcggagtttgcttgttgtttatcgaagttgcatgtcaaaagagtttggtgtactatatatatcttgatttaacttg

SEQ ID NO: 148300 - DNA, 262 bp, Arabidopsis thaliana landsberg
aaaagaagagaagaaagaagagaagaagcaagagaagaaagaggaaaagaaagaggagaagaagtaagagaagaaagaagaagaacctaagaaataagtgactcgaattgctattaaaaccctaaatttttgtcatattgatttcataattagaacgctgaatcattgaataatttaagatgtaaaattaattgttcaatacagattgtaataaaagctaagtatttgaaacttttattcttgtgggaacacaaccaaacta

SEQ ID NO: 148301 - DNA, 186 bp, Arabidopsis thaliana landsberg
aagaaaaagagaataaaaggttcgtgtaaagtcgtgtttctaagggctttgcttagattggattgttgaaaacgcgtaaaggtgaagatatgagtggaatggatttagtgtaaatattcgttggttactctcagcttttagtatggaggagtctcgagagatgaagagaaattagtcatttgtttc

SEQ ID NO: 148302 - DNA, 493 bp, Arabidopsis thaliana landsberg
aaacaaaacatttcattcatcaaaacgctaaagtttaaacccctagccatcatcagatcttcagacttctgaggatcatggacaaagtgatgagaatgtcttcagagaaaggagtggtgatcttcacgaagagctcatgttgtctctgctacgccgttcaaatcctgttccgtgaccttagggttcaaccaaccatccacgagatcgacaacgacccggactgccgtgagatcgagaaggctcttctccggctcggctgttccacggcggttccagctgtctttgtcggaggcaagcttgttggctccaccaatgaagtcatgtcccttcaccttagtggctctcttgtcccattgatcaaaccctatcagtccatcctttactagcaaaattaaaccaactcaatatataatatctaattattagctagtgagaataaacacagttacagctagagtgtgagctagctagatattcagtgaggacttcgtct

SEQ ID NO: 148303 - DNA, 386 bp, Arabidopsis thaliana landsberg
gcaattcctcacacattctcaagcttttaaacacctaaatcaagatctttgggattgaaaaacatatctcttataatctacggatgtagatatacataatatttcttttaacgaaaagaaatcaaagacaccagcgctcgcatagatgatttgttttttagaggattaataatcttgtttttgtttgtttggtatataaaaatatacacttatctctggtcccttacaccaatacataccatatataaaaagtaaagtacatacaacaataaataaatataaacatacaatacgaataattgtaatagcttatgaaactcgaagtttatattctgcattccaaataaccgattgatgcactatataaattatgtcgtaatgtaacc

SEQ ID NO: 148304 - DNA, 128 bp, Arabidopsis thaliana landsberg
aaaaaaagctctctctctctcccatcccatcacaatctctccatctccatcttcatctcccatctatgtctcttgtataaagataaacccacaagtcttaaaactattcctttctcttcctctctctc

SEQ ID NO: 148305 - DNA, 233 bp, Arabidopsis thaliana landsberg
cgaaccacgtaagccattggatattgtcctgcttctttgtccggaaaactttgcagtacgtacacaaaagcatacatacatgaacatgttgtgttttacgtttataaggcaaaaatcatggcgtttaaattggaggaaaaaaaaaagttatgaaatattttacggaataacggcggcatcgagaatgtccggatgagtaatcagaagagcttctagttcagctggaggcacct

SEQ ID NO: 148306 - DNA, 440 bp, Arabidopsis thaliana landsberg
cttaacaaagggacacgtgtaccccgatccattagccttgctaattccatggatccaacaaggtacatttttgctctgtgtcaatgatctactcaactaaatgggtaaaatctgattagacaaccgaaatcacgttctttcgcaggttggctgtttctgctgtcgatttaaacttaaagttaatgagatggcgagcattaccgtctcttaacttaaatgtattgtcctctgtcaaatgccttcttcttggagctggtacattgggttgccaagttgctcgtacccttatggtacgtattgaagaaaatgcgagatttgacattattttacaaactcactgattaactaagaactcgtttatcttttattttcttagggttggggaatccgcaatatcacctatgttgactatggaaaagttgccatgtctaatacagtca

SEQ ID NO: 148307 - DNA, 1215 bp, Arabidopsis thaliana landsberg
aaaaagtggcataagtgataaaagttctcttctccgatcgatctccttcaaaatttcaacttcaaattccctctctgagatttcaaaatccgccatggacaaaacacaattgatcttgttaggactaccgattttcctgctttgttccgatctcttcaatctcttcacgcctccaccgccgaaatctcagcaccaatcaccaccgtctatctcagaaaccctagatttccccgcacaggtgaattcgaattcattcctacataacatctcgcacaccacttgtgttctaatcgtttgtctttttagcagaagtcaactggtgttggatatggaaacaccgtagagatcaacttctgcatctcctgctcgtacaagtacttttccgatttctttctaagtcaatggctttaagctttatcatcatttagatttgattcattagtctttgtattgtaggggaactgctgtatcaatgaagaagatgttagagagtgcttttcctggattagatgtagttcttgctaattaccctgcaccaaaacgtattcttgctaaggttgtgccggttgttcaaattgaagttattggtatgatagttgcaggtgatggtatccttcccataattgcaattaagaatcctcgtgcttggttccactccttgagggccaacagatttggatccatggcttccacttggcttatcggaaactttctgcagtcttaccttcaaagctcaggagaaattgaagttcactgcaacggcgaaccggttagtaattaatggtttaagattatttccagatatgtaagatcagtttgtactaaatcctgtgtttctatttcaggtgttctctaaattgaaagaaggtagattcccaggagagatcgagctgagagatctcatcagtaaaactctaacacgaccgagcatactcacaggcagcagctactgaagtagtagtatcagaagatagaaacgctggaacctttccgtgaagttctcacaagtatttttaatacgagatggtggtacaatctcatgtgccaaaagtgtcttctatgtttcagttaatctgttgatgtagcataccttggtttacctagagtgaactcttttgattcaatcattttgcatagacacaaattggaaaataaggtacaaagtcattgccataagaaaaaaataaatgaagttgtatggagattacgagaaaa

SEQ ID NO: 148308 - DNA, 235 bp, Arabidopsis thaliana landsberg
aagaaaagaaaaatatagcaagtacactgcatttcaacactctcatatctctccttcctacttcctcggtttcatcgtccgctgtctcaacaatggcgtcattgtcggtaccttgcgtcaagatctgtgctctgaacaggcgggtcggatctctccctggaatctctactcaaagatggcagccgcaacccaatgggatctcctttccctccgatgtttcttaggtttcttctgc

SEQ ID NO: 148309 - DNA, 346 bp, Arabidopsis thaliana landsberg
ttttgcaaaccgcatgcatgtgatattacaaaattcacggtgaattcgtaatgcgtcttggttcaaaatagaaagagactaaacattgcagatttcaattctcagctacagaaatgagtgtttaacggatacagaaacagctctcacaatcttcattcatttcatttagctactactttccaaaggaacttgaacgcatacctttttcctctccagaagatcatgtttgtctgcactctcgtttgcctcagtatctttctcctgatgctcttcagatatatgttccaattgcgaacaatcaacaggatcaagtcccgatcttttcctctgaggaatcacagtgaag

SEQ ID NO: 148310 - DNA, 378 bp, Arabidopsis thaliana landsberg
tcttctacatcttccaattcatccgtgttgttcttctcttcaccgtcatcatcttgatcggaactggctggtcgtttttgaaacctttcttgcaggagaaagagaagaatgtgttgatcattgtgatcccacttcaggtattagccaacattgcttccattgtcattggtgaaactggaccttttatcaaagattgggttacatggaaccaagtgtttttgcttgtggatatcatctgttgctgtgctattatcttcccgattgtttggtcgattcgatctttgagagaaacctcgaaaaccgatggtaaagctgcgaggaacttgtcgaagctcacgttgtttagacagttctacattgttgtcatcggatatcttt

SEQ ID NO: 148311 - DNA, 111 bp, Arabidopsis thaliana landsberg
ttctatataaatatatatctttagaaaatattataacaacaatgatgagtccaaatccatctttatgatcttacaactacaaaacaatcataacacttcaccccacaaaat

SEQ ID NO: 148312 - DNA, 81 bp, Arabidopsis thaliana landsberg
aatattttcataaaccactgatttgtctatgatcaggttatagtttctttccttcttcttcctatatgtttctgcgacttt

SEQ ID NO: 148313 - DNA, 138 bp, Arabidopsis thaliana landsberg
gaaaaccttcgtgctctttcttcgccgccaagttatatcgacggtgttttcgtatcgacgtcttctcctctctctctctctccccgtcatcacctctttgaatgaacggcggacgcgggaaaaggcctaactcagtaa

SEQ ID NO: 148314 - DNA, 389 bp, Arabidopsis thaliana landsberg
gattcaatcctaataaaaagatagaaattatcctacaagtgacaacagtggaaccaaaataaagaccctaaaaccctataaataatactaccattttagtaaaatcctaatgtagataaacaaccaaatcaaacttgttaacagaaaatacagagaaagattggacttttcaagttacattgacattaatatcggtatgcttgtttcttggatcggaagctaaagaagtctgccatgtattattattgaccggaagagacgagaccgaatggattgtccggtgatcagctgcactagagataggaattgcagcggtaggactcgacaacatgaaatcatgtttgttctttatcggtttctgatcttgatggtcagtgccagctaaaaaa

SEQ ID NO: 148315 - DNA, 251 bp, Arabidopsis thaliana landsberg
agacagcaacagcagactcaggagaagacaagacatccatcaccagagacatggcgaaagccagttccccagaaactggattcaccaaatggaacagggattcgtcacggaaaagcagcttctgctcttgagctagctcaagcctattctcctttctctgaccctaaatctggaattggaagcagcaacagttttaacaaaagccgcaacaaccaaacgcagcagcaacccttctctcggttggtagggtc

SEQ ID NO: 148316 - DNA, 205 bp, Arabidopsis thaliana landsberg
aaaaaagaaaaaaaaaaaaaaaaaaaaaaaaaaaaaaaaaaaataaaaaaaaaataaaaataaaaaaaaaaaaaaaaaaaaaaaaggaagagcaacaaaagaaaaaaaaaaaaaaaaaaaaaaaaaaaaaaaaaaaaaaataaaaaaaaaaaaaaaaaaaagaaaaaaaaaaaaaaaaaaaaaaaaaaaaaaaaaaaaaaaataa

SEQ ID NO: 148317 - DNA, 235 bp, Arabidopsis thaliana landsberg
gtcagcgagtagcttgtggtatgttttggggtatatggaggcaaagaagaggctgaagagaggagatagagtgttcatgatcagctttggggcaggtttcaagtgcaatagttgcgtttgggaagttgtgagagatcttaacgttggagaagctgtagggaatgtgtggaatcattgcattaatcaatacccaccaaaatcgattttgaatccgtttttcgagaagtatggttgg

SEQ ID NO: 148318 - DNA, 190 bp, Arabidopsis thaliana landsberg
aaaaaaaacgagtggtgcatatgtagaagatgttttttcgcggtatttttgactgcacccattgttttcttcagtatttaggttttgtaacgttgtcttgtgttaagatttgcacagacatacccaacttctgtatctttttttttttacattgtttgtacttaggaacaagtataaaaatgggaagaaa

SEQ ID NO: 148319 - DNA, 410 bp, Arabidopsis thaliana landsberg
cacaaatttatatatgtgtgtgaaactttaatttaaaaatccatcgcactgagcaaaataaaatcagaaactaaaagtttgtcatttaagataaattgaattaaggaaaatatttttttaataattgaaactccggtggaaatcaggaggagcgacatctccatgctgaaactccgacgagttctgtcctttgccaacataggagaagtgagttatgtttcttctcgacgtgaaagcctctcactggcgtccgttggactaaacactcggcttgagactccgtgaagttactgtgcgtcaccggtgagaaacccatctgtagaaacatcgcttgccacgtcatcatcggcctttctatcggacggctacgatccaacaccagcttctctatctccggctgtataagaaac

SEQ ID NO: 148320 - DNA, 378 bp, Arabidopsis thaliana landsberg
ggatttgacatccaatattcgtgattaagcatacagtaatgctacatgtctactacgaaatctccggccttctgacgatggaggccttcactgttctcagaagtccgaccaactaactcttacccacccataaacacaaacattttcgggaggattggccaaaaagttaattatatggatctatcaatagttagaaagagagacattgtaccctatctggaatatgccgaggcactggagctacggtaacatatctctgtgggtttaacctaagtgaactcacggaccggtccatagatgaggacgattggtggaaacttgcaaaacgattgatcactgcaaacctctctagatcctggacttagactctcaagtctg

SEQ ID NO: 148321 - DNA, 643 bp, Arabidopsis thaliana landsberg
tctctcaaatctcaaatctcaaaatctcaatttcttcaacaatgtcatcgaagaacggagttgttcgtagctgtttaggatcaatggacgacatcaaaaaagtcttccaacgattcgacaaaaacggcgacgggaaaatctccgtcgacgagctcaaagaagtgatccgcgctctctcaccaacagcatcaccagaagaaacagtaacgatgatgaaacaattcgatctagacggtaacggattcatagatctggacgaattcgtcgcgcttttccaaatcggaatcggaggaggaggtaataatcgaaacgacgtaagcgatttgaaagaagcgtttgagttatatgatttggatggtaatggaaggatctcggcgaaagagcttcattcagtgatgaagaatttgggtgagaagtgctctgttcaagattgtaagaagatgattagtaaagttgatattgatggtgatggttgcgttaattttgatgagtttaagaagatgatgagtaatggtggtggtgcttgaggatttggaagatttcgccggagatctagcttagtcgacggtgatgattcgtattaacagattaattttagtgacggcgattaaaaaccctagaagtatgtggtgattgaggaata

SEQ ID NO: 148322 - DNA, 311 bp, Arabidopsis thaliana landsberg
tttgtttaaagtacggaatttgatgatcaaattttttgttgttgatcaaaacgtagaaacacaaactataaatcgatcgcccccgtgagtagtatgtattattattacaaaagtaaatgattttgcagacttgcagttattcatttataagcgaaacgttatcttatgcaatgtttacatttgcaacaccaattagcttcttttttttacagttgagacttgagagacacattaaagcttgtcatcgttcactggagagagtagagtgtgtgagagacaaagtgacctaacttcactgcaacagtagtcgg

SEQ ID NO: 148323 - DNA, 814 bp, Arabidopsis thaliana landsberg
catacattgttggacagattgtcccatagagcgccaaatagtgaaactgccatcacaactttcagcttcttcttctcctgaggcgggtaagacacatcatctctgctcagaccagggctcgagaactctggcatcaagttcaatctcaacatcaacttcagcaacaacaacatcaaacccttatggtctctcttcaggatgtgaatacttcatagtgacaatagcaatgcttcctgacactgctattcatcaacaagcttcctgatccttttgcttgttcctaaggcagcagatagacgtgatggaagaaaccccctccccccaaaaaagaacaaaaaatgtaaatactttgaattcaaataacacaatctaaaaccagacagcccctttatatgatttgtgggtttcatttgtctcttctttaactttcttttattttcatatctttcttctttatgtacagctgatgatcactgatcttagtttaatcttttctccttgtattgtacatactctgctataatttgaatgctgtaataaaaagattactaaatattacgagaaaataaaaaagttttaggataaataatggaatcttttgcctctgccaactttggtttatattgggaataatatacagaaattaatcatcaaaacatgtttcttcaaatccctgtgggggttgtagttaccgagtgataattttgatttacaagaaaaaaaaaaacagaaaagctactagtccaggttcctatacatgccaaatccagaaaagaaaggcggtatctataaattatctattatatgcatcacc

SEQ ID NO: 148324 - DNA, 92 bp, Arabidopsis thaliana landsberg
caataacgctccacccgctactttgcaaggagccgatgatccgtctagtaataaaccgtccaagaaagctgctagcgcgggtttgaactcct

SEQ ID NO: 148325 - DNA, 594 bp, Arabidopsis thaliana landsberg
cagcagctgaagttacacaacgatcatgggaagactcagttctaaaaagcgaaaccccggtgttagtagaattctacacgagttggtgcggtccatgtcggatggtccacaggataatagacgaaatagcaggggactatgctggaaaactaaactgctatctccttaatgcagacaatgacttgccggtggctgaagagtacgagataaaggctgtgccggtagttctgctcttcaagaacggggagaaacgagagtcaatcatgggtacaatgcctaaagagttctatatttccgccatctgaaagagtcttgaactcatgaagaaggtaacaatcgttgatgagaactctcactaccactttgattaaaaatattgttggaagattatcatcatcgctccattgcgatatggttgatgtctttgtttcttcttttattctctgtgaatataactgttgggtttgtggaaagatagctcaggaagtattgtgaatacataaatattccttcttcttattgatgattttagtgttctatattttcttttctttgaacttgtttttatagttactactgttgttgcctttaaga

SEQ ID NO: 148326 - DNA, 557 bp, Arabidopsis thaliana landsberg
gtacaacgttccagaaggtacaaaaacgctagctttggtggtggaagacatcgatgcgcctgatcctagtggcccgctggtgccatggacggtgtgggttgtcgtcgacataccaccagagatgaaaggcctaccggaaggatattccggcaatgaggatcagactaccggtattcgggaagggaacaacgatcacaagattccgggatggcgtggacctctcttacctagtcacggtcaccgttttcagttcaagctttttgctctcgatgataaacccaagattggtcacacggtactacatcgttttattattttcctatctgatttgaatgatatgtagtactttttttttataaatagttgttctgaatatgagctaggtgacgaaagagagattgctgatcgcaattgaagggcacgtgctaggagaagccatcttgacgtgtttggcctaaaatatgtcgtcgttatagtcataacaccgttggatatgtatcatagttaataattccatatcacgtattgaggattatcaatgaaataattctagtttc

SEQ ID NO: 148327 - DNA, 461 bp, Arabidopsis thaliana landsberg
gaatgcaaatagaacaaaagatttctaacttcttcttttcttcatcatcgacaccatcgtcaccaccaccactcatcagtctctgcctctttttggctttctcagcttcggtcaaagtcacatcagcctgaatcgcacggatcgcagcaacgagaactgaaccggaagattcaggtccggagattccggtacccggagcggcggagggaacaacaacgccggagcaatcgggacactcccagtctccagtggaagaagcgagtgattcaggaaggagacacgacacgtgccatggagtgacgcacgtgccacacgtgagagtctcttctgacggaggattcacctggcaccgcatacatacaccgtctccgtcgcaaggaagctgagtttgaatcgccattgttgaaacgagtgagtgagagagagatttagagagaaaatggtgttgtcgagatttgtga

SEQ ID NO: 148328 - DNA, 465 bp, Arabidopsis thaliana landsberg
cctaaggtcccaactccttcggtcccaagtccatatgttccaactccttcggtcccaagtccttccgtaccaactccttcggtcccaagtccttccgtaccaagtcctaaccctacgccagtcattcctccgagaacccctggttcatccggaaactgtcctatcgatgctctcagactcggtgtatgtgcgaatgtgctaagcggtctacttaacgtgcagttgggacagccatcacctcaaccatgctgctcactcattcaaggtttggttgaccttgacgctgcggtttgcctatgcactgctcttagggctaacgttcttggcatcaagcttaacgttcctatatcactcagtgttcttctcaacgtgtgcaacagaaggcttcagctaatttccaatgtgcttgagggatataattaacatacgagcacacagttacatcttaaataacacagtttgaat

SEQ ID NO: 148329 - DNA, 407 bp, Arabidopsis thaliana landsberg
gcttaaacagtgactcagtaagtaataccaaaagacataagaacattgtttggtgtactgagtaaccatattcttcagtttatcaaattcatgaacttcaacataattgaaaatcagcatatacaaaaaccatttttttaagaaacttgaaactttaaagatagagattggagaaagatgataaaagaattgagaattaccagcaaaacagagctagaatttatcaatctcaacgccatctcttaaaacctcataagcatctcggcttctgcttttcttcatccctgctgtgaaatgtacctttgaagaatctgcagaaatacttgtgactttaacccatatcattacttttgtcttcatcccttcaacatcagctagctttcccttctcgagaaatccggtaactg

SEQ ID NO: 148330 - DNA, 695 bp, Arabidopsis thaliana landsberg
gctccatacactaaaaggagaactagagccgttcgacttcttcgaagaacccacctcaagtatcatctcagaggtttcacaactctctgtaagatcctctcttacacatctgacctcctctgtttcaggttcacctggttcatgggttacaataactcccattgctctgtaaccaaccggaggattaggtagccagaaataaccaccaccatttttctctgaatctgcactccaaactaaagaataactcacaggctttttcaagggcgggaaatcatcagcattgacggctttgctagtccgagctgcaagtacataacctctcaagggctgatcggttggctggcaatagtgaccaaggcaatggaatccttctggaatgtcatcggctctgtaaaatgtagcacgttttgatttgtcgtgtgatgaatcagagctccaaactcgatggaacttggtgattttcaccacttctatttctcctaggctaattcttcctgtggcaaaacctttacctgcaaagagattgacagtaacagaaaagctcatcaatatctgcatcaacgaactaaaaacacttatatatataccattgtttgattgaaacagtttaacatgaaggcgctcaacttgatgcattcaaaagtacaaattcatcagcttcaaattcattaccaataccgagatttatttcc

SEQ ID NO: 148331 - DNA, 79 bp, Arabidopsis thaliana landsberg
aaaaaaaaaaaaaaaaaaaaaaaaaaaaataaaaaaaaaaaaaaacaaaaaaaaaaaaaaaaaaaaaaaaaaaaaaaaa

SEQ ID NO: 148332 - DNA, 418 bp, Arabidopsis thaliana landsberg
ttgatcactacagacattcattggcatagcctacagatatatacacataatacgattcaaatcaaaacaaacaacacaaagaaataaacaattcaacagtcaaagatgagaacaataacaagttaagtccttcacagagaatgatcacagcagaaacatcaaagatgaagagaactcacttcatcaaccttccagtctccttcctcatacttgtaccatctcacaatcccttcatcgttttcagtcctctgacacatcacacacgtcttgtgatccatgcaagtcaagaatttctttagccttgctgttttctccattatcgtcttatcgagctctctaacaatcaccttctgctgaggctgccaaccgctgtactccactaggtgagagtgtgatatgttgagcacttcaaggcttg

SEQ ID NO: 148333 - DNA, 702 bp, Arabidopsis thaliana landsberg
tacgacacacaaaaacaacaatggagctactcacaagcttgaccaactggttaactccgacgactctcttcctcctcctcaatttcacgatcgccaccattttcatcaccaaccggttcagttccggttcaagaaaacacaaccaacatcaagatggttacgggtcgtcgggtcatgaccaaaatcaggcacggtttggcagacctccttcgctcatagacagagtaaagtccatcaacttccatctgtacaattctccttcaccagaatccgagatccactactccgggtcggatcctaacccgaacccacctccttctctcttgcaacgggtcaaatccatcaacatgccttacttcaagttcccacaacacaattctgaaggagattacgctgcttacgagctcatgacccaacccgacgagactaaccgggtcgacccgatcgacaagatcccggaggatgacgtcacgaccgaacctagattcggagctccatcactcttgcagcgggtgaaatccataaagcttccttctttatacagatccgacccagatccaacaccagaagtgcaaacacatacgaggacgaagtcggagtcgagtaaaccggcgacgaagaggaagaagaaagctacaaagaagatgatgaaatctgctagcgagagacacatcggccgggaagaggaggagacagttgagg

SEQ ID NO: 148334 - DNA, 360 bp, Arabidopsis thaliana landsberg
tcgatttttggcgttctccatctgtaatgtaatgtttctgcaaaaacaagtgacaataaaaactttttcatggatctgagattttctccaaatctatatttgtgattgtttcgtgtagtttttctcttaaagatgtgttctttaagctctctcgtgctcaatcttacgtttccctttggtttgatttcgtgtttttgttattcgatttcacctttaacttttatctaatctcttgattttgattttgtaaattgtaaaaagtttctggtgattctcttagcgaatttgggaaactttatctgtatttttctgtttcgccgcagatttaggatcctgaattaatgaatttgtgggcttcac

SEQ ID NO: 148335 - DNA, 350 bp, Arabidopsis thaliana landsberg
cttaaaaagagctctgctttgagatcttagccattaagttctcttgatgatgtctggttcaagattagtctctagactaataataatcttctcaataatctccacatctttcttcaccgttgaatcgattcgattactccccgattcgttcgaagatgcatcttcagatttcatggaagctccagcatatcaaaacggtcttgaatgctctgttttagccaaaaacagactcttgttagcttgtgatccatcagctgttcatatagctatgactctagatccagcttacttgcgtggcacggtatctgcagtacattccatcctcaaacacacttcttgccctgaaaaca

SEQ ID NO: 148336 - DNA, 654 bp, Arabidopsis thaliana landsberg
tactcgatctcaaccgtccgatcatccatcttgccatcaccgttcaccaatcttcttcgtctcctctctctttctctctttttgctgtttctagctcctctctctctggatctcgccggcgaaccgtttctcttgggtggtgagtgttgcttcttatttttaagaatctttttcttttatttccatcgaatttcgtttttttgagtttgatttttggcctgtggaattctcgatgtttctacattgatcgtctggtttcgaatcgtgttttactggtacaattttgattccatctccgtatcttatggattcgaagaactttgtgttttttttttctttcttcattgatgctactttgctagggtttacacttttttcttccatggtaaaaaaatttgagcaaagttgttgagattcttctagactgttttcaattttacgtttcacaaagatttttttagatgatttgtttctaatgaaatggcattgtttgtgttctgtttccatatgtgtagattttgaaaatatgtttgtgatgattgtgcagtaaacagtagcaatcaagctatagaatctcagatatcgctgaattagctgttggattttatccgccttttcttcgttatccggggctcgggtataaggtttcatcgt

SEQ ID NO: 148337 - DNA, 324 bp, Arabidopsis thaliana landsberg
gggacttggcccttttaaaacacctaatttcatgccttttcccgctaaacttgccactttctcctaaccaactcatttcttcatataaaaccaacaacatcacacaaaaagagccctcatttattcacctttcttttcccttaaatataatctttataaaaaaaattaaaaattaaaaaaaggaagtaaattgaaaaaacaaaattggtcccctgtcttcttttgttcactggacccttttcttggcttcgctaaatcatactatctctatcttctcaccgacactttcttcttctttgatcatatcatatttatcttcactac

SEQ ID NO: 148338 - DNA, 664 bp, Arabidopsis thaliana landsberg
caagaagccaaaataaaaccattgaagctagcagcagccgaagaagcggtcacattttccggcaaaacagacagatcgaccagtgaaagctcctatctgtaagcattgcatgttcccaagctctaattcaatgaaatgttgtagattcaacaagtcatgtaaaatgtttccttaataagtcggtgatgtctcatggatcttgatcggttgtgtttgtgtagttttctcctctcaattttgcataaagagctagaattgaaaggagagatttgacctaatccctgtttcttgaataatcttgtttcttgatttagcatagttgaccaaacaagtcaaaggtgtttatgtctaacaatatggctctttatttttaactaacgtagtgccaagatctgatctttagaattctcaaggactctgttttgtgtgtttctctagtgtttgttgattatatataaaggatcatatgaacaaccatgagctctaaattattgttcatattttctccagcttcctgaggccttgtgatctcatgttacaaatggctagtactgtgaggagcattcatggtaagagatctaatccccctctgagtttactggaaatggaggaagtaaaagaaaatatcttcatgatgaaacagatcaaaatgttattgcttcag

SEQ ID NO: 148339 - DNA, 173 bp, Arabidopsis thaliana landsberg
ctcagagacaagcaactgcagaactaaggttgctagccaagcacaacatggataatcggatagtcattgggaactctggagcaatcgtcttattggtggaactactttactcaactgactcagctacacaggaaaacgctgttaccgcacttctcaacttatctatcaatgac

SEQ ID NO: 148340 - DNA, 372 bp, Arabidopsis thaliana landsberg
aaaccactcattttcaatgacctcagcaaatgtaatcctctgcccaatataaaaaatcagtgtaagccttcagatctactcaatcctatagaagcttttgcctcttcaaaggagagatcctctaatataaattatataatagggtaagaaaaatataccgttgctggattgggatccagaattcttttgattaacttcttagcacttgcagagaaccagggagggcaagtaaattctgctttgaatatctgtaattatgaagaaagaaaatcaggtggcttttatgctatatacgtctcatacaaaaatgacagaggcttttatacagccacccgaatgcacctagaccttgaagccaatctgatagcatgt

SEQ ID NO: 148341 - DNA, 131 bp, Arabidopsis thaliana landsberg
atttgtacatttttcttggggtgttctattccatctcttttctgtctatatactcaatacaacactaatcgttactattcatgtataataatttacttaccaattgatgttgttgaaaaagtaactgtcaa

SEQ ID NO: 148342 - DNA, 472 bp, Arabidopsis thaliana landsberg
aacacaggaagccagttccaggagggggaacaaccaatgcaaagccttgacacaatcatgcaaatcatctctgaagccacaattcccgctgttcgaaaccgttgcctagacgatttcatgactgacaatcttgatcttgacgatgacatggatgactttgattctgaatctgaaatcgacattgacagtagcggagagatagtttacgctctctaataaaaagccttttttaacaaccaaaacacttctctatctgttgtaagaccagtagtgttctgatcctctggttttaaattctaccaatttttgtattgtctctgtttgtttcttgttttcttcatgcacacatatatcatatatgtaatgtaaaatatcatctgtgtatatatacatatatatatatatcatgtatatattttccaatagcacacaagcaaattagcagttaaaacagttgaagcaagttgaggtt

SEQ ID NO: 148343 - DNA, 143 bp, Arabidopsis thaliana landsberg
ctcccacagtttgttgcaagcttctgagagacctgagagctctagttgtgagggttctaggtttccataagtttcaacttcgtctgagtagtgttgttcacctgctgggcgtttgtaatcttgccattgctcctaatggacct

SEQ ID NO: 148344 - DNA, 182 bp, Arabidopsis thaliana landsberg
gaaataactcccgagaatgtcaagttcttgttgttttgttccatagctttctccttctcaatctgaccatatgcatacttaaaaatctggctttgggtatgtagttgtttaccctttggagcttgtggcttcttcccaggtttactaccggttcctacattgaatccttcgttgttactcgg

SEQ ID NO: 148345 - DNA, 371 bp, Arabidopsis thaliana landsberg
aaaaacaagaaaatatactatagccccaaaatatgtttgcattattataacgggcctattataacacatcaatttagccccaaaaaagaatttcgatgaagaagaacaagtcttgagttaagaaaatacataaccaaacctttaagaaataagatgtttttcacccaacaaatttcaagcgttattacctccaaactctctgttcaagtaatccacaaaacgtctctttgcactgtctgcatcagttggtaacggtggaccgcttagactcgattgacccatcaatttaacaaacgttcttcgaagcctccttagctccggtagcccaatcggtctgcagatttcaatcggaggtagttcattgccaagag

SEQ ID NO: 148346 - DNA, 405 bp, Arabidopsis thaliana landsberg
ctttgctcttcttgttgcccctcttccaatggtcgcagcctctttatacatcgatggctgtaaatctcttaccaattccactcataacccaaccgaaaacttcaagtcttggaaatggctagatgcagcgaaacaggtctttactttgcacttgttgggtttcattgtcacgctgctaccttatttcatctgtcaagtaccgggccaacattctccaacaaaccgctccatcatgtggggcactacctcttcgtcgcttctccttataacctttgtcacaatgcctggttgctctccgttctcctctcgactccatggaaccaactgggccatcttgaaatcagtgaccatctcagctgccttcatcggcctatgcctcatgtccataatcaattttgccaccgc

SEQ ID NO: 148347 - DNA, 88 bp, Arabidopsis thaliana landsberg
ctaggagcttcaaaatctctgatttctttttattatttttcaaattttcttttcgatcaaagtcaaacatgagtagtgatcctcatcg

SEQ ID NO: 148348 - DNA, 1358 bp, Arabidopsis thaliana landsberg
aaaactgtttggccaacgttgctacttgcccctgtctttaaaaaaagtgctggctattttttgttccattagtgttgcttgaaatacttgggcaattcttctactcagagataccacgacatgatcttttgttgtagacactcccctttcagtcggtgcattgtttcaggattttctgcggaaagccacttgtcatcaaatcttcccttgtgtaatccattatttatatagaaataaattaatcaacctcttcgtttttgcagtgcagatcagttagtatccatgagatttcttgtttgctattgtcggggaactatattgccattgcgttagtcgaccaggacaagctaaggttgcttatctcttttgttcttcttctcatatattcgctctagtcagatcccttcatcaaaaaatttggatgtgtgctgcttctttcatgttgttcacaaaatttgctcattgacagtcttagcctttttccgaaaatgttattttcccttgattaagggtgtatgtgcctttcttgtttcaagtgcttttgtgcaagagtatgataaagaagttgcatagagttcatgctcgtcttttactgttgcagaaagtcttggttggaggaagtgcttgtctctggtcttcactccagcaattcttgttacactggtgagaattgtcccttagccttagacttttctcttccaaaatggtaaccccagtttcacatccttgattatatcttatgttgataatctctgttataatcattggaactccgggaacttatgaaaccaagatcagacaaaaggaccgttctttaactaacgaaagcttaaatctagaagcacaaacggtaaagactacattagcaaaatttcttacatcaacttgtttccttcatgttttccaataggtcactatatcgtgatatgtggctatgatgctgtagggatgaggtcgagatcaaagatcccgcagttccaagtaatgttgtgttatatctcattgctccaatacttacaaatcggtgctctacagcattttcttggaaatgttatatctggttgtcatgttcatctatcagcaatacacattgaaactgtttagtaatgagttaaaatctaaacataatgggaagagagatttaggttggtttatactaagatattccatcttttagatgcgagttctcattactatttaagaagagagattcgctaagtaagaaagagcacgtatgcatcatcttggaactagtaagaattgacagggaaatgttttgcaggatacatgagaggatctcgtcaaaatgcctggagaatgcccggaaatcgtttggcacagacgaagatcttctcctg

SEQ ID NO: 148349 - DNA, 566 bp, Arabidopsis thaliana landsberg
atagcaaaattgtgttttttaattttgtaatcaagttcaagcaccttaccttaaaaaattatactataaaagacacatctttttttttctttttcttttttacagtcttaattgttttattttagttctcacaccacgctataatacattttattttatatttttattcatattttggtacatttcccttcattctcttaacttgttaataatgacgatcataattggaagaaaatcttgcctcgagatatttaaccacgttcacatccagctgaaacgcttttgctaaaatctccggcataatcgaaggcttcgatccaaaaacggcgtctgcgattgtgattgtaccgggattttggctaccaagaccagcaaacgcaactgcgttcgtcctcccaacgttcacttgaaaatgtatcattcctatgggaaacacgaaaacgtctcccgggtaaagaacctttgagaacaatctgttgttgtcttggttcgatgttacaaaaccgactaagagtgttccttcgacaaccacgaggatctcagtggctcgtgggtgcgtgtgtggc

SEQ ID NO: 148350 - DNA, 385 bp, Arabidopsis thaliana landsberg
agtgacttgatttttatcaaacgatatacatgcaacgtaaagattaacgcaaacaatcgaaactttaatcctaatcacctgtttagaactcgttacaaataactcataaaaccaggttgttttaaggctcgcttggaatgacattaaagaaatggtagatctcttcactgtcaactactccgatctctgtggaacaagctgagcaaaagaccgggttaactttttcgctatcttcagaaccagtttcttgcatctcggaatctctccttcttttaccaacctttaagggcattgtattctgttgcaaaactgtgtctgtacctactttgcaattgaccacaaagactgctctgtactgtgtcacatactgctcgtgcctgcaaaa

SEQ ID NO: 148351 - DNA, 358 bp, Arabidopsis thaliana landsberg
ccaaattttgattcttatttgtccgataaaaataaattaatttcattgttcatgccccttaaaaatagagtagggcatatgagaagtagtacatggattacgaaacgtaataataagagaagactcaagataaaattacttaattaattagaggttagagcagctaaactacaagaacaaataaaatttttagccattatcaattaatgaccatatataaatatacctgatacattttcatgatgttgaagtttttttttctttttgaatatcttgaagtttaatcccaaaagcccaatatatcccaaaggcggaacccacaccagattaaaatcatcttttttggagaaaagatccc

SEQ ID NO: 148352 - DNA, 360 bp, Arabidopsis thaliana landsberg
atatttttgtaccttcatttgtttttatgtcttccttgaagaaatttttaaccaatgttatatttactgtatttatctatatatgtttgaccaccttttttccttcgtatgaatcgatcatattgtatataatatattaaaaaaaaatcaaatttatttagtatactagacttctaggttttttggagcacatggaaaaagcaagcacagattcacaacagagtaggtatgacgaaactggagaatcttttcgtcaaatgtgaagacctatttctgttaatgtaaataaatacactatttgttattagtaaatgtgaaggacgaaatagtgcttgagaatgaggtaatactattaccgtg

SEQ ID NO: 148353 - DNA, 188 bp, Arabidopsis thaliana landsberg
aaacgaaataagtaattaatgatcttcattttcctcacatacaatttaattaatctacacaaacgggcttctcctgatcacatgatcgatcattcaacaatagaaatgcctaacgcttcattgatacccgttgaaactaaacaacaagatatgagaaagtgaagataaaacaccaaaaagaaagaaca

SEQ ID NO: 148354 - DNA, 70 bp, Arabidopsis thaliana landsberg
cggtggtggcactaatgtccggcgagagagctcatgcagcagtggactgctcatcgttgatactgaacag

SEQ ID NO: 148355 - DNA, 239 bp, Arabidopsis thaliana landsberg
caattcctgataaaacatacacaaaacaataatcttaatttcaagaaactactactattgctaaaaatcagagactttcgctaatggctatattcggtaaactgacaaagctcaagtctgccataaagaaatggccttccttgaccaagaaccaccattcaaccatgtgtaccgcctctaccgccgtatctgaggtctcaaagtgcgaggatctccatgtggtttacgtcggaaagtca

SEQ ID NO: 148356 - DNA, 528 bp, Arabidopsis thaliana landsberg
ttgtgttacaagttacatataccactttataaaattctatgaagaactataaacacataaagtgggagacagttttacattgtttacacattttcagattcttccaaactccgatccgcaagctttcttgagtgactcatttccgctttccggaaccgatagtaagcatatcgaagcttctcaggccgtcatcacgcccaagccttgcagataacttagtttcttgcaccggttgaatcttttgggcactgcttgaaaaaagtttacttgagcggttctcactcagctcacctgatgagccaggttggctgctagacatcactgccatctttgtagcaatctcatttcgggttttttcagacacttgctgtgcattgcaacaaacatcaaaatgattctcatgattgataccaaccggaaaactttaaagtcatctacacaacagaaagatagcaaacaccactaccatttttgaagatcatagaaaaatggcttcgggcgaatgccatgacttggtacatttcgtct

SEQ ID NO: 148357 - DNA, 298 bp, Arabidopsis thaliana landsberg
tgacaggggtggatcattggtgaattcttgaggtccaggagaatctgtcattttcaacacattgtgtggaatcatctgagaggtttggtaaatagatagaacaaggatctatgaagatttgagttgaagaatgggctattgttccatgaagtcctcttggattggtgtatctttaatttaattaaaactcaagaaattgtttaattatatcatgtgctcatatgatggattgatgagcgtggtaaggtatcaaatgtaaggttgaaatcagcagatagatccttgtcaagatggaaac

SEQ ID NO: 148358 - DNA, 192 bp, Arabidopsis thaliana landsberg
aaacccacacaacattcaattgaaattgcgactttcgatttaaaactctctttaactacaatcgctatccacgaacaatctgattgattctctctctgagatctctctatctatctatctatctctcttctcttaccttttcaatacgatttcggattctgagctgcgatgcttctttgattcacttgagag

SEQ ID NO: 148359 - DNA, 539 bp, Arabidopsis thaliana landsberg
cgaagatgatcgtgcaagaccgaagcgataagtctcttgcagaaccaacttttaagatttaaggttgcttgtcccttttttggctccttaattcttggattgatagagaaaatggatattgggattagaaacggatggagaactccgaagacttcagaaagctctggatctaatttcctgggtttgcttagatcctaccctaacaccatccccaggtgtttatactttcttagtttatcttcttcttttggtttattggatttgataggtcaggagctctgtttcagggagagaattcatatgggtaatgttcatagtggcaaaagagcaatggtgatttctagtttaaagaaagcgaatatctctgcttcgaggaagcagagaattaagctagagattaatggagaaaaggagctgactttcagtgagtttttgaaacacccatctggcatggaggctgtgatcaacgcaaaggctttgcagagttaccatttagttgatgatagtgatgatacttacaggttctttctttaactctc

SEQ ID NO: 148360 - DNA, 355 bp, Arabidopsis thaliana landsberg
gctgataagttgttttggaagttatgcgacgtcgtttttaagattgagaaagttcctcatgagcatctgcattctgattatgcttatgaagaaactgatgtttatatctttaggaagaaggtgaagaagaatgaagctgaatcagtgtcatgaagctagttttggttctgtaatgttgttgttacattgatatgtaatttgtttcttgttatagaattcgaattatctcaactatttatattttcttagatattggctactaaaagatgacaaaggctgaaatcaaatttttgtaacgatttttttaagaagtatacaagttttgttgtgtgtttttgaaatatatacaaagtaa

SEQ ID NO: 148361 - DNA, 325 bp, Arabidopsis thaliana landsberg
tttaaacagcttcattaatcgctaatgctttatttttgtcgacattcgttcatttaataattaattaatgcagctttcttttattcatacaaataatataaaatcatgaaacgacgaagttagagacacagagcagaaaaagcttacactcatatcactgagcttctttggcttcgccaatcgccattgttgtttcgaaatctaattactgcttctcaaaacccttttgttggtttttgatatcgatgtcgatcattgcttcaatctctttcctttcgatctgaatcatctgatctctgatcttcttcgagatctcactaatagg

SEQ ID NO: 148362 - DNA, 117 bp, Arabidopsis thaliana landsberg
tcctcagctttttttgtagaaactgcggaaagatggccaaagtgttgctctaaggtctcaaaacgaaaagcttacaccaaggaagacgaatatatatgtggtggatacactaggtta

SEQ ID NO: 148363 - DNA, 77 bp, Arabidopsis thaliana landsberg
actttgctgcttgttctgaaaatcgcttcccgggctgtctttgtcgaagggtatgcaagtcacctccaggacagaac

SEQ ID NO: 148364 - DNA, 491 bp, Arabidopsis thaliana landsberg
ctacccaaccaaagtttctcatcattcatttcagatcagccatggaggacgaggtaatcttacatcttttcgtatatatttattataaacacgatttagctctgtttttccgccggagattataatacttcggagacctttattcgagatctgattgatcatttcttatatgcctacgttaactttgatacccattagatttctttttgatggaaatcgatttgatgtgaaattagctgctcgttactctggctttttccactcatcctctattgatgatctggtggagtgtttgtatagagaagaaagacatatgagttcattagaattgtagaaaagtgatggaagattttccgtcaaatcgttttctcaaaggcgtggtggtctattgttgctcgactggaattgtataatagagtttctctgtcaaaccattttggcatttttttagtagacttgggaactgaaagagaagaaaagatggatctttg

SEQ ID NO: 148365 - DNA, 388 bp, Arabidopsis thaliana landsberg
cgaatgaaattcggtaaccttcttgatgcttggcatcctagtgatgtgtctgtccacactatcctttccccttggaagactgtttttgatgctgcaagctgggagcagcttatgcgtcgttacatagttcctaaattacaggtggccttgcaagagttccagataaacccagcagatcagaacttagacgagttcaatttggttatggggtgggtatcttcagtacccattcatctaatgactgatttgatggagagattctttttccccaagtggctggatgttttatatcactggttgtgttcagaaccaaagttcgatgagataatgaaatggtttttgggttggaaaggaacattcccacaggagctttctgcaaacaggagga

SEQ ID NO: 148366 - DNA, 302 bp, Arabidopsis thaliana landsberg
agtttgcatggcctgtaactaatatataactagagaactatattaaaaaaaactcaaatctcactaacggcgacatagaaacaccgtctctaaatcagaaggaggcgtaaaaaactctctaacgacgttactccgacattttaacgccggccgtcgttttctcggtgctggtggacattccaataactccggtatcttcgtttccttcgctgtcggagtcgtcgaacactcttcctcttggttgtagcaatcttcttcaacttcggtcactatctccggcggcgctctgagtttcgtcttga

SEQ ID NO: 148367 - DNA, 306 bp, Arabidopsis thaliana landsberg
ctgtctctgccattaaaccttctctcaagaacaaaaaagaaagaaagccctcacattgctttgtccaaagagagtcttagaatctcaaacctatctcttagggagaaaccctgattctatattcttacttgctttcctttaagtttctgtctcgtccagagggacaaagccccccaattccagtcaatttcctttgtttttgatggattgagcttctttctgctggagaaagaaaaagaaaagagctacacatacacttgcagagaagaagcaacaatgagagaagagaaatccaagactaataag

SEQ ID NO: 148368 - DNA, 84 bp, Arabidopsis thaliana landsberg
gatgtgtttcaacccatctcaccatgtccatctctgcaccaaacactgagtcggttggcattttcccagtcacaatctccatca

SEQ ID NO: 148369 - DNA, 383 bp, Arabidopsis thaliana landsberg
gtttttgtgtggtgaagtcaatgacgctgatggcgtcatgtgtatatcgtaaatcttaatttttttatacttcaaaaaaatcaaattcatttgcatttaataaaattattagtatgaaataaacgcgttgacaattgttatgtccacttaattcgtttgatcaaattacctaggacaaatttcgaaattttactatgcgttaagtttcttgcatattcagtgaaaatgaagcaaagtagcatactagtacaactctatttccctatagcataaagtttaatggacatacgactcatccaagtttaagaaaaaaatcaagaaatgatatgtatttgaattttgggaattatcaacattgtgatattgttttttttttttctttt

SEQ ID NO: 148370 - DNA, 287 bp, Arabidopsis thaliana landsberg
acaatatatcatattacaccacaccatcgacgacgagaacccaaaaataaaataaaaacaatacttttacattatatatatctttggactgctacgacaagagatgtttgtttcacaagtcttacccttcctcttgatcaacgagcaactatgagctcttcaatgaaatcaccttcacctgattcagatgggattaagatatcatcgtcggcagtgaagttatagctctctccaatggctcttagaagctgataaacttcaaacatggttggcctctgctttgctat

SEQ ID NO: 148371 - DNA, 680 bp, Arabidopsis thaliana landsberg
aattctctgctcaccaaacttggatctcgcaccagtttctttgtttcaggtaacattcattgcaatattgcatcatcactcacatattcctccgattttcatttatacatcctcgttgttagcttcatcaatctcatcatttcattagaaaccgatcaacagagtcgtttttgtgtgtattataattaagtaatagtaagacacaaagacgtgctcatatgctgttaatgcccccatgtgtcgtggtaagcggccaaaaaaaaaatattgtttgcaagttgatttaattatattttaataagtagtatatgaatgaatagtgggatctgatgaatgaatgaaatgtttgtttgtctgtgaggaaacatccgttgctgtcacgagttatgaccaagctaataatgtccgtaaagtgtgagcaaacttgtgctcatgttctcttgcttgcttctcaagattataatcatcatgaatctctcagccttacttatcttatctgacttttttttcttctctttgattgactaagacaataaagcttcttgcattcttctgcagaatgtgattttgaggatcttgagaatttcaacttcattgtctgttagtctctcttgcgaatttctttggagatgaaaagattcgagaggccaagaacttcgatttactttcagcctaggacc

SEQ ID NO: 148372 - DNA, 255 bp, Arabidopsis thaliana landsberg
gaagaatttgaaaagaaaaagaaaaaaagaagatgaatgccggaaagcaagcttcgtgggcggtggcgacggcgatcgcagccgtggaagtgctaaaagaccaaggcgttgctcggtggaactaccctctccgcttactccacaaagaagcaatggctcgcgtccgtaccattacagtcccatctcgtccctctcctcctacgtcttcatcttcggctacttccatcagatccaaacctttgtccaccccaccct

SEQ ID NO: 148373 - DNA, 250 bp, Arabidopsis thaliana landsberg
ggtcatcatcaaatttggaccacccatggatttatatgtcaattttcatttccatattcatgtaacaacactaccgattgttggtccccaactttgtgttatttcaaattactttttatacgtacgtgtcacaagtaactatgagtaaatccaaaacaaaaaagttgagacaagaacataagaatatataattcgatgaaaatgaaaagttaaacataagaaagaaaagcataagatcatacgaataaat

SEQ ID NO: 148374 - DNA, 1095 bp, Arabidopsis thaliana landsberg
agtgttgatcatccaaacgttgtgaaatgtcacgatatgtttgatcataacggtgagatccaggtttgctttgagtttatggatcaaggatctcttgaaggagctcatatatggcaagaacaggaattagctgatctctctcgtcagattcttagtggattagcttatcttcatcgtcgtcatatcgttcatcgtgatatcaaaccttcgaatcttcttataaactcagctaagaatgtgaaaattgctgattttggtgtgagtaggatcttggcacaaacaatggatccttgtaattcatctgttggtactattgcttatatgagtcctgagaggattaatactgatttgaatcatggtcgttacgatggttatgctggagatgtttggagtttaggtgttagtatcttggagttttacttggggaggtttccttttgctgtgagcagacaaggtgattgggctagtcttatgtgtgctatttgtatgtctcagccacctgaagctccggctacggcgtctcaggagtttcgtcactttgtttcttgttgtttacagagtgatcctcctaagagatggtcagctcaacagcttttgcagcatcctttcatacttaaagctaccggtggtcctaatctccgtcaaatgttgccgccgcctcgtcctcttccttctgcctcttagtgtttctaccattttcgtctttcttgtttttcgatttttcgtagtttttcctgacatttttccataagttttgcataccccaagcaaagataatgagaagagtagaagaacaatgtggtttgtgattggggtatgagtcgtcaggaagaaactcagtttgtggttagggtttattgagtctttatcttatgctgctaagcttgatttgtcttatgggtaatgaagaatgttttgctagaaatggaaacaaaaaaatagacaagaagaattcttatggtttaagagtgattttagctggatttgcttatattattgtttatataaggaagtaaatggaggatctttcattggataattctcattaataaagcttcttcctttaattctctttatggctttctagtggccgtc

SEQ ID NO: 148375 - DNA, 279 bp, Arabidopsis thaliana landsberg
taaaatagaacattttattatcattgcttacattaattaaccacaaaataaacccaaaccaaatagataaaatacacacaattggtaaaaaaaaaaatagaggataaaatacacacaagatcaccttactaaagtgtaccgaaatcaaaccgaagttgataagtcttacttaagcaattttctgttttattattatattatcaaattaaaccaaaccaaaccgaagcgcttcgttttgttggcaaaaaccgttttattcttttactgtttatcgatatt

SEQ ID NO: 148376 - DNA, 425 bp, Arabidopsis thaliana landsberg
tgtttttctttttttcctccctctcttgattaatgcaaaaccaaaaagagtcactctacatatccctcttgtgcataatggtgcaaacttttatgacagcaaagttgtttctcttccactctcgtcaccccactcccagcgagggctagcgttcatggccgaaattcattttggctcccctcaaaagaaacaatttcttcacatggatacgggtagcagcctcacatggactcaatgcttcccttgctccgactgctatgcccagaagatttatccaaaataccgaccagcagcttcaataacatatcgcgatgcgatgtgtgaagattcccatccaaagtccaatccgcattttgcatttgatcctttgacgagaatatgcacctaccagcagcattacttagacgaaaccaacatcaaaggaa

SEQ ID NO: 148377 - DNA, 87 bp, Arabidopsis thaliana landsberg
tcgtatcatagatctgatgaaaaggggagctttgaatctatcagaggttcagtttgtggttcttgatgaagctgaccagatgcttca

SEQ ID NO: 148378 - DNA, 262 bp, Arabidopsis thaliana landsberg
attcagattagatttctgtaggtaattttgattaaaatcttttggtgataacgcagtcttttcgtctggactggacccacgcgaggacccaaaatttgaccaatatgcgatccaataaacaaaaaaatggtaatttaaaatgaaataatccacatgtatcatgtcaaatgtattattttacattcacaattaaatacaggtcagcgaagtaattgttttgacaataaaaatggtaagaatactgggaacgtcatctaacatc

SEQ ID NO: 148379 - DNA, 1174 bp, Arabidopsis thaliana landsberg
gacaacttccagtaattgtaatattaccaatttttttataaaaaagatgaacttcactttagagcaatagcaatccctcgagtctcccctatataaagattccaactccttaacgattcatctaatgaaaaaacacacacaccaaaaatatcagatatctcaaacaatgtcttcagtttttggatctgtccatatcttggccatgatagccatacaactcctccttacacacagtgtttcatctctgaaccttaccaatgcgtatctgcaccacaaatgcagcaacactcaaggaaaatataagcaggggagcgcgttcgagaaaaatctcaacttagtcctcagtaccatcacctcgattggaaattttcgtgacggtttccgctacaccgaagaaggtgaggatcccaataacgtctttgtcatgttccagtgtcgcggcgactcctactggtccaagtgccccccttgcattagcaccgccgtctctggggtaattgtgacttcaatattataaattagcagtcatatagttacatgtaaaaattacgatgagcacacacgtcggttaattttttctgtcaaatcttaaatatgtgggcaatgatcctgatactttatataaatgattgaattgagacaaaactgatagacattaaaggctagttaaaaaatactgattaaacaatgcaatattgttcttgatatatatgtacgtatatgtatgtgacagcttcgtaggagatgtccaagaaataagggagcaataatatggtatgaccaatgtcttttaaagatatcttcagttgcctccttcaataagatagattatgagaacgatttctatttgtccaacccaaacaacatgagtgatcgggggttgttcaacaaggagacgtcggctctcttggagaagctggcatataaagcctccgatagaaacaacttggatggtaaacaattggtgttgtacgcagcaggggagaagagaattgggacaaagaaggtgtatgcaatggtgcagtgtacgaaagacttaatatttacaaagtgctttgagtgtttggaagggattttgaggaagtttccacagtgttgtgacggtaaacgaggagggagagttttcggtacgagctgtaactttaggtatgagttatatccttttcttagaaac

SEQ ID NO: 148380 - DNA, 475 bp, Arabidopsis thaliana landsberg
agtagtctctctcaccgcgattagggttttgagcaaaaaggagtgatgagagctaaggtaataatgatcttccgatactgtgttcattgtctgattcatctgctctgttatttacatccttagtatttagagccaacttttcgttttttcttcgtcaagtaattgtggatctggttgtgttgttttatatctcagtggaagaagaagcgtatgaggagattgaagaggaagagacgaaagatgagacagcgatctaagtagaccaaatctactccacaagtctttcgcttttcccctctgcattttgtgtttcatttgcttcagtttgttcccagaatttgtcttagtttcaagatattgctgttgttggattaatggattttcagtttgatcttcctttgtctattaatttacgatttaatatttgtctctaagcttatattatctcatcgtagctactagttgatcttaacga

SEQ ID NO: 148381 - DNA, 146 bp, Arabidopsis thaliana landsberg
ctttttgtgtttattttctgatattttgaatcgaagtcggcaagcataggctaaaaggtgatggaggatggaattggagggctgagacacatgttggcgacggtttttctttctgccttcgccggattcatggtagtaccagtgac

SEQ ID NO: 148382 - DNA, 341 bp, Arabidopsis thaliana landsberg
ggtatctccttcagtaacaataacaagaaagcgtgtgagaaaaccctactaatccaatcaaagctacagtagtagcagattgcaaaaccataattaagagatacacgtttcataagaatctgcatccgaatggaatcaaaactatgagctcctggatttcttctaagcaatcataggttcccagatatggcaaacctaataccacaacaaaaagagagaaagagctcaggttgaacatacataccagtttcagctgaaaaaggcctgacccatctttgcagggttgaagaaactaaactcgccgacctcgagatgcccgagttccctgctagtgggataca

SEQ ID NO: 148383 - DNA, 500 bp, Arabidopsis thaliana landsberg
atgtaaatagtgtttcaacatctctatcttatgcacaaataaaagatcttttggcttaagagttaaaacaccaactgtgtttgcggttggaggatacaaagaaatgatggttctctgtatcaaaccctcatctatggaagtctttttttccatagacaacattctcaaacagtaagttacaaatacagaatcgatggcactttcatcgcgaggtattgtgtttccaccaccaagacttgttttacgtatacatgtagtcatcctatagcttctggataaaggaaagaacgagatctgtatgtacagagaagagttgtgtatccacaaatagctgttcgcatcataacagaaaagcggtatgtcagtaaagtctagtctttacggaaactatttgactacgaagcatccaatgagaatgcaaagggctctcaccttcatgaacgggcgctgacgactgggaaaggagtcgatgaaactttcctttaggagaagtgatacct

SEQ ID NO: 148384 - DNA, 373 bp, Arabidopsis thaliana landsberg
agtgggaaaaccagcttcaaggctattttgctggccaggtatggcagatacgatcctcatttcttgaaaacttgtacttggtgaagcagtttaaactcgtatatgctttgttcaggttatgaaaatgtcgaaaggcaaggcaaacccagggttactgaacaagatcctctggagaagctcaatgccaaagactgattgaagcttcagcattgacagagttattgctcttgaaatagacattgaaatggtacaaagtgatttttgctcgttggttattgctcttgaactagaatgttcttgtacaaatcttttcctttgcaaatgtgttgttggttaaaacattatctgttcttttcaaatacctatcaattac

SEQ ID NO: 148385 - DNA, 250 bp, Arabidopsis thaliana landsberg
tttttctctcccatggaatcaacaaagaagcaagtctcgttggagctacttccatggttagttgtccacaccgatggaacggtagagagactagcgggaaccgaggtttgtcctcccggtttggatccaataaccggggttttctctaaagatatcattatcgaaccgaaaaccggtttatctgcccgaatctatcgacccttctcgattcaacccggtcagaagattcctctcatgctctattttcatg

SEQ ID NO: 148386 - DNA, 139 bp, Arabidopsis thaliana landsberg
ccacaattatatatttcctccaacagattcaacaccaaaacatgtttagacatgataacagaaagagagagagggagagagatggagaaggggaatcagatttcagtattgaaggaaaaggagctgagctcgaggagag

SEQ ID NO: 148387 - DNA, 608 bp, Arabidopsis thaliana landsberg
  unsure (1)..(608): unsure at all n locations
tacatgctctgggggatttgcattaactatgggggcgtgggaggtggtcattacactgcatatgttcacgtaagtgaaacgacatttatatatcctcttatatttgaagcgtttgtgttgcaaaactgtggaacccttgtagagtaagatagtattatgatctagatgnnnnnnnnnnnnnnnnnnnattgttgaaacggatggtatccagattcatagagttatagttgttgacctcgtaaggatgaattcattatcttcttcttcttttgcagcatggaggtgatcgatggtatgactttgatgatagccatgtccaccaaatcagccaagaaaagatcaagacctcggctgcttacgttctgttctataaacgccttgtagactaaagaaactgaagcggaaaagacaagaaagtggtatttgcatttttgccgggtttggcttatttaaaaacatcattggcttgattctaattcactacaagatcaagatgaaagcagctctgcgttgaggctaatttacagaagagagagagagagagttgggaagaagagcaaaagaagaaaggacatgttgcggggaattattttattcttcaaaaatgg

SEQ ID NO: 148388 - DNA, 414 bp, Arabidopsis thaliana landsberg
actcgaacaaactacaaaacacggcaacaaaacagagactgcaaccaccatttgtctgaatgcttcattggttgacgaaggcgaagccaagggggaatcaatggcagttatgtttccagtgatattacccgccattgttctgttgaatctgcaaaagtaacaacaacaacatcagcaagtaagattcgtttttccagttcgatagattcaagattgcgtaatcagagagagaagtcacccgtcggtagccggagcaatcatgtacaaacagttaccataacctgcaatttcgagagctcaaatgagcctactatggcttcacattactcttaatggatgtgttttggaaagtgtatgtatacaaatacttacttggatccttgtcagcttcaacgctggctccattaaagctgc

SEQ ID NO: 148389 - DNA, 664 bp, Arabidopsis thaliana landsberg
atgcccggctttccaaatggcgcatgccaccgtggcgactcatgcttattcgcacatggcgtattcgagtactggctccacccggcgcgttaccgaacacgcgcatgtaacgccgggaacttgtgtcagaggaaagtgtgtttctttgcccacgcgccggagcagctaaggcagtctgaaggaaagcacaggtgcaggtacgcatataggccggtgagggctagaggtggtggaaacggcgatggagtgacgatgagaatggacgacgagggttacgacacgtcacggtctccggtgagaagcgggaaagatgatttagatagtaacgaggagaaggtgttgttgaagtgttggagtcggatgagcattgtggatgatcattatgagccgtccgatttggatttggatttgtcacactttgattggatctcagagttggtcgattaaatttgggaaatcaaagcagagaacaaaagaaacccgatttttatagtggattttgttaaaatccacaagatcaagattcaagatgagagatcttgtcatgtatatggtaaatttaattgtaatgatttattgcaatgtcgcaaaagaagttacttctctttgcatgtaaacagattcttgatcttctataagtctttgtattatctatcgtataaac

SEQ ID NO: 148390 - DNA, 197 bp, Arabidopsis thaliana landsberg
cagctaatatcaagtaacgtggaaaggatttgttccgtcaaaggttggtgattatacagagactgagttcctgataagttggattgagcttgttttcatttgcggatctttgagaaaaaagtttgcaactaaatggctctggaacaacaacatgtttgtgaaaagcggcttcaagccaagaccttttctactctaca

SEQ ID NO: 148391 - DNA, 302 bp, Arabidopsis thaliana landsberg
gatgacatatatatttaaatcaattgtattgaatatatctatacaacaccacccccatatttcttctcaaatcaaacaacctcattttcaagtgacacaaaagtttcatgcatatttttactattttatcaataaataatgaaagatcaattgtacattggtacaagagcaaacacttctaagattaacatcctactcatcctactccaagatggaggatggccaaagacgcttccacatttcaatatcttctttacaatttatttttcgaattcctccatagaacccgtcttcctcgttac

SEQ ID NO: 148392 - DNA, 235 bp, Arabidopsis thaliana landsberg
aattcctccaccatctcctctcctacttctcatcttcatcaccaccgtctaaagattcaaccttttgtaactgcttccaatggcgttagctctctccgtcgcacctacatcttcttctttgtcttccctcctctgtcggacccctaacccttttcctaatttcagaacaactcatctgaatttcggttctcaaaggaggatttacacaatcaatcctctccttagatcgcttaat

SEQ ID NO: 148393 - DNA, 186 bp, Arabidopsis thaliana landsberg
aaaatcttgttggccactgtgaagataaaataatgaataaagattgggaaaatgtcgaaaaaacatcaatttttaaatttgggacgaaaagactttgaattttcaaaatgtcatttaagtcataaagttatttttgattctttgataagttttgttaactggatcatttcagacatgtagtaaatt

SEQ ID NO: 148394 - DNA, 619 bp, Arabidopsis thaliana landsberg
atcttgatgatccaatctgcttccttgtgttggaaatgatgcttatggccctcttccttgtggcgagatcgcttttcctctcgagggttcgttttctcaaactatatgctttgtttaagatcaatgagtgctttgctttcttagattaaggatcctctgttttacatgattaaggtgttatataggacaataataacacattatttgcctttgtatagtttgatgcctagatctatgccactttgtattgttgaatcaaaccttttatacttgtgaaacctcattcttttctccgctttggttttgtgttttcagtttatgagtcatcttcaattgctactacccttgctcagcaacggtctccagttgcaaaggtatttacattgttggcagctttgtcctcgttatttcgaatcctgttttttgaaggattgcattcaatgctttttgtgttgggactatgaaatgtcaattaactggagcttttcagtaaaaagattgggaatcttagtgagtcattttttaacttacaatgttgattcataacagggaatgatgattaaatttgcggagaatatagccaattttgctgcttaagtggaaagagcacatcattgtg

SEQ ID NO: 148395 - DNA, 226 bp, Arabidopsis thaliana landsberg
taatgaaagaatcaaatttataaaactgttaagagaaaaagagataaacagtaactccaaatcattacataaacagttatgacatcacacaacacaaaccaaatcacttcttcttgagtccaaaactcagctgccattgaagaactatcaaaatacttagacaaccaaaagatctttctctctttagagagatgctagctgctgaatatcataaggatgagcatca

SEQ ID NO: 148396 - DNA, 116 bp, Arabidopsis thaliana landsberg
tctcaattaaaatcagtttgggattttttcgaaaacgcttttcaatcttcgcctatctgtctccacgatccacgccttgacctttgttttttttttctcaaagattagagaaaact

SEQ ID NO: 148397 - DNA, 478 bp, Arabidopsis thaliana landsberg
agcggaagtacgctagcctcttcccttccgttcttcataacgcaactctttgtcgcgaaccttagctatcgtgtcctctactatctaacccgacccttgtatcttcctcctttcgtagctcagatcctcgtacgtatgcaatttttgctacatcaattttttagctctctagttccgtatgtgtcttgatttgttgtgattgtatttttgcagtgtggattattatttagcccaagtgtgctcgggaacacacgtttcataatcgcacatgtattcccctacagattcacaatggttcttgagacattcgctaacttagctctcgtctacaacatcttcctccttggtctagggatggacctgaggatggtgcggatcaccgagctcaaaccggtcatcattgcttttacagggcttcttgttgctttaccggttggtgcctttctttactatctcccgggaaatggccatccagaca

SEQ ID NO: 148398 - DNA, 137 bp, Arabidopsis thaliana landsberg; identical to SEQ ID NO: 65204

SEQ ID NO: 148399 - DNA, 338 bp, Arabidopsis thaliana landsberg
cacttttctcctttcctcagctcacggtgagtctctggaacggattgtactaatctcattattttcccggtttcagaacgatttctggaacattcattccacactctgagaagaaacatgagtcacccgagaaatgcagatgatatattttctgagttctttggggtctctagaccttctggtccttctggtcccagaaatgcggatgatatatattctgagttctttggggtctctagcccttctggtccaagaaataaggatgatatattttctgagttctttggggtctctaacccttctggtccgagagataaggatgatatatctgctgagta

SEQ ID NO: 148400 - DNA, 521 bp, Arabidopsis thaliana landsberg
gaaagagatacagatagaaagaaaacagagaaaaagagagaatgagatttagtaaatttttctgctcttccccggcatcaaccgccgtacgacatagtacacttcaccacgacggaaatgttaccggaggtcgcagatctttccaaagccacctccggagccaaaaccctagtaagaagaaggataaaactgtcccttgcttctcttccgagatgcctttaatccctattcctcgtcacttgagctgtagaaactcctttgaatctccaagcgggtttcgtccgaaaatcgcttcggctcgcggtagcgatgttcaaatccgccggaaaagctctgctgacgtaagtgacttgaggagattaaggagttctctgctaagctcatcgtccaggtatcttttaaaagatcataagtctttgaaaggtgatgataaggacctctggttatcatcggatcgttctaaagatttgattctttaccgtgaccgcaacgtaacttcttcagcctcatcatcttcttcg

SEQ ID NO: 148401 - DNA, 213 bp, Arabidopsis thaliana landsberg
tctctgttcgtttcttccaaaccctagaaaaatccttagcaatggaggatgctgatggacttagcttcgatttcgaatgctgtcttgattccggacctgttcagaacaccgcttccgtcccggttgctccgcctgaaaactcttcctccgccgctgttaacgtagcaccgacctacgatcattcttccgcgacggtggctggagctgggaggg

SEQ ID NO: 148402 - DNA, 91 bp, Arabidopsis thaliana landsberg
tcattcagataagaatttggttgaactggaaatggtgacgaacaaagaggatgaaggaacagttttaatggaaggaggtcttccaagatct

SEQ ID NO: 148403 - DNA, 292 bp, Arabidopsis thaliana landsberg
ctgacgctggtgtctatgcttatacaaaggtaaaccaaacttttccaattgtttcttcatcttctttatctcggtggttgtgagtttgctgacataatgcttcttggtttcagagattggcacaatacagagagaagcttgatgcggcggcgaccatttaactaatgtcttccagaaataaaccagaaaaatcatttgtttttgtgtttctctggcttagctcttatgtagtgacaaaacaatcaagaacagtttaaatatgtagtagatacacaaatcacattcatttcat

SEQ ID NO: 148404 - DNA, 180 bp, Arabidopsis thaliana landsberg
  unsure (1)..(180): unsure at all n locations
tcaaccgtcgtntgtgccgacgaagaccaccgacggttctcgtttggaccactaggttggtgagcctcttttttacttccttatttttggtatgtttcttttgtatgtctatctttctgaacatacttaaaacgttcaaggatgtattattatagagtaaacgtgcaacttcattacgtt

SEQ ID NO: 148405 - DNA, 507 bp, Arabidopsis thaliana landsberg
tgtttgtcctttaaaaatcaaatttcaaataacattatttcaacgtacataatcatcatacaatacataaaatttgcttgatatttttagaacaattactaaatttagacccttttaattattgtttcgcaaaacataaataagaatctagtagatcttaacgtctcaaacccttttttgttgtatcaaatgaaatacaaaagagatcaacccaagagaggagtcctttttagcggagtaggacacttgaagccacgaggtggaggagtcttaccacagtcgacaagaacctctagagcaattgggataatgaggtcaatgttgagaagcttcgctctaatggtggtgcagagacaaaccgccgcgtcaagacccactaagccgtcaagaagtgggcaacactttgccttagcgtagcttttccctagtccgatgtgaatcaaacaaaatagcacgtccacacatgcgcctagtttcagtgcgtcgattggacaagtttccggttta

SEQ ID NO: 148406 - DNA, 239 bp, Arabidopsis thaliana landsberg
tactttctcctgaaattttttttctacatttttctctggtctgattgagacaacataacttgttgtatgtagatgagagtagcagctggaatatattcagagttgctttggacagggaagagagcatcatagtatgtgtgtaaaagtgtgtgtgcatgatttacgatatttcttcttgtattagagaacagtgctgcagtttctttgttatcatcatggtccaagatagggaagtggac

SEQ ID NO: 148407 - DNA, 465 bp, Arabidopsis thaliana landsberg
tttttccaaatctgccagagtccgtaccatgtccacatggcctccacatttcccttggagatccgctcagctcttcgccgggcttcctccaccgtctatctccaccgttccatcagcaccgtcactactactccttcgtttcgtcaccgaacgacgttgttacgaccgagagctttctcttcttcctctgttaagctccccacgaaaccttctctttgcaccgccgacgagcttcattacgtctccgttcctaacaccgattggcgtctcgctctctggcgctacttgcctcctcctcaggttttcgaatttcaacaatcacctttctctgtatctgcaatttggattatatatttttttttgtgatcaagaattttctctcttctcttaggctccgacgaggaatcatccattgttactgttgtctggagtaggaactaatgccatcggatatgatttatctcc

SEQ ID NO: 148408 - DNA, 464 bp, Arabidopsis thaliana landsberg
gcaaactccactctgacgccatacataaacaattcttaactttatcctctcatccttatcactcttcctcaaaacttcgaaaatgcatgcgatcgatttcaaagagattcaggagaagctctctgatggattccggccttggcaacgatcgtttcagttctgggctcgtgccactgatatctacaccggatacaaggtttctctttgattgatgggtactcctttcttcttcttcatgtttcgttttgtaatacatttttcttatgattttctgcaattttctttcaatctgtgtcttgttctgggcttttaggtatttcaacttcgtatgaacttcgtcaaggatgttaataagcacgaggagatgtgggagagacaacatgaacttgctgctcataaagtttattctatgtgctctgaccttggtggtttcttccttaaggtaatggtgtgttgagactgtt

SEQ ID NO: 148409 - DNA, 364 bp, Arabidopsis thaliana landsberg
acagctgctcataagacagtggtttgatgaaaattgatcaaaacaacaacgctcaaatcaatttgatcacattcacttaagaaaagaaaaacatcaaaagaagcaaagaacaaactaaatgagtaaatctcaactcaatagcaaaaagctcacaaatctacaaaagtctatatgccaaacaaaatccataacttgtttaaccgattaaacattatcatcacaaaacgatacgctaattgttgacctaaaaacatgaaatatataatttataacaagagactccatcagaacttgatatttcgaaaatttggatcggagaaaatttctcactgatctccggcgaaaagaagcctccgagagacgg

SEQ ID NO: 148410 - DNA, 865 bp, Arabidopsis thaliana landsberg
gagtgtgttatcacctgtaactgtatgatagagttagtcaattgaacaagattcagatgggaataactactttcaaataagatattgattgcctcttgtatccttattgtagtgtttgttagtatactatatcctcaactcatgatattatcttgttacaaaaataattgcagggaacaagacttggaagttcagatccaaaagggtgttatagtgagtagttctcatttcagttctgtctttgctgaacatcttctatacgttcttgcaaatttccttagcaagttcagattctcttgttttagtgaatgcgacattcaataacagatgacgtttactgttgttacctgtatattttgttaccttaccataataattttatcatctcagatatcggactgccatctgggaaatcactttttcagattcaagctgagaggatcttatgtgtccaaaggcttgcttctcaggcaatgagtgagggtatagttctcaactctgtattctatttatctgtacaactctaccatttcttataccttgtttcacataatattttgcctgcagcaagtccaactcgcccagttacaatacagtggtatataatgaccagtccatttactcatgaaccaacacaaaaattcttcaagagtcacaagtattttggccttgaaccagatcaagtaagagggttcatagctgtattgtttcctgcgtgtctattgttttctttcttatgtgtgtagaccaatatacattgcctctctgtaggtcaccttttttcaacaaggaactctgccttgcatttcaaaggatgacaagtttaaaatggagacacctttcagcgtatgtgtcttcaaatcaa

SEQ ID NO: 148411 - DNA, 234 bp, Arabidopsis thaliana landsberg
atgaatttgttttttaaattttcgtcaatgttgtgttaaatatgaatatagttttatattgtagtcgaaagaaagtgattaaacattctaaggcacatgttaattatttttgaatgcagccaatataaaaaactcatcactacttcattagaaaggagtaggaggaacatcgatggtggttccagccataatctgacccttaccaattagacgccaatgcctatcgacaggtcg

SEQ ID NO: 148412 - DNA, 350 bp, Arabidopsis thaliana landsberg
attaatataattttaagaggagcaaataatactggagttatgtttcactaaaatatatatgttttaatatatatatatatatatatatatatatatatatattgataagtttatacaattgttaatttatgatattaatgagacaatatgtttacatatgatttattatcttattaatttatcgatatgtatcaatttttacactagtcccaacacagaaccaaaataattggttaatttaaagaggtttatcgaatattaattaatagatgttctactatatatcatatctttttttaaaaagaatcttcattgtttatgtgtagttttttttctaaatgagtcatgat

SEQ ID NO: 148413 - DNA, 211 bp, Arabidopsis thaliana landsberg
gtttttcaggtttagctcagtctagaattggttagcttgggaaaggtcgatgaagaacgggatggctgagtgcagcgtatgtcgttcaaggttggtttctcccagtagcaaagctatttcaagggcttatgacaactacaactacaagattagagtatcctcaaaacaacgagctctcaatgtctttttggtagtcggtgactgcatgcta

SEQ ID NO: 148414 - DNA, 568 bp, Arabidopsis thaliana landsberg
tctaattttttttaaaaaataaaacatacccataaaatcaaacaaggaaattcaatttcaagagaaaaaaaaaacgttttacaaatcaaaataaaatttaaaactcccccaatttagaaacatttttctttcccccaaatttcatcattacctaacctgagaagagttgttgttgttgttgttccgattcatagcttcagtgatcgaagcaagtttctgaagattcaatctaataaccgtatcagcaaacaatctcgtatcttcctccgaattaccttccggtacatcaacaacataagattccaaaacaacggtccagatcctttcttcttcttcttctttcgcaaatctatgaaccgtcgtaaccgatttataattcctcagcctatgttcaccaccggttatactaaacccagtcactctccgatcatcgtccaacagatctaatctctctcgagacgtattcgccggtaatccacttatcacgttcacgtcgcgcgtgcataccactcgcatctcgaaatcttcactcacgttacagcttttgatgaagtgtttgtaaatctgt

SEQ ID NO: 148415 - DNA, 299 bp, Arabidopsis thaliana landsberg
agaaccttggaagcctttgcttctgtctcacttatcatagcctcagtttctttcttgctctcaccaggtgggctggcatgggcctggaccgggtcatccaagagtcgggtttcgattccaggaccatctggttctctttccgtcttctccggctccaatccccaccgtgttctcgccgctcttgctaaacgcttcaaggcctctccgttgatggcgttctcagttgggttttcgcgtttcgttatctctagtgaaccggagacggctaaagagattttgagcagctctgcttttgctga

SEQ ID NO: 148416 - DNA, 208 bp, Arabidopsis thaliana landsberg
tctctcattttgtgatcgctgattatcaaatccttcattgtatatggacgaccacaaagataattaggtggaagggtaataaaactagctttgctctctgtgattcgctaggctatgaagtatgaatgatgattccaaaattcctggttcataatataaaatttgtaacatggtttttgttgcaaatgtgggccttattatatcttaa

SEQ ID NO: 148417 - DNA, 969 bp, Arabidopsis thaliana landsberg
tttctgactaccaatggcggattcgtcttccgacaaggagaagaaggaaaataataagcagcccgtgtatcgtggagtccgtatgaggagctggggaaaatgggtatcggagattcgcgaaccgaggaagaaatcgagaatctggctcgggacttttccgacggcggagatggctatgcgtgctcacgacgtggcggctatgagtatcaaaggaacttcagccattctcaatttccctgagctctctaaacttcttccccgacccgtttcgctcagccctcgtgacgtcagagctgcggcgaccaaagctgctctcatggacttcgatacgacggcgtttcgttcggatactgagactagcgaaacgacgacgtcgagtaaaaggtcagagagtagtgaaacgacgacgtcgaataaaatgtcagagagtagtgagagtagcgaaacggtgtcgttctcatcgtcgtcttggtcctctgttacgagcattgaggaaagtacagtctccgacgatcttgacgagatcgtaaagttaccgagtctaggaacgagcctaaacgagtcgaacgagttcgtgatatttgactcgttggaggatttggtgtacatgcctcggtggttaagcggtacggaagaagaagtttttacgtataataacaatgattcttcgttgaattactcatcagttttcgaatcttggaaacattttccctgagaaaagaaagaagccatattttctctctctttttcgccatttttggttttaagttttttgatgggattctctctgtttttgctatgcgtgagatatctctctttgtggaatagataacttttctgttgaaaatctcctaagtctgtgaaatgaacgacgatggaaatgtaagtgtgtatattagcccgaaataatgactgtatacattcttttttgcaagatcattagaaaaaaataaataggaaatgtggttt

SEQ ID NO: 148418 - DNA, 524 bp, Arabidopsis thaliana landsberg
  unsure (1)..(524): unsure at all n locations
agtgaagaggctggggtcggctaaggcaatgaaatgtttctacttcancaaagacaaaactcaggatgatgaagctaagactagaaagtttggttcagctacgatggctagaggaggatcagggtctgagtttaattcagatacaagtactgctacttccattacttcttccttgcacgtcctctcagagacacacagtaataatctcaaagtatttgtcctcgatgaccttaaaaccgctaccaagaacttcagccgctccttgatgatcggtgaaggtggctttggtggtgtctttcgtggcgtgattcagaaccctcaagattctcgtgaaaagattgatattgcagctaaacaacttagtagaagaggtctacaggcaagcaaatcttgttctctctctttagtttgcttctgttttacacaacctccttcagtacccaacaataaaaacaactacgtatgcattaacaggtgcataaagaatgggtgacagaggtaaatgtattgtgagtagtggagca

SEQ ID NO: 148419 - DNA, 358 bp, Arabidopsis thaliana landsberg
accaaaacctctttctcaatcccacatagagagaaagagagagagagagatgagtcggaggaacaagaacggccctaagctcgagctgaggctgaatctttcgccgcctccttctcaagccagccagatgagtcttgttcgatcaccaaaccgatccaacacgacttcaccaagctcatgcgtttcatctgaaactaaccaggaggagaacgagacaataacctcaatggttcttgtgggttgccctcgttgccttatgtacgttatgctttctgatgatgaccctaaatgtcctaaatgcaaaagcaccgttcttcttgatttcctccatgaaaacgcttttgccgctacaaccgct

SEQ ID NO: 148420 - DNA, 441 bp, Arabidopsis thaliana landsberg
gcttttttcgtcaaattcagttattcacattctctcaccagacacgaactccagattcatccgacaatggaaactttcagaacattccatctcttgctctgcttcttcttcttcacattcactactaccctgacgtcaccatctcagatcgcagactgtacaatgtgcacttcttgtgacaacccttgtttaccaaacccttctcctcctcctccaccgtcaaatccatctcctcctcctccagctcccaccaccaccgcctgtcctccacctcctagctccagtggtggtggtccttactactactaccctcctgcttctcaatctggctcttaccgtccaccaccttcttcctccagtggtggctactactatccacctcctaaaagtggaggaaactacccttatacaccgcctccaaaccctatcgttccatatttt

SEQ ID NO: 148421 - DNA, 540 bp, Arabidopsis thaliana landsberg
aatgaaggaattcatttttttccaaaaaaacaaaccggtctatttagactgagcggttatccaataccaaaccaaaccaactatttattaagtcaaaggtaatccaatgagcaatttcaaatctaacaaagcaacaacacacagtgaaaaaaatccaatgagatagaatcaacagctttatccatggctgagttctaatatctaaatgatgctcaacactactttacaagaatctcttgagtctttggagtcttcaggatcagttttgagggatgtttgatcattgtacaataccgtggtcacgaaggatctagaaattttcttgccactcaaacttttcagttcatccacaggatgttctcgacttcacaacattccaactttgtcaaaagattggagattctcagcgattttttgaagtgcttcttcactcatctcaacttttcggactacacccggaaagatcttgttcttctcggaagcagcagtgggagaaacttgaccacagagctttgatttcatctctaagcaagatttgag

SEQ ID NO: 148422 - DNA, 294 bp, Arabidopsis thaliana landsberg
agagccacgccttttggagcttctttctcatctctcagaccatttattcattttttttcgctatgggaacaatgctctatctcagtgtggtcggagttatgctacaagaacttggtatctttccaagtttgatgacttccccaagcatatcaaggctctcattccctttgtattctagagttttgttgttgttgtttcaagtgtctgaataaaactaagagaccttataggctcatttgtttaagttgaatttaataataaatcattagaaatcattgaatcattaacacgtgt

SEQ ID NO: 148423 - DNA, 198 bp, Arabidopsis thaliana landsberg
cccgggaggtaaaaggttccgttaacgtcaaggtaccaatggacctttgttttgtcaaaacaccaagtacactctcagatggctcagaccacattctgaccttctctgctttgactatatcgagtagattatctggaagctgcagatcaccacccaagatctggaccaccttagacatgtctggcctaattgctacag

SEQ ID NO: 148424 - DNA, 482 bp, Arabidopsis thaliana landsberg
acattacgcttacgagaacggcccaatacaaaggctcattatttaggcccattattaaaatgtaaacacaatgaacaacagcccaataagatccatgacaaagacacccacaaagatttagatttcaattagtaaagttagtgatcgtagcgccgggctgagtcgcctgagcttcagccgccggtttcacttccttcgacggctcaacatgttttccggtaagctccacaggtaaatcagcagcaacacctttcaagtagaaagtgtaaaacagcttcgtaggatacacaagctgacgaagcttgacctgtccataagctccttcaaacacgccggagccaccagtaatagcaagaaacgtgtcctcgtaagtgagataaggtccttgaactgatatgtgaccataatctccgaagtagaaactgtaagaagcttcaaagcgatcacctttcttctctggaacatgttggatcaaaacgcag

SEQ ID NO: 148425 - DNA, 373 bp, Arabidopsis thaliana landsberg
ggaatacttggcggattttacaggtgacaagtgacacttcactctccaccgttttgatctaacctgcccacaacttccgatcatccccgggcatgaatacaccgcagagcttaccgccatttcaccaagattggatctttgatctttcccacatatctttatctctcaatctatctatactaaaagattgcgtcttggtttctctctatacgttaagacttttgtggaagattgagaaagagacagtgaataaaaccgtcacggtagagatttggaatattggcttatttggtcttttacgtccacgtggcgtaattacaagacgttacatgttatcaaagtcttgaaatctatatttgcttactcagtcttt

SEQ ID NO: 148426 - DNA, 195 bp, Arabidopsis thaliana landsberg
gcttagtctctatgactcacgaagcaaagctctcctagaagatcatacacagaaaccgctttagctgcagctaacagtggaacaccaccagaaacgcctaaaagacatatcaaagataattctttacagagaaagaatatgaatgatacttcttcaccaaggagcaagatggttacttcatcggatccaaatgtg

SEQ ID NO: 148427 - DNA, 205 bp, Arabidopsis thaliana landsberg
atcagaaaccaaagccaaagcgtttctatcatttctgtcttcttctgtgtaaacagtaagaccccaaaggtcaaacctttaggctttgtttcttcctttaaggcttttttccgacgtttatatcagatttcttcttgtcaatttcttcatttggacaacctccataatccaagaccgacccttttcctctaatctctcctggtaa

SEQ ID NO: 148428 - DNA, 454 bp, Arabidopsis thaliana landsberg
cctgcgacccgcgtccgaagtcgtggcgctttaccaacaacggaacatccggcggatgcggctgtacgatcccaaccaggagactctcaacgctctccgcggctccaatatcgagctcgtgctcgatgttccaaaccctgatctccagcgtctcgcctccagccaagcggaagccgacacatgggtccgcaacaacgtccgcaactatgcaaacgtcacatttcgctacatctctgtcgggaacgaggtacagccctcagaccaagctgcgagctttgtcctccccgcgatgcagaacatagagagagcagtttcaagcctcgggatcaaggtctcgacggctatagacaccagaggcatttccgggtttccgccgtcaagtgggacgttcacaccggagtttaggagctttatcgcaccggtgataagtttcttgtcaagcaagcaatctcct

SEQ ID NO: 148429 - DNA, 157 bp, Arabidopsis thaliana landsberg
ctattggggtcattaacttggagtagatcctcgtttattacaagtctgttttataacaactctgaaacagtaacacacaccaagattgattacaaagagtaaaaacagaaatttgtagacttttcacatttagtttttggaatcaatgcgactctct

SEQ ID NO: 148430 - DNA, 415 bp, Arabidopsis thaliana landsberg
gagaaaccttacggaggaggctacggagctccaccaccgtctggatcttcagattacggaagttacggtgctggacctcgtccgtcgcagccgtctgggcacggtggaggatacggagctactccaccgcatgggatttctgactatggaagttacggtggtgctccacctcgtccagcgtcttctggtcacggtggcggatacggaggttatcctccgcaagcctcttatggaagtccttttgcttctctgattccgtcaggttttgctccgggaacggatccgaatatagtggcttgctttcaggctgcagatcaagatggtagtggctttattgatgataaggagcttcaaggagctctctcttcttatcaacagagattcagtatgagaactgttcaccttcttatgtatc

SEQ ID NO: 148431 - DNA, 153 bp, Arabidopsis thaliana landsberg
gagacgcttgaaagaacgcgaaagcttgcgaagaagatttgcttttgatcgacttaacacgaacaacaaacaacatctgcgtgataaagaagagatttttgcctaaataaagaagagattcgactctaatcctggagttatcattcacgatag

SEQ ID NO: 148432 - DNA, 86 bp, Arabidopsis thaliana landsberg
tctttgcaggcctttttttctccaagtccatacttgagaagcatgccgcactgagaatggtggccaatgggtttgccttgtcttgt

SEQ ID NO: 148433 - DNA, 155 bp, Arabidopsis thaliana landsberg
acaatttgtagtttacccagatccttttctcctctgttttttctttcgcattgttatcttcagtgtctgtctcattgttcccttttcccagaagctgaaacaaatcttcttttttttttttttttttggttctgtgaatcttcagatcttgatct

SEQ ID NO: 148434 - DNA, 971 bp, Arabidopsis thaliana landsberg
tgagctctttgcaatttttagggttttcttcgaataaagaaaaaaaaaatccctgatcttcctcttagtgatttctcctttcgagatccctgagattccgagaaaatctgcatttttttctcgtgattctctagctctgttttgtgttttacacagctcttttgaatcaggtacgttttctctcaaatcatttagtgttctgtttcacatttttaagtttctgatctgtttttaggttttatcattgagatttctagatctctctgtcgttttattttgtttgcctcatcaaaatgatgtttttgttttatttattgaatcctgctctgttctttcgtacctttgagcattggtttaggcaaaactcattgtataagaagttaaacagacttgaattgaaaataggaactaattggacatgtttagaattggttgatttgttaaaacgcgtgatgtggtcaaatattgagtgagtatgctacaagtttttttgtcggtaggcactttaataaataaatagttagatgtcctatagacgaaggcagtttgaaaatttcggtacttgtcaaaatcagtggctccctcctttttctttatatcattaaactacaagatgggtaacacatgactttctttttgactttttatgttctgttctgctttaaagacatgtcaagtttcttaaaaaagcctttgttatgaaaccccaaaagttactaaatcttgtattttgtgtggtcattttggtcgtatatacaggtttgtgtgtgatagcgttgctgtggtaaaagctttgtacatttgaagatttagagatgataaggtaatgtaaacagctttttggttttgcggtcacttttaagttctcatgaaaaaagcttttcaaatttgctgaatgttctgtcttgtggtcatctttcagttttcaggtaacctaactttaatggacagttccacaacatgcagtgata

SEQ ID NO: 148435 - DNA, 146 bp, Arabidopsis thaliana landsberg
taacacgtgattgtaaagtaattgaatagctcagaaatattcttagtctagtgtctgagtgactctagtccaatgtttgtgtgacactctttatacactataaaatcatggtgttataaatttttgtatattcaagctattttccc

SEQ ID NO: 148436 - DNA, 211 bp, Arabidopsis thaliana landsberg
aacatagactatggaatcaagtaacatttaggtcacttatattttaatgcaccgcatctaacgcgattagtcattaatacacggatcgtccgatctaaaataaaatttgtttttattttatatatacagttataaccttataacataaattcttcttaaatcattacaatcatcacaaagccatcgcaaattagaagagatttaagatggc

SEQ ID NO: 148437 - DNA, 353 bp, Arabidopsis thaliana landsberg
ctttctgcagattcttctatatatcaaaaagaacaaattgataaccctaataagaaaagatttaagaatacataaacaaaattcctttgaaatttacctacaaaatcctcagagtactccaagaggaaaaaaaaagcatcaaacgaagaaactaagaatcaaaaatgaaggaaactaagaagatgtttgtttgaatgatgggttgagagcgtatacaggtgatacggcaaaaaaagagtgcaaaaatgtttgtttaaaccaaaattttcgttaatctgatggttacaatctgtttatctattactatcagaaatcaatcaaaaattagaattagtatatagaaattacgttat

SEQ ID NO: 148438 - DNA, 594 bp, Arabidopsis thaliana landsberg
tcagacaaagaagatgatctctgcttatttcgttgaagattatggatacattacataagcgttacaaaaaaatgaagaacaaaaaaagagaaacttaatgcgtctttttaaaacaagaaaaaaattacttaagggatagacatacatacatttcaatttcatgtatatacgaataaaccatatacttttaaaaatcaattttataaaatttaaaacagttaaaaagaaaagacccaaaaaaccagaaaaataaatccgttaggtaaacgtcttgcaaatgcctctcaatcgattgaatcaacagaagaatccaaactattttgttgcattaaaagtaaattttttgtaaaatttaacttaggctacagcgtaagggttaggcttaggtgtacccttcactagaccacattggaggcttgtctcaggcatgttgtattcatctctcagtgatttctctggtgacaaaacactcgcgtaaagctgctgtcctaagtagcgtctctcggagttttcagatcgaacgttccacattccacagttgacgaatgtgagcaagattgctgcccaacattttgggtcgacttggactgtgtg

SEQ ID NO: 148439 - DNA, 138 bp, Arabidopsis thaliana landsberg
aatatgagttcagagcttccactaaagcgctttcggtggggttgacaatacttctattttatctttgaaatgaaagaagatctaaacatgtctttaaggcaaataaacaacaacaattacagttagaaaaaatgaaac

SEQ ID NO: 148440 - DNA, 436 bp, Arabidopsis thaliana landsberg
gcttaccggcgactagccaggatctgtcatcccgatgtagcgagaaatagtcgggataactcgtcggtggacgatttcatgaagatccacgcagcgtattgcacgctttcggatcccgagaaacgcgccgtttatgatcggaggattcttcttcggagccggccgttaacggctggatacggcagttacggtggacggaattgggaaaccgatcagtgctggtagcgagttgactcgatgtgtcgagttggtccaaaaccattgaattggttgtaattagagcaaacccagagattctgggtggttgtgccacgtaggatcaacacggtttatcgtgccacgtaggatctgtcgcgtttttagcctttgtatccataagcagtaagtggtcggtattcagtatttaccatctaataaagaaaataaaaatttatgt

SEQ ID NO: 148441 - DNA, 577 bp, Arabidopsis thaliana landsberg
ccttacctaacaacaacactaacattgtccttcttatttaaacgtctcttctctcttcttcctcctcagaaaaccaaaaaccaccaacaattcaaactctctctttctcctttcaccaaacaatacaagagatctgatctcattcacctaaacacaacttcttgaaaaccaatggatcaaatcgaagcaatgttgtgcggcggaggagagaagacaaaagtggcggttactacgaagactttggcagatccattgaattggggtttagcagcggatcaaatgaaaggaagtcatttagatgaagtgaagaagatggtcgaagagtatcgtagaccagtcgtgaatcttggcggagaaacactgacgatcggacaagttgctgccatctccaccgtaggaggcagcgttaaggttgagttagcggagacttcaagagccggtgtgaaagctagcagtgattgggttatggagagcatgaacaaaggtactgacagttacggagtcaccaccggctttggtgctacttctcaccggagaaccaaaaacggcaccgcattacaaacagaactcattaggt

SEQ ID NO: 148442 - DNA, 210 bp, Arabidopsis thaliana landsberg
acctgaaattgccgtatagaaaccaagcaaaagcaatattagcttaaattcacatacacgtggcttctaagtattatcctatttggtttcccaaggaacctttaacatcatcatctctcaggacttaactcttgcagcaatgcaaactaatttagccaatcaccgcctacattgaaccgggttttcctaaatacgtcactacaatcttgt

SEQ ID NO: 148443 - DNA, 201 bp, Arabidopsis thaliana landsberg
aaaatttcctgaacttccgcacaaatacatgaatgtacacatgtttaaaatagacaagatagaatcactagttaagtgtctgaaacagagtaatataaccagcaaatggctttatacgcagtgtgtgctagccaggaggagcggatgttaatcactagttaagtgtcttgtgatatgcaacagaagttgacgtctttaata

SEQ ID NO: 148444 - DNA, 436 bp, Arabidopsis thaliana landsberg
cgcaaacacaagaacgtgtatatatacacaatatatatacgtttccgtgtatctatcatacacacgatgtctatcaatccctatgtgacaatctttctcctcctcgccgctacctcaagccaagcgttgagtatttctctagctgacccctgcacggtgtcggattttcccgcattgtgcagaagtaccattaagggtcaaactaatgtgaatgcagcgacagatgtggccataaaagagttgatgaagcggacgaggcaagccaagaaaatcgcggagaaagagctgaaacgcgatggaggagtcgcgacttgtttgtccaacttcaatagcgcgtttgataatttggaaaaggctcttacaaacattaaggaaaatgatggttttagccttaacattaaccttagcgccgccttgacggattacgatacttgca

SEQ ID NO: 148445 - DNA, 452 bp, Arabidopsis thaliana landsberg
gaactaaaagtacttacgcgaggatccatttgccgttgaggagaaacagagcttcgttaggagctggagtagggttcttagactcgagctgtgtgatgagctcgctgatctcagctctcgtatcactcgatgcgcttaaacctcgatctgttccgtacaacgaatccgctagtgatctctttagcctctccgtctcctccacggattcgattgctttatctgctaccgatacggttgaagatgaggcaaatactctctccactccatcttgaccccattcgtcgtcgatgtccgtcgctcggattttgaaatctggccgatgaacagagactccaatctccgatctccgatttattgagttaatcggtagtagtaatcggagactttcgattggtgtttagtgtttgatgagcttggatttagggttttgcagggtaactgggtgaacaatg

SEQ ID NO: 148446 - DNA, 100 bp, Arabidopsis thaliana landsberg
ctgttacatactctgggttgatttctctagatttagaattcaattttttccccgaaaagacgcggaatttcgatttgggtgttgaaaacaaaattagggt

SEQ ID NO: 148447 - DNA, 282 bp, Arabidopsis thaliana landsberg
attataccacacaatttatctactttattgctcatgcgcctgaaattcattagtttttgttaaaacaagtatatatctcacttctttgtacttagttgccctagaagttagaagattcttatttttatagagaaaaccaattacatgtgcgtacatatatatatatatatatatatgtatgcgcgcaacatatacttaatgtatacgtatttaaatatatgatgttaggagtacttatttactattcagcattcatacaccgttgcgggaaaattacaaaat

SEQ ID NO: 148448 - DNA, 106 bp, Arabidopsis thaliana landsberg
aggaatatagattgtggcggctgaaaaatcggagcctctgaaaattatgatatcaggagctcctgcttctggtaaaggtacacaatgcgagctgattactcacaaa

SEQ ID NO: 148449 - DNA, 515 bp, Arabidopsis thaliana landsberg
ttgtaaaaaatgaacactaaattgaattccatgtgtattatagtgtaatacattcaaatcaaggaatctgaaataaattattgatattgtatggaccaaccactagagaatctgacatgtgtccaccgttccaaattaagtttgcgaattggttatatgtattttgtgtgagatgaagtgaatcccaaaaaatataatctttaggattctcacacaattgatattctttcacaattctcttccctccacagctgaatactcctctccacttcccagttccacaacaagcttcttccccttctttaaacccttttatttatcacaaaaatggtattgggttatgaacatatactttaatggccccttaaatgaatatcataagtggaatagcccaacaaaattcacaaagagctcacttaccaaatttagaaggatgttgcattctgagtctaaggcttttgttcatgtcaaatagggagaatttgaagcccttgacttgtctttgcatttgaaac

SEQ ID NO: 148450 - DNA, 411 bp, Arabidopsis thaliana landsberg
tcattcttttccttattattgctactacaaaaataacttcattttcatctaaacttgacaagatcacatataaacagacacttcactctactactatctctttgttacaggcacaaaatctcgcctctttcatttttttcaaatctttcaaataacttcaacaaacgtaaaaggaggaatactctgttcatcacagaagaaatcagaaggatcaacacttgtcttaactctcaccaatctctcaaaattattcttaaaatacttcactccccaactcttcccttcctcgtacttactcctcttaactccaacatacatccccaaatcaagatctctcagatttatataagctcctctcggagacttcgccacaaactcactcatatcatcgtaaactctctccacccatct

SEQ ID NO: 148451 - DNA, 195 bp, Arabidopsis thaliana landsberg
cattggtataagttgttacaacctaaagaagaaaatcaatggggagaagcaggacgaactttggttttgaagaggtgaacgtagagtttgtccattgagaaataaataaaacaacctgtcgaatgtgtcacaaacgacccgaaacttgatcccactatgcaatgccatgctggtccataccctttgtcaaactcc

SEQ ID NO: 148452 - DNA, 107 bp, Arabidopsis thaliana landsberg
aaaaaaaaaaaaaacttattcaattgaaatgaatatcgaaactagtcagtagccaaaatataagttaattgatactaattaattactacctagctacaacaaataat

SEQ ID NO: 148453 - DNA, 629 bp, Arabidopsis thaliana landsberg
cttcagcttctttaaccagtaatatgtagattaacaatatgaatcctttgttgaataaaagaaacaattaaacgtttgattacagataagactttacataatccaacttttatatgaagctactacaaacaagatttaaaacatcaaagattccatctaatcttcaatcttcatcttcaacatccttcaatatctctccacttaagatacactagcccagctctatagtgcgttaacgcaccagcaacaaccagaacatgaaacaactgatggctatgtcctgctatatcgaatttacccggcatccatctctctgggatcctagttgcataaagcaaagctcctaacccataaagcaaacccatcaaaatctcataacctgtcatgtgaagggcttcaggttggtcccaaaagattatcagcttgtgaagaatcggagctaagccagagaatcccattccaaagaacagagacgccctcaccacccgaaactccgggctttggaaaaccgggaggagagaaacaagcacagtggcgattcctaagatggttatgaatcctaagtagaggttgcagaagaaaggatcacacatgaaggagtaataaaccggagggtagaaggaagtcgc

SEQ ID NO: 148454 - DNA, 415 bp, Arabidopsis thaliana landsberg
tcaactcataatttcagtggcatacgaggatgcttctttgggattgctaacatgatacttgtgagttcctttttattttctgcttaaatctactcagtagtcttaccttctcagaacatgatatgatgggatctcaccctactctgtaggtgaaacgaatgagggaaacactatactccactcttctcttccaggtcctgaaagtttctagctgttttgaatcttggtagctcatgtttacctttaatatctttttagctactttcgttaacttggctggattttgcatcaggatatatcatttttcgactctcaaactgttggtgacttaacaagcagacttggctcagactgtcagcaagtctcgagggtcatcggaaatgatctgaacatgatatttcgcaatgttcttcag

SEQ ID NO: 148455 - DNA, 215 bp, Arabidopsis thaliana landsberg
ccaaataaattagaactttttttgagtttttacatgtcaaaacacacaattattgaatattgatacaaacaagtgaaaaaagaagataacattattgatgatacattgcaagagcttcgattgtggacagagtaatcagaatctcattattttgtttccccaagagcgtttctgaggttagagtacttggtttcgagctcataccatgaatccaa

SEQ ID NO: 148456 - DNA, 202 bp, Arabidopsis thaliana landsberg
ttaaagtggcttcagagaaaccctctcctccaaccaaaggtcgtaaggagtgaagttagctattggtaatctaactcaagactcctgcaacaatagctccaagttgtctccagcattctacaaaagagccatcgccacctctgtttttttttttttctttctgactgtattatgaagagataggatctttgatgtgttgtgt

SEQ ID NO: 148457 - DNA, 340 bp, Arabidopsis thaliana landsberg
ctctcaattcttttactgtttattttctttgtaatcaacaacagtttaactcttcttcttcttttctttatcaagaacagtagtttctcaattcttgattatgatactaagcaagagacctcatctaatgatccgtaaattgtctgagatgttggttccaagaagcagatctgctgctattaaaccggaggagtacacggccagtccgagaagtccgttggatttgaacttcccctccccggttcactcgaagcggttcggttctggtggtgtaagtttgggtattggtgctgcgttggaggaaactagcaacgggattaaccggcatgatccggttcgt

SEQ ID NO: 148458 - DNA, 508 bp, Arabidopsis thaliana landsberg
gtagctttacttcctttttttaattttaaaaaaatatgtggtagcttaaaccagaggaatagtatcaaaaagatagcaggatccatggatttttttttaaaaataatttacataactctcgcatattgcgaatcatataacattactacccaatcacacaagtcactctcttcaggtgataaactccaaccctgaatggactctgttttatctattatataatttatatctcaaaaaaaatattgcaaaatttttcatcgcaccctaatcaaagcgtcttcaccagattggatggatttatggtggacatgcaactttaatttaaggacccggtttagcgacttcagtgcaagccgctggaaccaactttccgctgagaataggcttgatgttagaacatgctgagacagctggtccctctttgccgttgtggaccaagttgatgtcagagagagcaatattggtgcaaggaacgcctttgctgcacattagcttcactgctaccttt

SEQ ID NO: 148459 - DNA, 142 bp, Arabidopsis thaliana landsberg
gtggatggtcttgatgaatacatgaatcaatctgaatccagtgctccgcattctccaaccagtgtagcaaagctgccaccaagcactgcaactagaacaactcgacggaagaccacaacaaaagctgagcctcagccatcat

SEQ ID NO: 148460 - DNA, 537 bp, Arabidopsis thaliana landsberg; identical to SEQ ID NO: 8870

SEQ ID NO: 148461 - DNA, 428 bp, Arabidopsis thaliana landsberg
cctccttgatgtatatggtaaagccaagctcttcaaaaaggttaacgagcttttcttgttggcgaaaagacacggagttgtggatgttatatcctacaacaccattatagctgcctatggaaagaacaaggactatacaaacatgtcatcagcgattaagaatatgcaatttgacgggttttctgtgtcacttgaagcttataatactttgttggatgcatatgggaaagataaacagatggagaaattcagaagcatcttgaaaagaatgaagaagtcgactagtggaccggatcattatacatacaacatcatgatcaatatatatggagagcaaggatggatcgatgaagtcgctgatgttctgaaagaattgaaagaatcgggacttggtcctgacttgtgtagctataacacgctgataaagg

SEQ ID NO: 148462 - DNA, 364 bp, Arabidopsis thaliana landsberg
gaaaaacgatattaatttcccaaagaaaaatatttagcaagactttggtatattacagcttatattttatattgtagttaagagtccatcatttaaacggcttgagcttccaagaaagcattaaaattcttggaggcttctaataaccgtggagagatcgccggagacgtcaggtatgaaaccggcgatgatgtggagaatcgaacctgacgcagagaaggagactccattgcttttctgtctttcgaaccagaaacctttaaaacacctttgatctctttctcaacaggttccttgtcgaacacgaaagccgctgaaaccgattcgtcatggtcgttatcacctgaaccacttttgattagct

SEQ ID NO: 148463 - DNA, 427 bp, Arabidopsis thaliana landsberg
aatgcacaaaccaccacctccaagaactagctaccttgctggatttgaccaaacctagaacataaatgaggagacgtggaggggtaggagattcagcaccatgttgatcctcaggtaggtatttatcctttcccacaatttgtaaaacgttgttggagaacccggggtgattacaagacactacaactttgttctctatgtcgactaagaaactcaacccaaaacataaccctaaatgatagcggtcatcaaatttcgacactgtcaggaacttgctctatgaaatggcttcgtactctccatcttattcgctatccatacctcagagctctgagcagcaaatatacaaagttgttgcgcttctctagtcattgacaaagtcgcaaaacaataagaacgaggcgatcttaaatattaaccaaagaga

SEQ ID NO: 148464 - DNA, 206 bp, Arabidopsis thaliana landsberg
gcattcaatggaagttagtgcagtatcaggagtcgacacgagttcaactcgaccaaaatgctcgaccagccaatctaaactcaaaatatatgaataattcaaaatagatatataaaatattttaaaaataaatataattttctatgatatctgagtaattaattctaaaaaattttatagtaaataaaatatctagttggaatgat

SEQ ID NO: 148465 - DNA, 379 bp, Arabidopsis thaliana landsberg
tgaaaatacatttagaaactgaaaatatcggttgaggtctattcgggttcgggctggttctcaaatttaattgaaacctgatattgaacctgaatttaccgacaaattatgtatacgtattatttcgagttacatgtatccgtttgagtttcgatatttcaggtatctgttcaggtttcagatcctacacgaaccaaaccaaaatcccaaaataaacactttagatccactcgaaccaaagcgaactaggtttttcgggcttcggattttatggtcatgcctagttttgtcctttgaaacattaaaattagaagtaaatctacatatacatttttgcagtcattttagcaaataaattttgtacttgtatttacaatgt

SEQ ID NO: 148466 - DNA, 370 bp, Arabidopsis thaliana landsberg
cctcttttcccttcgtactcgtcttcacatctgaattccgacaagatattgcgtctgctctcctctcttccctcattcttgtcttctcattaccaaaaacctcttcttctcgtagctaactcaatccaattccaatctccattcaaatcgagcaccagataattttttctcctaaattctaacataagccctaaaattcaaaactgaaatatctatagaatctccttccgattcagacggataatcgccatcaacagcgtgtgaattcgatcaaaaatctgaactttccacaaagaaattcgaaagctcagatttttcgatttcgaaaattttgaaaactcagtaaatggcggattttcagacatcaaca

SEQ ID NO: 148467 - DNA, 118 bp, Arabidopsis thaliana landsberg
ctctacgaatcaaaaggatcagtgaagagctgatccacatatctaacattctccgttttccttttgtgatctatgaatgacgaaacgatccactatctttacggtattaacagggtct

SEQ ID NO: 148468 - DNA, 356 bp, Arabidopsis thaliana landsberg
ctcctaaatccttccttgagctattgcaagaggtattttacttactaactattttgcggctaggctagggctgggaagtttggttctaagaatcgcttgttttaggcaaatttggagtctttaccgtcgcatgtaccgacttacttgaaagcagcagttggacctccgagttcgtcttctcgtcgctatttttgctcggtttgtggttacattgcaggatacaattggtgcttatgtgggatgaggttttgttctattcgttgtcaaaatattcacaaggatactcgttgtcagaaatttgttgcataggaaaggagtgcgaaaacagatgttacatatttttcaaaatgtattgg

SEQ ID NO: 148469 - DNA, 557 bp, Arabidopsis thaliana landsberg
ctgtgttgaaaagtgaagaagccccgatatagagagagagtgtgtgtgtcgttgacgaaggaggatgaaggaagaggatgtgagctcgcagaacgtaaaccctagaagtaatcggaacagtgtagcctcagcttctgcttccgcctctgctactcccgttgataggttccgacgacgtgctagatcgccttctcctcctcaaactgctgctgctaggttcgtccccattttaacgcagatcgagtttcagaagtgtgaaattatgagttagttcgaattcgatttgttgaatttgagctgagacgagatgtatttagggtttcgttgtttgagatttgcatcttaattttgcttgcggtgcttttagttttctgtaagttttgctcttttggatatcgacgattgaattcaattgaatcaatgtgcagctctgcaggggcatcatctccagctgttctggtaaacgctggcagtgttgactggtcaggtcatgggctggcattatctgtgcgttcgtgtagaacttgggatagaggagatttacttcgacgtcttgc

SEQ ID NO: 148470 - DNA, 198 bp, Arabidopsis thaliana landsberg
gtctcccgtcgtctctctttcgtcctctccatcgatttcaaaatctctcttctgatctatatctctctccgcccatatctctcgtgaatgttctctgagaattctctagatcttcaatcaaaagttatctctctctctcacctattgtaaaagtcaccagtttcgaatataaccccctaattttctcaaaatcccaaa

SEQ ID NO: 148471 - DNA, 507 bp, Arabidopsis thaliana landsberg
tacaaaataaaacagattcttctctgtttagtttatcattacatagaagatctatggaccaaacgacgtccaccaccatttaaaccacaaaggagactagcttgtggtcgtttagattttccttgaccgttactaacaccgtcaacgaccttttgaacattggaggtaaaatcatgtacgggagtgactgtcagagaagcggagtcgccggtacgagcatcaagccaattgacaatgtcagcaaaaacgaggtcaacgttagcatcaggctcaccagaagttaatccatgccacattcctgggtaaagtttaatggttttgtcgcgtgtgcttgccttctcgaacaaggctttgcttatctctggatcagtcacaatgtctgcttcaccgtgaaggacaaagaaaggcaatgtgatctcgtggagagtgtcttcaaggtccatgctcgttctaagcatttcaagtgcggttttaagtcttggcttgtcttgatatatcagcttgttg

SEQ ID NO: 148472 - DNA, 223 bp, Arabidopsis thaliana landsberg
gaaaaacaattaagatggactcttttatgctccgaatgacaatgtaaaagcatcttatgatcattgagttaggaaaagagtgttacggggaaccttaatttgtattcgaccacaatttatataaagtacataataattttaagttcaaaatgatatttgttcaaacatgatcacacacaaacgcattcacctccccataaccctttttcgttgtctcacttgg

SEQ ID NO: 148473 - DNA, 309 bp, Arabidopsis thaliana landsberg
  unsure (1)..(309): unsure at all n locations
ggcccattgggccttttccatatatagttctattttcgtatttatttatgattacgtgcaatcaaacaaatttcacgtttatgtgattttgtcctttccttaattagtagtactatatttcctataatatatatttatggtgtttaggagattttttagttagtagattttaaatacaaaaccaaaattatgtgtgatttgtgattttcccattgaacttgagggttttgttaaaattatgcnnatattcttctttcttttttggacaaaccattatgcattattcatctaataaatttgaagtatcag

SEQ ID NO: 148474 - DNA, 210 bp, Arabidopsis thaliana landsberg
aataaaaagcaatatcaagcacctctgtattatgaatgcaatacaaatacatgacagaagaagaaggcctacattcatattcattcatcatcaacaacaaattacatcgttacacaaagtttgctgaataaataaaaattaataattactggaatgagttccaaacatcagtattgtgtggctttcacgttaaaattatacattcttata

SEQ ID NO: 148475 - DNA, 429 bp, Arabidopsis thaliana landsberg
caattctcccccgataactgattactcttcttcttcttcctccgtcgttgtttcatgcgacgaatcggtttcagattcagtcgtggtatctctcgatcttctctatctttgtcatggatgatctgttacaccagcgagtcgagcagtctcaggtaactcctcctcatgacgattctaatatccatggtgattttgataacgaggctacggatgaatcgcgatccgaaacttgttctgttgtgatagagggaaactgcgacatggtgattgaattaggattggaatctggaagtgttattgttgagaatttaggtgatagtgatattgatgttagcaatgattttgatgaacctgatgacgacgatttcaatgtggggaggactgattttgggctcgagttccgcgatattgcatcttcggggaatgata

SEQ ID NO: 148476 - DNA, 549 bp, Arabidopsis thaliana landsberg
  unsure (1)..(549): unsure at all n locations
ggaagatcacatgatattccgatatgtatctgtttcatcggccgatagagttcacgagggagattgtcatagtcattttacatgattctagtagaatctttatataaatgtttttgttactctgttttgaggtattggggacacactcaatagggtacctataagcagctagaagtctgcaaaagctttgacgctgcagctaagccactgagaattgcaccttcaacatttgggctgacacagaaatctccacagattgctagattcctgtttctatcccaaaggcacctctcctctacggctatgcttttggctggaaacgcacttcccctagagacaacagatcattaagctgacaagcgaagcgattaacagaaggcttaagagtcaggacgcttacnnnnnnnnnnnnnnnnnnaaaaaggggagagaactaacaaggcctgagcactgaaactctttgaacatctcttcagatattttgtttagtgtttcactcgatagcttttggaggccggtcttagcaataacactgttggcatagtctgg

SEQ ID NO: 148477 - DNA, 598 bp, Arabidopsis thaliana landsberg
  unsure (1)..(598): unsure at all n locations
ctcttttttacttttccaaagtctctgaatatcaaaagtatatatcttttgttttcaacttttgcagaattgtcttcaagcttccaaatttcagttaaaggtctcaactntgcagaattttcctctaaaggttcagactttggggtaaaggtgtcaactttggcgatgggtcttgacggaaacaatggtggaggggtttggttaaacggtggtggtggagaaagggaagagaacgaggaaggttcatggggaaggaatcaagaagatggttcttctcagtttaagcctatgcttgaaggtgattggtttagtagtaaccaaccacatccacaagatcttcagatgttacagaatcagccagatttcagatactttggtggttttccttttaaccctaatgataatcttcttcttcaacactctattgattcttcttcttcttgttctccttctcaagcttttagtcttgacccttctcagcaaaatcagttcttgtcaactaacaacaacaagggttgtcttctcaatgttccctcttctccaaacccttttgataatgcttttaaatttggcaatgaatctggttttcttaaccaaa

SEQ ID NO: 148478 - DNA, 348 bp, Arabidopsis thaliana landsberg
tcgggtatgcatcggtattccaatatgaggtttgtttggttgtcgtcatgtgtcatatcccgaggaggctgcagggatgtttctcatgctctgcctaatgtagtcgtggaagtatttggagccgatggtgatgatgacgaagacactgttactggggattatgttgagacattgtacttgtatcgatcccttgatggcccaaggaaggatgctccaaagtttgtaacaattttatgagaaaaactttggtgcaaatgaggccatgattggggaaaagcaaaactagcaagcagaagataatgtgtttgtaaactgtaagtgcttcaggtacactgcatgatttgtttt

SEQ ID NO: 148479 - DNA, 1355 bp, Arabidopsis thaliana landsberg
atttttcttgattgcacagacttgctggacttgctttcatgttttcatttagtatcctcctacagatcctggtgcgttggtgaatatagctatctgcttataacccttgaagcttgatcataagatcatgacttagtagctttaaatcctgcaagagatggttagctagttctgctgttaggttgtgagctgagtatactggtctccttttgtacccttgttgatgtagcaaacagagttgtgagtcttttggcccgttttactgggagagatactctgtgaagtaaagtttgttacattcaaaccttctttcatatttgaagttttgagctttactctcttgtagtatgttgactagcgatctctggatcccaaaaaccaaaattacacttagaattcttatccttacaacactatttgaccggagcatatggtaagctggggtccttagccgacctcaatgtctaacttgttaattgacttagactttctgaacaacttttataactcaagcatcttctctcctcagcttatatcaggtccctgtatagggtatagtttttttttttttttgcacttcgattagaagaagaaaggatcatctgatttacaaatcaattacgtttcccatattttgtgatttcctttggtatacctggttataccatgcaatgagtaacacgtgttatagtcatctgggagatatagtgataactatttgttcataatggtcaggcatgcgcgatatatggtaactggtggccaatgctatcagcactcatgtatgtagtggtgcctatgccttgtatgttctttggaggaggctcaacccaattccttattagtcgggacggtggagggttagttactagagactttattgcttctttgagttaaacgaaagatcgattaccaaattggctcgtccataaaacgcaggtggatagacgcagcgaagttcttgaccggagcatcgaccgtgggaagccttgctatcccaatcatcttaaggcacgcacagatgatcgagacaggtgcaatgctcatagagttcacatcattcttcatattcatttgcactgtcatgtgttttcaccgggctagtctcgatgatgactggtaacgtagatgttgctgctcgtgaattactaattggattcgtatgagaaagagagtgtgaagaaaagatgagggtactatgagtggttaagaaagttgtgttcttctccctctttttgtaaagctttgtatcactcaatgtttgtaaaaagttttattcatcactgtgaatcttttcctgaaactaagtgccaaaatattttgtttcgcatgtttaggaaaaagtttaattcatc

SEQ ID NO: 148480 - DNA, 112 bp, Arabidopsis thaliana landsberg
tcaatctcaattatgctctctccctctctctattaaacagtcgatttcttacaaaaattctcacttccgtgcaagcaaatgcagtcttgtttcgagtttgattcacacaagg

SEQ ID NO: 148481 - DNA, 415 bp, Arabidopsis thaliana landsberg
ttatctaccaatcaagtgttatatatatcaaatatatagataaatatattcatattgaagtcatacagtgggttaatgattatgcataaatatatttatattctacttgttcctaatttcggataatattcgaatcatatatgtggacagaatctggatagaatttccaactaaacattataattattaaagaaatatatgagatatatatataatacatgtggggaaatagaaggaaaaaccgattgttgaaagaaagccatccaattattgggtatgatcgagcaaatttgggataagagaaaatgacacattcatcgacgacccaaaactttccctattcactaaacaaaccagctttttgagcttatctaaaaattctatatgtacataaatacattacctgtaaatttac

SEQ ID NO: 148482 - DNA, 375 bp, Arabidopsis thaliana landsberg
gagattagttgtcagatagatattcgcgagacgagaagctccaattaaaaaccctagagctcatctctctctccaggtacggccttttcgtttttggctttcaccggcgtggatctccggtgacggggagattcggaatttcggagagattttagatcatgtatagggagagaggtatggttggatcgaagtcggaggtggtcgatcggaaacgaataaacgagattcacgataacaggccttcgcattcgatgtctcagcctgtcaatggaaaaggcaaggtaacatcgacctccgttttgatggggaagcagcaattgcatgataaggaatcttcacgttctggttctatctctaagactaacatttccgacg

SEQ ID NO: 148483 - DNA, 325 bp, Arabidopsis thaliana landsberg
agttttagtgttttgtcggccattatcattaatataagaaaaataacacgaacatgttcctttaattacaataatatcgccaaaacttgttcctcaatggtccaaagaaactaaactacgttactacaaccaattaaccaataaccatcctaataacaaatattaatctagctagaacttttattagttattttgaaataatataatgttttcatggatcaagaggtaaagccttgttgtgaactggtcttcttcttctaaacgtacgataatccatcgatagatatttcgctagagcttttttctcttcttcttcttcacttag

SEQ ID NO: 148484 - DNA, 899 bp, Arabidopsis thaliana landsberg
agactttctctggcctcttcaagctctctctccagtatcccaacatgtgttcccaaaacgggccaaatccgatcagtaatccccggcaatatagatcaaaagcttcgtctagcaagactgcgctcactgactcggaagtgatgttgttgatgtaatgccacatggagatgaatgtgtcaaacgggttccggcacaggtacacaaccttcacactgggattctcgaccgaatccttaagggcaccgaacggtacgtgggttgcgaatgttcttggactggctagacccgagagatcgggaacatttccgttggcgtaaagcttgtactcgaagaaaggtacgaggtcgtgagggttggatgtgagaagagggtggtcggaacttgatgaggaaaccggatcaaaccgatgacgggtaaggatggtgaaagttaaagcttttaaccaggttgtgccagatttaggtatggtggcgaggacaacgtcgtctggaagggactgaaaatgtttttggaaagacatgatagcttgaatctccttagcttggcaccgaaacccttggaataagtaaaggtaacgatttctccgtcctctctccttaggaagagagtccaacatctcttggaactcgtagcttagcccttcttcttcttggccttcgcttttgccttccttaaggagctcgggcttgtgacacatggagaaacttgggatcgccattggaatgctcttcatgcttgaggtcgccattgtttttttttgttatagatatatatgaaaattgtttatttgtaatggaatctttgtgtgttggtgtaagatttcgagatgaagttgggtgtttatataatagcgcaaaatgcatgagatgcgttgtgaagagaagagagcagcctcagtt

SEQ ID NO: 148485 - DNA, 433 bp, Arabidopsis thaliana landsberg
agctctgtttttgctctgtttcaggctctgtgttcttgatttcctctgtttttgcttccttgacttctgttttgactttatcagctacaacatctttcgtcttcttgttcttcttgtgaagataagatgatctgatcacaacggggacacactcaccggagcttgtgaacacaaatcgaacaagaggcgggccaccggaatcgagcttcttcgagtagatgctttgcctcttctcgtctagctcggagagaagctcagagaatttatcaagtccacgatttgaataagggttcttgcttgcttttcttgattttttgggtgaagaacatggagatctaaatgggctcaccatttttacttcgagtgatgatcttgtggtttctttaccttgcaatgttcttgtgagattcaaagagttttaagtttttttttg

SEQ ID NO: 148486 - DNA, 401 bp, Arabidopsis thaliana landsberg
ctctcttattttctttatattagtcatctaatacaatcactacatttcttttggctttcctctcttcctccttcctgaacttgatcccacaagcattgcataaactctgaaacacatttaccaatttaaaaattaataataattattaagcagcataattaatatttaaacatgatttattagttgaaaattcggagactaattaccttaggaccaagaggacctcttcgccacataggagtgttaagtgcgttacaattcatgttcgtacacttcttcatcccttcaatcctccccccgcagaatccaccacaaccgcgaatccgcttcggggttgcgttttccttccaagagtttgtcatcaccgtagagttgttacgacgagctctcctagcaggaac

SEQ ID NO: 148487 - DNA, 128 bp, Arabidopsis thaliana landsberg
tttacctaagctcagaatctggatttgttgtcgtgtcggagcaagaacccttgttttcgggcttggacttgtgtgatggactctgggttttggagtaaagcactaaagtttagcgaagtttggtagcg

SEQ ID NO: 148488 - DNA, 344 bp, Arabidopsis thaliana landsberg
caaatattttagttttcaagaattgtgtaattgtactagtcatacgtgatttatttgaggatttggactaggctaatcgactcttgtccactgatcgtaaacatttatcagttgtcaatttaacattttgttatctatatgaactatatttgttaatttacgcccaaaaaatcaacaaatgctaattaccgcctcaagattagaaattttgtatgaaaagtatatgttataattgacggaagtttatctattgatttatcattgattcacttcaacgaatatttaatatctcatatttgttatgttagatgtgtaaggagaaaaaaaaattatttaaatgaatt

SEQ ID NO: 148489 - DNA, 791 bp, Arabidopsis thaliana landsberg
ggccaagctgaaaaatagaaagaatattgcggtggccattgctcgtggaattcttgtatctacatgaaaagtgcagcgagcagattcataccctgtgacataaaaccgcagaacatactcctagatgagtattacactcctcggatctcggattttggtctagcaaagcttttgttgatgaaccaaacgtatacgctcactaacatccgtggaacaaaagggtatgtggcccctgaatggttcaggaacagtcccattacatccaaagtagatgtttatagctatggagtaatgcttttggaaatcgtgtgctgcaagaaagcagtcgaccttgaggataacgtgattctcatcaattgggcttacgattgttttcgacaaggaaggttggaagatctgactgaggaggattcagaggcaatggatgacatggatacggtggagagatatgtgaaaatagcgatatggtgtatacaagaagagcatgggatgagacctaacatgagaaatgttacacagatgcttgaaggtgtgactcaagtttttgatcctccaaatccgtctccttatagcactttcacttggtctgatgaatctttgtctagtgatccagtgtcacttgtttgataagttgataaaaaaacaaaataaagttattatacttttgtatggaataaactccaatcattgatattacgttaaataatcacacctttttttaattatgttgatataaccagcacggtatgacacaaattgcaactattacaatttcgttaaacaaaattgac

SEQ ID NO: 148490 - DNA, 474 bp, Arabidopsis thaliana landsberg
tttataatattattctttatatatataattgacaagtcaagttaataacaacatataacttgtacacaattactaaaagaaaacccacacgtgatcataatgttcctttcatacttccgtcttttagtgcaaataacactggtcactccacagtagctgttgtctcatatgtcaactagcatataagttgtttctttgatttttcaaacttcttaaatgtttgagagctacttaatattacgttgttatactaacataatagttttgactcggcaggtctttgaattatctataggtgctgcgtgcagactaacatggccatcggaccgccgaattgttcaagttttagatgattccaccgatccagcaatcattgtccgttcttaataaactctccatagacagagttcgctaataaaacttaatttaaaataataaacataccaataacatgacttatgacattgctgaaca

SEQ ID NO: 148491 - DNA, 272 bp, Arabidopsis thaliana landsberg
ctctcgtgctagagatgcgtaccagaatccctcctactaaaaatgtcaacttccacagcaagcaaacgtttaagcatcaagagttggaatttgtctttttgtgtttgtttagtattgtccagtgtttagttatcctatcaggatgtttaggttttatgttgtctcttaagcaaacactgatatgttatattctaagattcgtatattgttatgttctctgttgtaatgtgtgaatgaatactaaagaatagaaaaccatgatttgttgtgat

SEQ ID NO: 148492 - DNA, 341 bp, Arabidopsis thaliana landsberg
aaagatcgcaagaactcaagctaaggtacaatgcagaaagaggtaactaattttaaacggtttataaaaaaagaaattccttgaaaaatatgtacaaccaaaattaattcctctaaatattgaataaaagctttttagaacaaattaaaatgctcagatttgttttggtctatatccctgtttcgttatagttttctttagtatacagtagaaggatcgtcttacatcataaaagtccagactaatttcagctggaacagcaagatcttgatgaatttcactggtgaatactgattaaagggttgtatcacacacactttgcatatctctattcattatct

SEQ ID NO: 148493 - DNA, 547 bp, Arabidopsis thaliana landsberg
aaattttgatgcgattgggtttgaggatggaatccagattgaccgagttgactaagttgcaattctcggtcgtagaatgatttcttgaactgatcagagagaacgaaccaagcatcggagacgattttaagagctcgatcggcgaatgggagacgattaacggaaggattgaggagaagagcgagtctacggtattgagtcgcgacgtgttcagggttttgagctaaacgaccgagtcggagaacggcgtaccagtctggcaagttggaatcacctaaacgagtctctccggcgagaagaatgtcgcagattgcgaggatgtagtctgcagcttctgctcgggtcgggtcagcttcgcatgcgcggatcgcaaatgtctttgctccttgaagatcactagacgctagaagcttctccgatgttacaagccaccgatccgcctccactctgttaccaccaccaccgccaactccgccgcgtccgcctaccatatcccctatttctttttgttccctttcgtttttcctctctccccgttgaatttatt

SEQ ID NO: 148494 - DNA, 80 bp, Arabidopsis thaliana landsberg
gaacctgcatatgattatatatattttacactccttaagaatagataaagatagacataaacaacattaaaaatagcaaa

SEQ ID NO: 148495 - DNA, 347 bp, Arabidopsis thaliana landsberg
gaaaattttgactcaaatgagttgatgggtcaaatgagttgatgagtcaattggtttgatgagtcaaatgagttgggttgtaatggttaatggtttcaatggtttacccaattaacccatcaagttttgtaaaattgaattaaaccaactaaaatctctaaaccaatgtcaatttaagtttaaccaacacatctaaaccaatttaataaaattaatatttttccaaatatcttaaatatacaagcgatgaaattgagaaaaagtaaactcgtgatttttccacaaacaaaacataaacccgtgatttttccgccaaaaacgtaaacccgtgattttcccgccaaaaa

SEQ ID NO: 148496 - DNA, 292 bp, Arabidopsis thaliana landsberg
ttatgaagaagcaactgattccttcttatatcaaccaagtcataaaacaaatcatacaaatcagtgaaccacagaagaagaaaaaaaactaaagctggagatcatcagacttatagcacaaactcaaacacaaaccttgcccaatttaccaacacaaagaatgttgttgccaatcctagactttgaaacaagccattgaaaaaacaatctatgcaaaagacagaaaatctatgaggcagtctctaaataagaaacagattctcccacgcacctagattttaagaaaagaacc

SEQ ID NO: 148497 - DNA, 97 bp, Arabidopsis thaliana landsberg
gttgggagaccagacgatggttggaacacacaggaagttgtgcgaaccaaatgctcagtaagaatcggtcggttggcttaaaccgagaaaacccgat

SEQ ID NO: 148498 - DNA, 213 bp, Arabidopsis thaliana landsberg
attctgcaattgcttcatcttctttataaatctcggtgccaacatccaccgatgtccaaatcctcctcgctggaatcgtaccgggatcctacaacataaacaaatcaaaaaccaaaaccggaatattcaaaagaaacaacagaaaaaccaaccggtttactgatcaattaatcacctggtagaagaaaagcctactggacaagccaccaacat

SEQ ID NO: 148499 - DNA, 129 bp, Arabidopsis thaliana landsberg
gttaaaaccctcaatttgtccgacggtgttacgcgacggctatattcggcggcggaagctttttccatctcactctctttcgactaatctttccgccgtctgaagaatgtcttcttcgaagcggaagcg

SEQ ID NO: 148500 - DNA, 388 bp, Arabidopsis thaliana landsberg
cgtgggacacaatcacacaacaaaactatacaaatattattttctcatgttaatagtgattagtggaatgattgccaatggacaatgcggccttcttatcccttggtggtttttattggtttctttttcttggaaaaaactttgatactgttttagaattaaaaaagaggtaaaaactttttttcttctaaacgatgcacgagttctttaatgatgaagattgtgaaacttgctatactcatatgagatgggacctgtattttttttatttatatataaactattattctctcactgacaagaaattcccaattttgattttgatttatgtttttaaataacaatatctttttaaaaatatctctctatcttgcttttttaaaaacac

SEQ ID NO: 148501 - DNA, 899 bp, Arabidopsis thaliana landsberg
ggagaaggtaaagtcttcttgaagtcgcgtatgaaatggattggtcttcttggtcttgttctctctgctttctctcttcttgtccattttcttctcgctggattcacagatgactctatctccgattactctatccctgtcactatcttctcttggagacctatcttcgacaatcccagatttgcccgtcatgtaaaaatctcacctttctcctttgtttagtggatcttgaaattttattttatttcatcaagtgggccaatatagaatcgtttcttctttccttaaacaaaaaagttttacttatgatgactctaaaaagtttatcaattggtttatgttacagacaccattgtatagaagactttggggaccaacaagacatgtagagacattacttcctgatgctaatcctagaggttttcattcaggttaggacagttcatgttttttttcctacattgtcggatctgttactgaatcttttagattgtattgtcttaagttgaatttaaattgatgttctgtttttgaattgtgtgtaacagatcctcctgcaagaacaaatggttttgtttttgttagaatacaaggtggtttccatgagattagaaactcggtaagaacaaaaattacatcgatattgaatgttgtgtgactcttgttataagtttttactatggtcatttttttagattcctgatgttgtagctgtttctcggcttcttaacgccactttggtgattcctgagatacaatcaacaactagtagcaaagggattaggtttggacttaacactgaaacttttatagtctctatgttagattagattcctgatgttgttgtttacttacagttcacagttcaagagctttgcgtatttgtacaatgaagaaca

SEQ ID NO: 148502 - DNA, 369 bp, Arabidopsis thaliana landsberg
  unsure (1)..(369): unsure at all n locations
gaaaaaggtaactgctttttcatctcttaattataactcctttcctctcttctctctctctcttccatggagggttcttcttttagtagatctctgcaccacccaaagcccaaagctcaaagctttgcacagaagatacagagagaaagaaaccacatacaaaaaaaaagagtctacttttctttttgtttctacttgctatttattacttttcacaccacaccctctggtcaaatgactttctctctactcttctttcctttgggctgagacaacagnagcaagagtccgtgaaagaagaaaacanaatgttagaaatttgaagaagatgagggaaaaggaagcaactctatctgttattttgactga

SEQ ID NO: 148503 - DNA, 88 bp, Arabidopsis thaliana landsberg
tacttgcgagccaatccttctctgtttcctccatcacctatggtaatgtgtacgggaccacatggatctgatttaccattgttgacac

SEQ ID NO: 148504 - DNA, 130 bp, Arabidopsis thaliana landsberg
ctgatccaatgcttgtcttggagtattctatgcttgtcctggaaagctgtccaactcaaaccatcgacttgtttttgtctggaaatatctcagctgaccttgtcaattcgtatctgaagcagcatgctcc

SEQ ID NO: 148505 - DNA, 513 bp, Arabidopsis thaliana landsberg
acagtacaagctacatgtatataaatatacgtatctatgcaacatctactgggttttggtctcctttcatgttcgaggtaaaaaatccacctcatcatttttttttaaccaacttgcatattttaataacttgattattaaatactaaagttgctttaattactatcattttcgaagagtgtgagtcatatatagtggaggtaaccaacttgagaatatttgtaatgataatgttgtttattgtgtttttggttacagaaaagtccaaaggatataatctgtaaaggaggaaggaacagataatgaatggggcttaatatatataacctatgcttttccatgtgagactacaaaagacaactccaatgaattggcaggttgttactagactatagattttaattagggtatagacacaaagaaaaggaagaacattatactagttcttctaacaaatgatccaccgttacacttttgtccttgttgtttgtttgtataaaccatattttcatc

SEQ ID NO: 148506 - DNA, 310 bp, Arabidopsis thaliana landsberg
agttcaaagctacagtgatattgtaaactaaccagtccttacacatagttttcaaaatggcttagctcgagtttaaatagtccgtacttatccctacccataaccaaaaccaaaaaccgacgcttcctatatcactaccaaacgtttacacagtttgtttctgcaagtttttcattacgactccttcaagaattccatctgttccaaagttgccagaaaactcgtgtggatggacaggaccggggaggcggaacgagacagaaaagttaccgggagggcagagactccgcgtttgcatttcaaacacatg

SEQ ID NO: 148507 - DNA, 243 bp, Arabidopsis thaliana landsberg
gtatcagacaatgtggggaaatgatcatttgacatatcgtaaatcgcattaggagatgtttacaaaaaactgtggtaatatggattcatgtggatgaaaccatggaacaatcaacaattaccccatcgatttgcattttgattatgataaaagaaccctttttgcaacattatagaatggaccgtctctttactttgatattgccttgtatttttcatgaatcatgataatatcctttatgat

SEQ ID NO: 148508 - DNA, 188 bp, Arabidopsis thaliana landsberg
ctgtctagcataaaaccttattgtcagaattgtgatttgattgttggcacacaccgatcttaatttttaagtatagttgaacgagtatatgagaacatgcagtaattctagtttattaatttcttgattgtttgtggataaataaaccttaccttggatacactcgatttttcctaattgaaaacagt

SEQ ID NO: 148509 - DNA, 188 bp, Arabidopsis thaliana landsberg
attacttatattactacatactattgtagttctatatttcttcctaccaacacacaaacaaaaagaactttacacaaaactacttcacttatcttaagacaaaatataattaaggcttggacactactagcaagtttcgtgttcttctgcatcaaaccgaggaggcatgactctctttcgcaccagca

SEQ ID NO: 148510 - DNA, 337 bp, Arabidopsis thaliana landsberg
tctacttttgaagaaattaagatcccatcggcgtaataacccctctaaaacgtttcctgatgtgctactacgtccaaccacagtcactgttgcctttgtacgtgctgacaaatcaatgacatcatttttgttttgactcgttttaggcgaagcaccaggaacaaaaccatttacaggtcccggcagagaatctgatgttttagatggaacactggctacagaagataatcgtgcatcatggttacatggtgttggaccagaagcagaatctgtatcagaaagtgccagttctggttctgtagtagaagcagcagcattaccttcactggtctctgta

SEQ ID NO: 148511 - DNA, 217 bp, Arabidopsis thaliana landsberg
tattcaaatcagttgataacaaatgccaaataatgattccattggctctttattaatcacatcaaacataatataataaccactaaaaaacagttttaaaaaaagaaaacggatcaactaatttaatcaagcagtggaagtgaaattgaagttggcgcagttagtttgacggcccaataacgtggaactaaacccaaatttgttactcgccaaatca

SEQ ID NO: 148512 - DNA, 412 bp, Arabidopsis thaliana landsberg
tgagatttaaagatctttatttcataaagtcatgtagtaatatattctccacacatgattgattacaagagcaaaataaaccacacataatttatatgatatgataaagtaaacactcacatatacaaacacacataagatatctcacttctgtttcaagaaaaacaaaagtctagaaacaacattttttgtaaaataaaacaaagtttggaaacatttttcatttggttcttaaaacttagagaggtttgacattgaacctgtaaacgagcttcttcttcttagaggttgggttgtctactgtgagtaaaaccttgccaagctcattcactttgaagctatgggttaacaccggttcatcggatggtctcatcttcctcggtttttgtataaccaccgggtaagcattctt

SEQ ID NO: 148513 - DNA, 231 bp, Arabidopsis thaliana landsberg
gagactaacttggccaatttggtgtgtactattctgggtcgtgtagatcctataagagctaactattgggcatggggaagagcaagattacagtggcagcaatttgaatatggtacgcccccaaaatcacacttgaaaaagacttgattattagttttttcggtaattaactgcttatttatgaatccacatgttcatgttaacatgtatcaaaacaatcttgatttctca

SEQ ID NO: 148514 - DNA, 448 bp, Arabidopsis thaliana landsberg
catcaaagactaagatcaccactttgatccagttgaaactgaaattgagatttcttacggcaattcgttgggcgattcaaaatggcaagtgagggagcaaaggatccatggaaaggagaagagtggggaactgagaatgagaagacgaagaagccaacaacaagtggtgtgaaaacggtgacgagagcgaggaaacaaataccgaggggacttgaagacaagtacgaagcttacttcctcccgcgaaagccatggccaagggctcttgcctactatggaagtttcatccttggtgggatcggtgctggtatggttattgaagcttggatcaacaaaaaagtcaaagaagatggaggagtcatttgggaattcgacaagtgatgatagataagtatgtaaggaacatctagagagagtgtctctcttaacacaaatccgtagattggat

SEQ ID NO: 148515 - DNA, 346 bp, Arabidopsis thaliana landsberg
aaaatagaatatcctcaaattattttgcctcttcactcactcacgatctctacattttgcaccccaacaaatatttgacgacaatcacaaaagaatgtataaaaaagaaacaacacagttaaatgtacaacaactcaaacaacactttcagctaatattattcaggatcaaaagaaaccccaaaacaaatgctgaaatttacattgaacattcacattacgtggttaaagtgtcaggaagagccatggaatgagctccaatgatcttaccaccaacatctgggaaggtctcgtaatcaggaagagggcttactttaccatcaacgtctacttgtagaggatacttt

SEQ ID NO: 148516 - DNA, 387 bp, Arabidopsis thaliana landsberg
gaaagaaaaaaaaagagacatgggcttatatttctttacgcggtccctggattcgagaattaaataatgtaatttctgtctttcttggtgtctttgttcagactaaattgtgatatagtgagcatagcaaatgaagtaatggaaatttgaatatatcataagcaggaacgtttccacatacctagttgcatattccaatgcaaagaaaagaaacatgttatttaagaatataacaagaggatgtatgagttatgtgggtaaaattgaagttttttgctattttggaaagctttactatttttatttaaatttaaagagataaatgatagggtaacgtactaacatgattttgtatcatgtggacatttaaattgtctttataggatg

SEQ ID NO: 148517 - DNA, 138 bp, Arabidopsis thaliana landsberg
ctttcataccggaacaaacccgttcgcaaacgcgtttatcttcagacacaaagaagaagaacagaaacaagaaaacgttccaccaccgtctcatacgcaaaagataaagcagaagacggtaccatcaacatcatcatc

SEQ ID NO: 148518 - DNA, 430 bp, Arabidopsis thaliana landsberg
  unsure (1)..(430): unsure at all n locations
aattaggcccaaatcgatgcctttaaatgtagtcaatgatcgtgatggctcttctcgcattctgttgaccgacccggcgggatcaactgctgaggtttttactctttccctctcttctcttcttcaatttttaccctaaatgagttttttttttctcatagcatcatggtggtaatctaagaagatttgatgtttagtagtttagtactttgagcttaaatgttgatgctttcactaatgttgttgtttggattagagagggtttagctnnnnnnnnnnnnnnnnnnnnnnnnnngctaattttctcgaaaactttgtcaagttacattttttgtgggctggataatggtttcaggtgcttttgtatggagggcaagtggtttcttggaaaaacgaaaggagagagaagttgctttatatgagcaccaag

SEQ ID NO: 148519 - DNA, 325 bp, Arabidopsis thaliana landsberg
gtttgttttgtgtagctctgaggaattgttatgagtctttattccagctgccattgctggagctaccgctgctgttttgtttgttccggcaacagttgtgtttgtctcttcgatatcataacctgcgttaagagatattcacagatcataagttagaaaacagagggttttagtgatatataacacacgtaagaggaaacttacagtcaaactttttccaagctaagacgagtttctccctgtcgaatactacacgatacccggtcatgtagttttctgtttcattaagagtaaacaatgtcattatttagcggatgttccatga

SEQ ID NO: 148520 - DNA, 357 bp, Arabidopsis thaliana landsberg
gctgctcatttatcgacaagaacaaaaaaaggtttacacaagtttttgtttttatgtttctgttttgtggttaatggcttaggcaaatatcttgtgggtttggtactgctttagttcttatgttcacgaggaatcctttgctttgaaagtctatggccgtgtaaaagagatatgtatttaatgtaatcacaggaagatttacttttgattcaaaacccaagaaagttatgatgattcttggtttaatttgttttgacaagttttgtcttttgtttctccaggtttgttttgtctcacaagtgatggtcgtatgactcacatgcatgtcctctgaactcgtttagcatcaataagctt

SEQ ID NO: 148521 - DNA, 239 bp, Arabidopsis thaliana landsberg
agtttgaaccatattaatcttatttctccttaaccggattcggtttaccatagaccaaacccaaaaccggcttcaactaattacactcaattcctcgggagattgttaattaaacagtaaacaaccctctgactcactagacttctgaatctttcacaaaagaatacgtctttgtaggcttttgctttctaccgttgcttacaagcttcctctccaccggattctccttcaattctcca

SEQ ID NO: 148522 - DNA, 138 bp, Arabidopsis thaliana landsberg
tgtgatgcaaacagatgagatgtgatcagaagtcactaagttaagcgaagcaataacagttttggggtttctaacagtcctaagtgaacatgcagaaaacagaaacaataacagaattattaaaatcactcgaccaca

SEQ ID NO: 148523 - DNA, 67 bp, Arabidopsis thaliana landsberg
tgttgcaacattcatggataaagggccttaccaatttcaggcttgaataagaatacatagtttgcac

SEQ ID NO: 148524 - DNA, 70 bp, Arabidopsis thaliana landsberg
atttctctcgctctctatctctctcaaacactatggaatcccaaacaaagttcgattatgaaagtcttgc

SEQ ID NO: 148525 - DNA, 391 bp, Arabidopsis thaliana landsberg
ggttgagttgccattgtaccgagtagatcaaaatcttgggagaaacatcatttagcaagagttttaaagaattgttgtataccataccagaaagaaaggaagatagatgttctcatcaatcaattcttgaagatacttcaactgttttggtctcaaatcttaggcatgattcaaaatcaaattgcttcattctttccctccccattccagttttgcttctgtaattcgttctcagattaggccggggactgaaccgaggagagaatctgtggttttgaaaagatgctaaagggatggcccagattttgttgaagtgatgataactgtgaggaaatgaatgttttgtgttgtattcttgtgtcatgtctaaaacagatatgataagtcctat

SEQ ID NO: 148526 - DNA, 530 bp, Arabidopsis thaliana landsberg
aagttacatttattttacagctcgaaatcgatgctcgccgtaaaggaaacgagttcaaatttctcaatcactcagcaagacctaactgctacgccaaggtactaagccgttatactttatcttgaacaaatactaacattatacaaacaaaaatacttatgttagtttctttagttaaatcgtgtatcaactttactcgtcgttgattggttttcatattgaagatattccaagaaactcaaactcattttaaatgattttttcttgtcgagaaaatttaggttacgaaaatttatggtttcgtgtgcagttgatgattgtgagaggagatcagaggattggtctatttgcggagagagcaatcgaagaaggtgaggagcttttcttcgactactgctatggaccagaacatgcggattggtcgcgtggtcgagaacctagaaagactggtgcttctaaaaggtctaaggaagcccgtccagctcgttagtttttgatctgaggagaagcagcaattcaagcagtccttt

SEQ ID NO: 148527 - DNA, 320 bp, Arabidopsis thaliana landsberg
aaaaactatatcacctttcactcccttatcaagtcaaccaatgcagagtccaaaaggaccaaaacccacactgtgtactggtttcctatataaattcttcatatgaccaacacataatttaataccaaaacctgaaagagccattaaatgaatgaaatgcgttatcacagtcgagagatattcgagatatttggatcatgttagaatccgtatccattttggtgttgatctcctgctcttctcgatcttcttgtcgtacttggagatgccgagtatgagctgcttgtcgaatactttgaagatgtcagtaactcctgatg

SEQ ID NO: 148528 - DNA, 476 bp, Arabidopsis thaliana landsberg
ctctcttatgtctacttcccagaaaaatttctgcttttgaaattcaagatgtactcgtcgtcgtcctcttcttctatttttcttcaatttccaccggcgagaacaaccaccgcgtctccatttatactccgccgtagcaggaagcgaggagctcgttttaaacgacagagtcggaatttagttcttgtgaattcgtcaattttccctccgcctttcgatggcagcgttcctctcgattcctccttagctccatctctcgccggaatcgcttccggcttagccgtttatttatcgtcgaggttttttggaaagtctttggagaagattagtgataaaatcgttgatgatgttgttgttggggaatggattcttttcaccactccgacgccggtttaacagatttgttcttcttcggtgctctttgctctccttgaatgatgactctaagaagagttttagcgatagacttgtcacag

SEQ ID NO: 148529 - DNA, 269 bp, Arabidopsis thaliana landsberg
ataaaccataagtcctggggatcgttcagaataaaacggaaaatttcattttatttcaatggagccaatcactatctatcgatatatcgagatagatacttaatttataatttagaataaacctttttcttcattaattttcatagttgtaatttttttatatgaattttcctcgttcactagctacaatcaaaaagttcataatactttcttttttttttgtatccccactcaatcttggttactttttttatcacacggccttgttt

SEQ ID NO: 148530 - DNA, 317 bp, Arabidopsis thaliana landsberg
gaatcaagaaaacaaaagcagaaaaaggttattgattattattcttacatgtagtgcacatgaattttgggattaagggagattaggaatttacattgccgctaggtgttttgcaaatatcatgtagatgagttttttttctttctttaccataacaatatcaccacgagcgaacaaaatcttgtttaaaaatgatcagtataaagtttggtagtgaattatacctttttttttttggaatttgtgatggcattatgggttttgtaatgtttacattgattagtgttaccaatgtgagatggagaatcgagtgttgc

SEQ ID NO: 148531 - DNA, 248 bp, Arabidopsis thaliana landsberg
  unsure (1)..(248): unsure at all n locations
ggaaaaacagaggaagaagaagggttcgtcgcaagatggggcagatgagaagtntgctccaaggtttgatgggttacgattcatcgagacgcttgttactgctcaccgataacatttgcattgttctgatttgtaagggttcttattgtttaccccatttgattaactacaaagatttactgattttaagtttcgttttttttctttctttcacatcactattgtaacttcggcttaaagtgtaccac

SEQ ID NO: 148532 - DNA, 224 bp, Arabidopsis thaliana landsberg
cactaagatagggacgttcaattttgtttatctgtaatgtaaaaaggcaatgacacaaattaggaagattaaaaaccaaaaaaaaatcgataaattacaagagttgtgatggatgatggagttgggtgaggagttgatgtatgtcaggagcatgttgatcatctgcacggatgcgatcaggttgaatccaacggccgtcagtgttcctcaccatccctttgttt

SEQ ID NO: 148533 - DNA, 526 bp, Arabidopsis thaliana landsberg
cccttttgcagctgcaacagaaaatgtaatcatctatacaccagcttaaataatttaagttgcacccagtctaccaaatcatttccttggaaattgttgggagaaccctgaactacaaagggagcgtaaattaatatgttgcctaccattggtcttggtgtcatctttatcagcctttgtgtctgcaagtgcaagatcagaaagaaatagttagtttcttagcctggatgaccaaaatatgtatcatgtactctcagcatggtcaatgtggaggcaacaactcacctgcagagcttctagtttttgtctgagcggaacggccagacttggtacctttttcaactccttgctttttgtctagagctttctgtttgacaagattctcctcggtatgtttcaacaatctatccgcactaacccattcatcccaactgttggcaagacaatcatgtcatgggtcccaatctaatgattttgctacataaaccagaatcgacatgagagcagagagagatactcacttttt

SEQ ID NO: 148534 - DNA, 167 bp, Arabidopsis thaliana landsberg
aaataaataaattgttatagctttgtagattttttcgtcggttcttttacattaatagagattaattagaactagtccaaaaaaaataaaaaactatgagaagagaagaaaaagaatgattgataatttgttaacagcttctttctaaagatatctgatgatttcaa

SEQ ID NO: 148535 - DNA, 369 bp, Arabidopsis thaliana landsberg
tgtaagaaaattagtgcaaaaacgtatgacgtaaatgatcggtatcacgaaatgtggcacactctgagttgtcaatattcaattatattatacatcaatccattatccatattgacccaccaaacaaaaatctcactgcctttcattattaatctcactttctttccaaatcctcttttctatttagtttaatcccaattttttaatctattctcgtgactgcattcgtgtcccttttatttgattcttcatccctcgatctttgtttaatcggcgcatcaaacgagacgaatattttaatttttccttaaacaactattaatatgagactgagagcatgtaaaatgtaaattagtgactagttgaaat

SEQ ID NO: 148536 - DNA, 79 bp, Arabidopsis thaliana landsberg
aaaaaattccgatcaacaacttggagggatggctgagtggcttaaggcattggtttgctaaatcgacatacaagaagat

SEQ ID NO: 148537 - DNA, 88 bp, Arabidopsis thaliana landsberg
tcatccgcatttccaggtcactttgatgactgctgatagaaaagctggccagtcaatggaaagcgttttcccacacctgagagctcaa

SEQ ID NO: 148538 - DNA, 365 bp, Arabidopsis thaliana landsberg
gagagagagacagagagagagaaacagagttcaagatcacgagccttccttcttcttcttcttcttcatcgagagcgatcaaaggaacaaaaaggatctcaagaaacccacttgtgttgttggttagatacttcacgggtctctgaaaacgtctctttctcacaaccataacttgatcacccaatactccttttctatcttaaaggctcaaattcatccacgtcacaccgttgttcatttcctctgatgtcttggtgtcgttagatattgtctcccaaaaaagaaatcttcttgacacagaaattgaagtcgcaaagagacagaggaaagagggggagaaaatggatcgaccagcagtgagtggt

SEQ ID NO: 148539 - DNA, 665 bp, Arabidopsis thaliana landsberg
tcgagacttgaccctagattatatctttagttctttgcttcaatttgttctctgtaaatagattcacagagtggatattatttaaggtagattatatctttcggattcttatcgcgaaacaccacctgcaagaagacatggaaaaaaccgaaaaactcgaagatttgtttgatagaacatgtttagaaggtaacgggtgtgtaaaccacacattcagcaattgtacatagaaagaaagactaaaatagaacgagagagataaaatgggtctctatccccctcaagtaaaaatcagtcatctcacccacaagcatccaaaagataataacgtagggcagatgcagagacaaaacacacaaatttgctctcaagagtttcatctttcttcattctctcgaaacttttcacctgaagtagatagagacgagaggaatatcgacgtcattgtcatcttcatcctcacaagccaccactacatcaagatggttgcgataaggcggtaactcgactttcgcaacatcccgagcgagatccacaaccttcttgtccatcctctccttgtgccttgtgaacatactgttgaacagaagacagcttccacaagagatgctgtatgcgctaagccctttgtcctccagccactgcaacacctcacgaagagttgg

SEQ ID NO: 148540 - DNA, 1074 bp, Arabidopsis thaliana landsberg
tctctaactctctctatactttcatttctcgtttcataatatttggtaagtctaattaaatatctcatctccttaatttttttattcgctcactaatctctctacacctttcaactaaacacaaaacaaccaaaagctcaggttcttgtgttttggtcctctgtttatttcttgctcaaaaaacaaccaagagctcacttgctcttaatcacaaactgagacttttctcagtcttcctctgctttaactagtttacttgggacagattctgtataacataaacttaaatcaggacatgtaactgaaacatgtcaagtttctaaatttaacttgagttctaaaaccgttaacacaaacacaaagctgtatgctttcctctctgtttctatgctctgttttccattttttgctctctgtcctctcttgcttagtaaggtctgtttttttttttgcaggaaacttgttagtgtttaaggaaacaaaaggaagaagatgaagtatgtggttgtttcaggaggagtagtgagtggactcggcaaaggagtcacagcaagtagcatcggactcatcctcaaatcctgtggcttccgagtcaccgccattaaaatcggtcttattttcttcctcctctctaacaaccatacttgtcaattctttcatgtaaaacgaacttgtcacaaaatttttttcctctcacgcaaagttcgttcctttttttgctcacttttgcttttgatttttttcccacaacttggagaacaaaagagaatagtttcagatttgattttttttcttcttggccccagtggttacaataaacatgaaaaaggacttctttttatttcctctaccttctcacgcgtgtgaaaaagggtacaacaaacaaaaagttcaaaaaagatctaagaatttccaaagatttaatattttttctatttcccctgttaaaccctgtttaaagttacatgatttttcttagaaaaagttgaacacttttttggatagttactgtactagtcgctgattttaaggttggattatgtgcagatccttacttaaacattgatggtgggg

SEQ ID NO: 148541 - DNA, 218 bp, Arabidopsis thaliana landsberg
  unsure (1)..(218): unsure at all n locations
gcgacgattcctctcaaagctccttctcttcctggaacgagagagtgttctcccttccttaaccggttcgtcactcgtcaaccggttaatttcatcggaagtttcatccttccttagatgaagcatcgttctccagacggngacgaaccactgttgttcgcgttttggagacggagaagagtacgaaatagagaagcctgagcctccggtgaaattga

SEQ ID NO: 148542 - DNA, 561 bp, Arabidopsis thaliana landsberg
ccgatgctgagaagtcgggtgactcatcttgcatcaaaaaggccttatatcttcctcctcggtctatgctcttattatccggtgaagctcgatatgcttggaatcactacatcccacatcacaaggttggtaatcttcatttcgatctctccttcgctctcaccaggataactcctactgcattctcttccaattgctaaacgttgtactgtgctctaatagattgacaaggtgaaggataaagtgatcagaagaagttctagaagggtatctttcacattacggaaggtaaaacatattttcacggcaatcttgtatatgcgtcttgaggcgatattgagagacaaatcttttgcaggtgagaaatcacccttgcaggtgtaagtatccacaatactgtgactctcagtaacaaatgtaactgaagaagaggagaaaaatgaaatgaaataatattttagatagaggcaaaatgcatatggagaagaaaaagaagagccatttttgtagctgtttactcttaattattaaactagatttggatgataaacattgttacag

SEQ ID NO: 148543 - DNA, 233 bp, Arabidopsis thaliana landsberg
caaaaaccaaaaaaaaaacgccgaaagaagctgctttttaagtccaagctggaaaaatcagcagcagttcacaaaagcacaacttctccgggtcacaacatcaatcaaggtaattgtataaaggaacacaaggaacaaaaaatgtatgtatgaaaaaatgaagagagtttttttttgtaaaagagttgttgaggtttgcagcacaaaagtgtgtcttgcaccttacatccgag

SEQ ID NO: 148544 - DNA, 411 bp, Arabidopsis thaliana landsberg
cttttgttcagtaaatactaaaatcgttacaagaattttcatatacatatactccctggattataaaaaagaaagtaaacaaattcacattacaaaagaagatacatcatggccctcaaagcaactatggtcaccaaatccatgtttgcagccttattcacaattatcgcgatggctacattggcatctgcagcctccggtttggctcagtctccagaatcagaccacttggttaacaaatgtatggctaagttatcttcaaggtgtgcgatgtatgtcacggatgcaatctgtactattcatggtccgatgagactaaaacatcatggatgttgtctagaagtttttcacatgggacgtgcttgtcttaaaatcgtaacgaatcatgtaatccaaatgtttttgcccaag

SEQ ID NO: 148545 - DNA, 378 bp, Arabidopsis thaliana landsberg; identical to SEQ ID NO: 42786

SEQ ID NO: 148546 - DNA, 339 bp, Arabidopsis thaliana landsberg
agatttgttggtataccaattcttacgtcaacgtcaatgaagaaacgactccatatttacgaataaaaaactgtagtagatctgtactctccctttttctttgtagagaagaagagaactgtgaaagaagatgaagattgaggaggatctaggtttcatcaacatactcaaacgagcaacaaagcttctatgtggtaacatcaatcttgttctcttcctcttcctttgctctctccccctcttttgtttcttgatcttcttcgagctttcactccaaaccactgtctcactcgcttctcaatacctcgttcgacaactcactaattgggattactacta

SEQ ID NO: 148547 - DNA, 138 bp, Arabidopsis thaliana landsberg
tgtgatgcaaacagatgagatttgatcagaagtcactaagtcaagccaagcaataacagtattggggtttctaacagtcctaagtgaacatgcagaaaacagaaacaataacataattactaaaatcactcgaccaca

SEQ ID NO: 148548 - DNA, 233 bp, Arabidopsis thaliana landsberg
caaaaaattcatttttgttttcttttagagttcacaagttcttcgttgttcagctactcccactgtcataacacgaagtgggtttttttctgatcaaagaacaaaaacacaaatggatatctccgccttgcctctcactctcttcgccggaagtctcttccaatactttatccggtgtctaatctctcagcgccgctttggatcttccaaactcccactccctccgggaacaa

SEQ ID NO: 148549 - DNA, 327 bp, Arabidopsis thaliana landsberg
ctatatacattcgatttctatatcaacttcatcactcatacaagtgagccatgagaggacattgttcacgggaattgcgcgtgacggttcatttcgacagtcgcaatatcgagtacaaaacacttaccatgttgctttcagtagtcagccatcggattgatccactccggttcagcaatctccgctctcgtgtgtttcaaatcatctgtcgaaatgttgtacttctcatctcttctcttcaccaactctggccttagtaccccttgccccaccccctgaggtgacatcattagtttgggtgcacccattggtaacttgtcacctaca

SEQ ID NO: 148550 - DNA, 331 bp, Arabidopsis thaliana landsberg
  unsure (1)..(331): unsure at all n locations
ggttgatcgatattttcagttaacaaacaaaagcccaaatggcgcgtaatcggagtgtcctatcttttttggcggacacttaattctaataaacggcggcagaaaatgaactctctgttcaccgccttccgccgcaacctcctcttaaaccctaatcctcaccgcaacttctttcttcatagattgttatcatcatctcgccgttcatccccgctcattcccgtcgagcctctcatccaacggatacaatcacccgccgtacccgattctacatgtactccaccgcaacaaaacaccgtctcgaaaaccgatctctctactatatcgaatn

SEQ ID NO: 148551 - DNA, 473 bp, Arabidopsis thaliana landsberg
ctgtctctctgtctcacgcgagaactctggcttcgtctctatattattgacccttttgatctctctctgtctcgctttcttcctcgcgtggacctttttcgaaaaatatcaatcccagaatttcgcttcattttggattataaactcccagatctgctactctctatctccgattttgtgatttttcaaaccctagatttctccggaagagtttatttttttctctgtaactaaaccgagatttttttttcaaaattccgacattaccctaggttgtgtattaccgtagaaaaccctagttcctttttggtattcttggtgtacagatcccttccttagtcagagtttttggttattagtgtttagaggtttgtgatgaacaatcgaggaaggttccctcctggaattggcgctggccgtggagcctttaaccctaaccctaattaccaatcacggtcgggttatcatcaaca

SEQ ID NO: 148552 - DNA, 166 bp, Arabidopsis thaliana landsberg
aattaaagaaggaaaagcacgacctttgccgacttccttctgttaatcatggcggctccggaggatgaatcttccgctcagtctcaatcatcacctgccacggcggctcctacgcctcctcattcctcttccccttcctctgctggggatcactacctagctaagt

SEQ ID NO: 148553 - DNA, 490 bp, Arabidopsis thaliana landsberg
ggaactagtagcaatatctctcttctatcttttcatttcctactcttttctcactatggccaaagacgggggcgtttcttgtctacgaaggtcggagatgatcggtataggaatcggagaacttgaatctccaccgctagattctgatcaagtccatgttctagccgttgatgacagcctagttgatcgaatcgtcatcgaaagattgcttcgaatcacctcctgcaaaggtttcttaactagtaattcttcctctttcccctttaacattttaaaagccttattctccggtgatgattcaatgcagtcacggcggttgatagcggttggcgtgctcttgaattcttaggattagacgacgacaaagccgccgtcgaattcgatgtaatctctcaaaactctgttttaaaacattttaagattctagattttgatcttgatctttatttttaccagagattgaaggtggatttgatcatcactgattact

SEQ ID NO: 148554 - DNA, 485 bp, Arabidopsis thaliana landsberg
gcggcggagacggaggcagaatcacagtaccttaatgtactctctgctttcctcgccatcgaaccggtggactccgtcatcactctcgctaggtaaaaccaccatcattcccgccgccgctagcttctttgttccattagctccggcgtttgattttgcttctgtatgttcttttttgtgtagagggtgcactggaggatcaattactgagaacgcccagagatttttctgggaaatttgcgttgaagctgtaagtaaattctactcttttgaaaactcggagaaatgtggaagctttaagatatttgtagtcaagttattgatttgggacttgttagtgtttgcaaaattgaatcttgagttgtagtaatgtgtaatttactgtgaaactcgtgtattggtttaggctgcgaataataacggatcatacgcgaagaagttactgaagaaactcataaatgaagttgagttaaagaatggtctga

SEQ ID NO: 148555 - DNA, 345 bp, Arabidopsis thaliana landsberg
tattgtgaagagtacagagggacactgctgatcaagcttgtcgcaggtagtagagagatcagtttcttagactcagagagtgactatgatgaataagtgatatctagaactaaagtcaggttttagctttagatcttaaaatttatgtcgattttgtctatatctgatgctagctctctgttgttaagtaaatgttgagcaaaacttagcttccttctttttcctttccgtatttcacgttatttaagttctgaaaacactttgtctgacacagacagaatgtatatttttcgctaactcttctttaggagttgactgatatatatattatcgtgtaacttctat

SEQ ID NO: 148556 - DNA, 462 bp, Arabidopsis thaliana landsberg
gggatcctgaagagcggattattcctcgcagtgtagatgctgatgattctgatgttgatatcaaaagtgacgatgataggtaccttttcttcatctcttccattcttttcttcttctttgcagttttttatatgttgtgctttaaatttggctaagactgtcaaggttgggggctgatacataagcctaactgtacctcattgcttttcatctagaccatagtttgggaaaaatacaattgatattggggaaaatgtttaactactggcgttccattctcttgtcgagtttttgttgacttcaatactctagttccttcaaaggtatcttacaatctatttatctttgttagtgatgacgaaagtgacgatgatgatgaggacgacactgaagctcttatggcggaactcgaccagataaagaaagaaagagtggaagagaggctcaggaaggtaatattgc

SEQ ID NO: 148557 - DNA, 559 bp, Arabidopsis thaliana landsberg
cgggcggcggagaagggaggcgagggaatggagagttgctgtcggagcgtcatagcttcaaggacgtttcatctgcggtcaagtggccgtctatttccctctcttagcttaactcatctcaagggcaagctatctctctccatcaactcgttttcctccaagattcagtctcatgctctccgaggagttggtataggcgagtcagataagaaaaatcccctgccgcgaggggccggagaaggagtcaaggaagatgcgaggagtaagctgcttcatgtagttttggtctctcctcaggtttgcactctcactgctacctttggtcttcttagtacatgttgatggatctaaacaacttatactctccttgacagattcctgggaatacaggttgcattgcaagaacatgtgctgcctcagctgttggtctgcatttagtcggcgtaaagtaaccaaacacgacttgttcattatttccagtgttgatgacttaatctgtcatttgttcctgcttcagccattaggttttcaagtggatgacgccagagttaagcgagct

SEQ ID NO: 148558 - DNA, 620 bp, Arabidopsis thaliana landsberg
  unsure (1)..(620): unsure at all n locations
gcaaaccctaatttcctttctcctaaactctctcatcttcctctttctctctcttttcttcctaaatgataaggtaacttcaaaactacgacaattcaacactctaaaggacacgccaaggtaaaaccgaatttgcttgttctgttgttcatcgtgttatactctctttttttaaaatttgttttatacatgtgatttatgattcttcttctttcaatgctgtgtgattcctattattcatcgatcaccttatgatcgagtaattcagctcttcttgtcaaaaatttctgcttttaaattatgtaatttttgggatgcttatttgatttatgggtttgaaggatcgattcatgttattgcttaaaatatcgttctttattgaaaacggaattggttttttggactcttgtaatctgaaatgattcagctgctgactcctcgtgatgtattttactctgatttgttgttccatagtgttatcatcgagctgatctcatccataattcgaattccgatccattttaatccgatattaagacacaacaacttcgngttcttgtttctcagatntaggtttttagcttgattcacaaatggagacgaatccgtgtgacatgaat

SEQ ID NO: 148559 - DNA, 302 bp, Arabidopsis thaliana landsberg
ctcacatcttccccatctccaaaactcattagatcctacaagcactctcttctcttccttatccacatcttcacagtcttcaaccacacctgcctccctcctctccacttcctccgccgcgcctttactcttcttcactctcgcatctctcctctccttcctcgccgtcaacagatcttcaaccgaatcctcatcttcctcagaatcaccttccccttcccctcctccgcctcttcccgacggcgattactccgtcgctgccttccgtgccctaaccacagaccacatctggtcactcgatg

SEQ ID NO: 148560 - DNA, 271 bp, Arabidopsis thaliana landsberg
aagacgttttaaaaatacacgtacatatgatagaacacgagtcatccttatacaaacacatgagctaaaaaagatggttttgatcctgggtttttaacgaaagggaatttgattcctgtgactgctcaaatgtgcagcagccaagagccatgtgaatcgaaactggttactttctcaagtgaggcggtttcatctacaacaacatgactaaggggaggatcaagatgtgtatgggacaaaaaagtgtgcaacgtaccagtattttgaatgg

SEQ ID NO: 148561 - DNA, 451 bp, Arabidopsis thaliana landsberg
tgtgtttggatggtagcgcgccagcataccatttcgataagggatctggctcaggagtgaacaattggatcgttcatatggaagttagtattgtttttattttctcatttaattagatatgtattatcataaataattatttacaaaatgtaatgatattaactaaatatgtatataattatgtgaatacattagggaggaggatggtgcactgatatagctacatgcgttcaacgtaaaagtacaatgaagggttcttctaagcttatgaacaaagactttggtttctccggtatcttgggtggcaagcaaagcaccaatccaggttctcaattctttttattccttatttttttgttcaacaagttaatgatttcttttctcatgcttttaatgcaatgagactgaatcggatttgggattttcagacttttcaattgaatagaacaag

SEQ ID NO: 148562 - DNA, 1714 bp, Arabidopsis thaliana landsberg
gctcaagttaaagatttcatccacactctcttgcattacggtggctacaacgagatggctgatatactcgtcaacttaacctctttagccactgagatgggtcgactcgtgtcagaaggctacgttttaaccgttcttgctcctaacgacgaagccatggctaagctcacaacggaccagcttagcgagccaggtgctcctgaacaaattatgtattaccacatcataccggagtatcaaacagaggagagtatgtacaacgctgttcggagattcggaaaagtgaagtatgattcattgagattcccacataaagtgttggctcaagaagctgatggatctgtcaaattcggacacggtgatggttcagcttacttgtttgatcctgatatctacacggacggtcggatttcagttcagggtattgatggagtcttgttcccgaaggaggaaacgccggcgacggagattaaaccagctgctccggtcgttaagaaagtttctaaatcaagaagaggtaaagataaattttccatttctttactctttttgttacgattatttttagacgctaattattcggtcaataaatatttgacattgacatctaaacacaaaaattcatcattgttttgtgtcattgagtgtcaaaaattcttattctaacatttattagtttattactgtactaaactttatgtgtggaatgaaacattaatcacatagattagcacttagcagccatgaatttggtcgtataatgagagtagaagtaagaaaacatgtgggatttggaataaagtagagacttgtgagagaatgaagacaaaactctcttaacaaattttgttttttaatattccgcttacttttattctttttaattctttaacccaccgacgaataatcccatattttatcattaaattaaggaaaatgatttttatttgttctttataaaagacaagctgtgattgagacacattggtcgttaacgacagcttgtctaaattttcactaaaacccaaaccaaactcttttttttctggtctttcggtatttttgggttttgtttctaatcatatattcatttgcacttaatcattgattaaagttactgatgatatgataatatatgcaggtaaattgatggaggtagcttgtagaatgatggggtcacggtttattccgtgtcagtgatttcacacgttatcaaaaaaaaattccaagcttccaaattcttaattctgtaaacatgtggaaaaaaaagaaagagttgaatatgtaaatgatgtgatttttgggttcgttgttatttgcatgttctatttgtaatttttttattatcataaatatatatatacgtagattttgattaagtttgttatttgggggtgagtaaaaaagttctaggagtttagagaaatcaaatatgtaatacaagttatacaatctgtatggaaataataaaggaaggatccatttgtgtgcctattctattctattccattctctcctatcaattattgatatctaattctgtaaatagaaaatgtctgtcacttatttgttgcatataaaatgtgtgattggaaatggtagttgcaatgtacataatggtatacatcaattagcataatgtacatttattcaccttggtcataaagtcagcgtatttatttattctttgcaaaaaaattataacaatattctt

SEQ ID NO: 148563 - DNA, 163 bp, Arabidopsis thaliana landsberg
ctgatccctctttttaccctttctctctctctctttctctgcttttgcttttactgtttccttacaattgtgattgtattgagctaattttggtcggattcatttactcttctctttgtcaatttgcttgtttttgttaaagatgtgacatttattactaaag

SEQ ID NO: 148564 - DNA, 495 bp, Arabidopsis thaliana landsberg
taataaattcaagaacatagcctacaaaagcaacaatactcttttaagaaaatacataacaaataatggtgttgttaatggttggaagagaatgaaatcagcaaaagatataaaacgcaaaagctaatgggaaaattataagattgagaaaaagagaataaggtgcactgcttggtgcatcgcttcctctactagccgaaggacccgacccaaatcctcctggtgattctgcacctatccaaatttcaatcactatggttaattaatgggttgacaaagtaccgaaccgaaccaaaccaaaatacaattcttttattcaaagtacaaaaataatttgatttttttactgtggtgaattttctctttaaccggttcaagaatctaaaaagagaaatgaagtggatcgtttacctgacatcgaacctggagcataggctggggaggctccctcgtctcccatagctacaggtgctccaacaggaattccaaaaactg

SEQ ID NO: 148565 - DNA, 562 bp, Arabidopsis thaliana landsberg
ttagagacaagcaaaactataaacattgatcataaaatcattacaacatgtccataaattaattatggattacaaaaataaaaacttacaaaagatctataatgtgataaattaatgtgtagctataattaaacaaaattacattttttactatagttactacttgagataatgatctcaaaaagaagcttcatacgcttaaagtctaatttgatactgtcctttatctaaattactgtttagtatatggacatgagagaaatatgagcagaggctgaaggcttaaaccttcttccctctgttctctcacacagccgcaagtattggcttcatcactcagttttctcttttctttatatttgttttctaatctgttttttagtctcagttcatgattttgcattttctaacgaagatgtcggaggaatttacgtatctataccaaagagatcgtacctcagggttactgatctctagccacggttttgctggaccgctgaaatgtaaaaccgaagcagatttcagaatctcttgaggggattttacggatcgagaacctagt

SEQ ID NO: 148566 - DNA, 395 bp, Arabidopsis thaliana landsberg
gtcaggtacgtaattctcttgaactgtcaccagcatatacttgcattaacgagctcgtattgatatctctatgctctttggtaggctgcatttgttggttcaattaatgggcattgccggctttacagtgcagagggtatatatgctaaaggctcattctatttgtaaaccatgtctataaccttaattcttcataaagttaacagactcattttatttgtttttctgtaataattgatcagattgcaagttggaacaaacaaaccagatagatctgcagaacacaaagaaggctcaagctaaaaagatcacagcttttcaggtttcactctctttttttgaaaacgtttacattgctgttgttttttttggctctacttaccattgagtttgct

SEQ ID NO: 148567 - DNA, 291 bp, Arabidopsis thaliana landsberg
caaaggactttttatatatattacaaaactgaacagcaagttccaccactggagaaaccatggtgaaaaggcaaaaaccttatacaaacagcctttcttacgttaattgcaaaccaaacagaagttacaacacattcaactaccaaagccaaaagaaataaaatgataactttgaaacagtcttcataacgtcctcaataagagcatagttccaatcaagagaattggacatgatcttagagcatccaacttttgcatttgttgtgaacgacctgtatatatcatcatatc

SEQ ID NO: 148568 - DNA, 89 bp, Arabidopsis thaliana landsberg
gagtcaaccagaattcgataaaccaaagtatccaaaaaaataattacaagctcattgacagtgactgacaacacaaagaactaaagttt

SEQ ID NO: 148569 - DNA, 277 bp, Arabidopsis thaliana landsberg
atcacatataaattttgttttttttctctttacaaaagaaattgaagtttttgaaaggggaactcttctttttttcatgctgcaagccatgaacacgacgactcatattttatatatcatacttgaatctctaaatgtaatactatttatagttagtttcatactgattttatttctcgcatattcatatcaatccatcatctagagcatattgtaatgagtcatgcaaagatgtttgactccggttttacgccgttctttgagcttgatcctgcat

SEQ ID NO: 148570 - DNA, 482 bp, Arabidopsis thaliana landsberg
aatgtaatcatcattagttatatcggagacaagacccggattcatagcccgggccaaatttaaatgacccgacccgtaatcataaggcgtagccgatttcccggtggattcatcgatcaacgagcgggtagagttatcgacgaggttagtcgttgtcatcattgccgatcgtatcacggcagggctccaatctggatgagcggatttgagaagcgccgccgcaccactaacgtgaggacatgccattgaagtaccggagagaatgttgaattccgttttccttggatctgacggcaaacctgtaggtccaacagcgtctgtccatgcggcgaggatgttatctccgggagcaatcaaatccggtttaagaatctccgggcttaaaccgtttggtcctctaccggagaaagaagcaataaccggagccggtttaatcccaactatagttcctctgaaatcaattgaagcaattggattcggat

SEQ ID NO: 148571 - DNA, 280 bp, Arabidopsis thaliana landsberg
tcctcttcacacctctctctcgccgacgacgctacaaccatggcgtctctcgctctctccggctcctgctctctcgctttccctctcaaatctcgatctctctctctccctcgtcctccttcttcctctctcaatttgacgaaacctctccgatctctcgattctcgcttctccttactcaaatctccacttcccgtctctttacgccggagatcatcaactctcgttaaagcctcttccaccgtcgcttcagcttcctcttctccaactcctcctttgg

SEQ ID NO: 148572 - DNA, 143 bp, Arabidopsis thaliana landsberg
caaacccaaaatccccaattcctcaccgaatcgtcgacgtttcttcagatcgaactccacagaagatgaagctaaacacttccctcgaggtgggagagctgaaatgggatctatgtaaaggtgcagaatctgttgattacata

SEQ ID NO: 148573 - DNA, 129 bp, Arabidopsis thaliana landsberg
ccagaagaaggcgttgaatcctttcgttttccgattccatttttgggatctcttgtttcgttttcttctctttggatccattccattcccatgttccccaatttctttaatcggtgttgcttccacaag

SEQ ID NO: 148574 - DNA, 147 bp, Arabidopsis thaliana landsberg
gatcaccaaactacatgcttttatttccaagaagcagctacaatatagtttgttaggagtgccatgaactcatgaaagcagagacactacaatcgagctcttttgtttttcttttcacttcaattgagcaaattgaagatagattta

SEQ ID NO: 148575 - DNA, 380 bp, Arabidopsis thaliana landsberg
ccgatacattatcaattatataagtaacataaactgaactcctaaccagggttctttttataaattttattatttatttattgtggaaaaagaacaataataatatggggatgtctaaaagtatcaaggttatcctatctcttgctcttgtagtgttcttggcacttgcaggaaccaaggttgaggcctccgtaagatacataacttatcctgctatcgatcgtggagatcatgctgtacattgtgacaaagcccaccctaacacctgcaagaagaaacaagcaaatccttacaggagaggatgcggagtgctcgaaggttgccatcgtgaaacaggtccaaagcccacctaacagcattaaatatacatttggttgaca

SEQ ID NO: 148576 - DNA, 216 bp, Arabidopsis thaliana landsberg
aatccttttaaaataccttgtaaatctttcgttatgccacttacatatactttaaacgattgtaaatcaagttaaacacttttacaagcttttaacttgaatcttttaaaatgtcttgtaagtcgtttactaaaattactatcaaactttacaagtaattttaatagtaattccaataatttaacttttaaaaatattttgtaaaagcctgtttta

SEQ ID NO: 148577 - DNA, 961 bp, Arabidopsis thaliana landsberg
gaaatcaataacgtctttggctttaaacctttgcgactttgtgtacaaattccggagtgtctttctcccaaatcagcatcgcagattcgatttctcatcctaagagagctgaaaaatggaggttggattcaaggcattgctcgatgatcttgatgttctcgagaaatctctctcagatccgacaatgcaccacaaggtgtttgggtttatactgccgatctcgtttttcttaacgctgtgaattttcttagtggatgatttcttccaatactgttgattcctcgaggaattaatactcaaattgcgtttcatggattatgatttttccgttgggaattttcacatgcattggtgtttacgagtgtattgatttgactctggaatcttcgaattaatttcacttatccttgctgcatatttgttaaatgtcaaagccttttgttgtttgcattgcttatgaattctcctgacaatgtgtttgggctttgcagctgcgatcacatgttgagaatctagccactctgtctaaatgtaatcctcaccggcgttccaaagtcaaggtcttgcatttatatagtcacaaattcttctactttattcttctgtgaaacgcttctgatttcaataggaacctctgtttgcaggaactaagctcggaagtggtagatagtaatccttacagtaggctaatggcacttcagcggatgggcattgtggacaactatgagagaattagagagttttctgtcgccattgttgtacgtgtttctctccttgtttttttttgatattttccttgtttatctataagtttgttcattaagtaaggattatctaaatgacagggaattggtggtgttggaagcgttgcggctgagatgcttaccagatgtggtattggtcgtcttttgttgtatgactatgacactgtggaactagctaacatgaacagattgttttt

SEQ ID NO: 148578 - DNA, 149 bp, Arabidopsis thaliana landsberg
ctttgacaatggctgatggtgtagaagctgcaacaggaagaagtaaaagacaaaacagcttattaagaaaacaacttgctttagctgtaagaagtgttcaatggagctacgcaatcttctggtcgtcttcacttactcaactctggtaa

SEQ ID NO: 148579 - DNA, 434 bp, Arabidopsis thaliana landsberg
cttctaaagaagaagcttcgctctctgttcttcttccgcgacgcgtttcttctatctctcgcaatctcctaagaggtaagcttctttcattctcctcttagataattgtttcagcgattgatgaaccaccctcttgtagtcttgtaggaactttagctagatttatgagatctaatcgtaatcacccaggatctaattgttgcgatcgatttcatcgttttcatgtagaacccctaatttttacattcatgtgtgctcgcagagcttgaatacttccagaatcggctctaatttgaagcaattttgagtttcaagtcgaaagctaatgagtcactgagtgtaaaaatccgatctttcgtctgtgctttcatttgaaatgtcgacgaatgatgaggaaaatggaactgtaatcgaggttaagaatgtccagaacg

SEQ ID NO: 148580 - DNA, 2476 bp, Arabidopsis thaliana landsberg
aagagaaagcaaagaggagaaactaaaacagagctttttcacatgggaaaggataagactttgccgttgcttgaccctcgtgagccaccggaactcaccggaaccaagtcggcgtcaaaagtatgggccaaaaagttcggcgaagagtcaaagcggctttgggagctagcaggaccggcgatattcactgccataagtcaatactctcttggtgctctcactcagactttctccggccgtctcggtgaacttgagctcgccgccgtttcagttgaaaactctgttatctccggtcttgccttcggtgtcatggtatgttacgtaaacacccttcacacgtgtcaggttcttggtaatggataatgtgttctaataatagccacagaaataaaagtcaatatttgaggacttttttctattaattaatatcaatattcgttaatatcaatgtagtagatcttccaatacattttaaattgtttcgtaattgtgatggacaaaatttcatattaactttttcaagttcaaactgtttcaattctcaaactaaagtaaatcctaacagtatatgttatattaatgtagttgagttcagtgttataatatttgttatacaagtaatctctactagggtccttgtgtaagctctcttgaattttgttgcttgtcatttaagtttcctatgaaaaaagcttagagatcaaacaatataaacattttgatgatggaaaatggtggcagttagggatggggagtgcattggagacgctgtgcggacaagcatatggcgcgggacagattaggatgatgggaatatatatgcagcgttcatgggtcattctctttactactgctttgtttttgcttcccgtctacatttgggctcctcctattctttccttcttcggcgaggctcctcacatctctaaagctgcgggtatcattcttgttattccttattgccaattggttttgagtttggagtcaatgtcacgtaacaacttctacattgttacaatttacagggaagttcgcattgtggatgattccacaactatttgcctatgcagccaactttccgatacagaaatttttgcagtcacagaggaaagttcttgtgatggcttggatctctggagtggttttagttatacatgcagtttttagctggctcttcattctttactttaagtggggacttgtaggtgcagctatcactctcaatacctcgtggtggttgattgttattggtcagcttttgtatatcttaatcaccaaatcagacggtgcgtggactggattttctatgctagcgtttcgggacctctatggatttgtcaaactttccttagcctctgctcttatgctttggtacctatccaattttttttggctagtagatagctttagacttacgttagctgagacttcgcttgtaaggacaggttagttgtttttgttttgcagtttggagttttggtacttgatggttctggttgttgttaccggtctccttcctaacccgttgataccagtcgatgccatctccatttggtaatcaatttgtgctgatctttggttagtttctcactgaaaataggtttgtttagtaacatattttatgttttggggttcacagcatgaatatagaagggtggactgccatgatttcgatcgggtttaacgctgcgattaggtaagttctctacctttatgttacaggagccacatttggaaagctaataaaaatctcatgaactggtgaactttgtctcttggtgtgatcagtgtgagagtatcgaatgagctgggtgcaggaaacgcagcgttagccaaattctcagtgatagtcgtctccataacttcaactcttatcgggatagtgtgcatgattgttgtcttagccacaaaagacagcttcccttatcttttcacttctagtgaagctgtggcagcagaaaccacgagaatagccgtcttgttgggcttcactgtcctcttgaacagcctccagccagtcttcacaggggctccggttggagcggggtggcagaaactggagaaatacgtgaacattgcgtgttattacattatcggacttcctgctgggcttggtcttggattcacactagacctcggcgttcaggttagctatttactaatatgaccattttgaattagccttgttctttttaatctggtgttaattcatttgtaaattttgtagggcatatggggaggtatggtagctggtatatgcttgcagacacttatattgattggaatcatctacttccctaactggaacaaagaggtctcttactttgtcttttagttgctgctatgttcctcctttgtgtttggtttgatcatttcattaattagctttgaattctaaattatgcaggctgagcaagcggagagtcgagttcagagatggggaggaacggcgcaggagtgatcaacaactccctta

SEQ ID NO: 148581 - DNA, 3176 bp, Arabidopsis thaliana landsberg
ccttaatatataaacaaacatcaatctctcgccgtcaaaggttacatctatcgccgccgctgagaccgccacttaaggccgtctcctacgcaatctccgaaaccaaaaccaccaacatcgcctggtaagctcgattttttaatcatttcgatctcatatgatgtcgatctgttcaatcttgcgaattcgatctttattttgttctgagatttagggtttcacgaatttgtgttctaggttttctggcttaatcattcttattgttaactgttctgattggttcttatgcttttggttacacaaagatctcgacttttttgttgactctgtatgcaaatttgtcaaaagtcaaaacgttgttacagaaactctctttcgtgcttgtgtttatgtatgaacaatagcttcgctattgggtttgttgatttcaccacacttgattaaatatgtatattctattgaaaatgtggtcaatcttggcaataaaaaccgtcattttcatgtgtcttagctctagtagcaccttttgtttagagatcctgagtttaaagaagcagtagctagcatctttggtatagtaaattgtttccctgacaaattgtatatcatttggttataactagattagtgaaatttaatggatcagattatgtagcattgttttaattttgtatggagagaactggtggtgggcttatttccaaaattttcctttgattaagtcaagaccctttattttgagaagtgagagagaggattgtctgagtattgtcgctttctcaaaatctttccggggctaagcagagaaaagctgatagttaagcttaggaatgtgatcttggtcttttaagaatcttgaaactagtgggtaacttggatccatcgaatttgttttccgtaggtgagtgttctttagcctatttctgagtctgaattatacagtgtagacatgaaaataggtttttatgtgatggactcttttgttttatggtttaatggatatgttgaattttgtttttcccatgagtctcttataaagttggaatttgattcatggaatcttggatccagattacttcgaatatataaatgaaagaacacttagatgtatcaaagggaacttaagcgtgtgtactgtttagtgtctcacaacttggaatttggattagcgctttcatgttttggagtttgatttatattcttgatgtttggatttggatagtaccttggtccattgaactatgtatcataataatgctttggatatggatatcgttttgatgacttacttgataactgctcatacttaaaaaacatttgttctagaaatctagattctcgtctatgagtgtttatatgttgaattcatgtcgaagtcatagtttagagatctcattgagcatttccccttcggaggagtgaggagtcttgttttggggattctttttagggctagacctgtgaggaccttcattaattgagttcgttttattttgtacccaaatgtgttttttcggcttatcccattggcattgaaaaagttattgtttacattaaaatgttatttttttctttcattgagattaccttgctagtcattggatttattggttttaaacttttaatagctgaacaaaaggggttttattctaatgtttacttaacactagtctggtcataaacaagtataaattttgggtttaagttatactttttttattggaaatacatatcaaattagggcgtttcatagatagttgatatattttcttcacttgcatgtagttatgttcggtattatcgagaacttactgtgtttgaagttcctcggcaggaaaatcctgtagagtttgagccaatgttgtcggtgtgaacctcaaaagttgtgggtgtttttcccgccgataaagctgctggcaagatgggttggggttgggtagaatggtgtgtatggcaaggtaaggatgcttcacttacaaaagaatcatttagaaccgtttctttctttgggatctaaatgtgtttttttcggcttatcccattggctttgaaaaagttctctagtttgtatctttgtactaggagcattcttaccattctttaaacattgggcagtgaaagatattttcttggattagtattctgcttcttgtggttttgtgtgacactcctagactatgttatttcctgttaacactgtctttgtaggacaggatgtgagaaatatgctgtttctgcaggataccctgaatttaccagtttaccggaatcatatcagaaacataaactcttatgttacaaaattgtaatggattagttgatgcgcattctgtgttttttcagttgtaaatttgcagaattgttgaatgttgattgctcgagaagagtcttgtgagtgaattctatttcttaatatatctgattatcgtttttgttgttgatttaattagcagatggggagaactaaggagcaggcaacattaactcggtatccaccctgtcctaggaatcctgctaaattcaatgatataaacaaagcactccaggaaaaaggatatggtaaggctctgaaaagaaaaccttggacgggtgtgacatgccctgtctgtcttgaggttcctcacaactcggtcgtcctcctttgttcatcttaccacaaaggatgccgtccgtacatgtgtgccacgggaaaccgtttctcaaattgtctagagcagtacaaaaaggcatatgccaaggatgagaaaagtgacaaaccgccagagctattgtgcccgctttgtaggggtcaggtgaaaggctggaccgttgtggaaaaggaacgtaagtatctgaattctaagaaaaggtcatgcatgaacgacgagtgtttgttttatggaagctatagacagctcaagaagcatgttaaggagaaccatccgagagccaagccaagagccatagaccctgtgctggaggcgaaatggaagaagcttgaggttgagagggagaggagtgatgtaatcagcacagtcatgtcgtcaacacctggggctatggtatttggagactatgtgattgagccatacaatggttatgatcatcaagatgacagtgacgattacagtgattcgtcggatgacgaaatggaaggtggggtattcgagcttggagcattcgacctgggccgtctt

SEQ ID NO: 148582 - DNA, 299 bp, Arabidopsis thaliana landsberg
acaaatttcatatttagagtacgggtgacacacataacatacacaccaaacattcccaaaccccaacaaaagaagaaaaataaaactagtaagaaagataaacggtacactcaacaacagtctcaagcccatcagtgaactgatgcggctgattctgctgcgtcccgctagatcctgtaaacgtcttcagaatcgcgaatcccctcgcattcacatactttccggtacctcccattactcctatatgcgattctgataccgctgttctgagaaccccaaagaagcttatactatcttca

SEQ ID NO: 148583 - DNA, 199 bp, Arabidopsis thaliana landsberg
  unsure (1)..(199): unsure at all n locations
tcaaccgtcttgtcaggcttcacaacagctgggcttatcctactcgctaagcagctttcatcagaaaaagagtgaattcataatccttcaggggtggtctctattactctcatgtacagtgccaaatattcaaatttacaatagtaaatttttctactttctctgtctatgncgtaaaactatgaatgtgttgagtgta

SEQ ID NO: 148584 - DNA, 1873 bp, Arabidopsis thaliana landsberg
ttaaagtctctctctttcttcttctttactttttcttcttcttttagatcaaagaaatcgttttgtgcagatttgatcttgcgttaattttctaagcaaaatatggcgggagaagatagccgtgaagctcaacgaggcgacgaatatgaggaatcgagtcctctcttgaaggtgaacgagaatgacggcaagatctgctcgaaaagagatgccaaggcggcgcctcttgtgcctcctcccgcggcggaggaatacggctggacggcggatggattgcctgtgagccatggtagcgtgattggcgagccgatcaggagaaaccagtggaattctggtctttttacctgtcttggtcgcaatgatgaattttgcagcagcgatctcgaagtttgtgagtatttcgttgaattcgtataatttctgattgtaatttgttttctaaatttggttgggttgttaaaaattgaatctttagatcttattgaagttcagagataaatgggtttaggattagatatgattcggattttagaaatgtttgttatgtgtttgatgaaagtttttttagtgatgagataatggataattctgtgtaggtcttcttggaagtgtggctccttgtgtgttgtatggaactaatgcagagagacttgggtctgctccgggaacattttcaaaccattgcttgacgtatttgggattgtactttattggtaattctttgtttggctggaactgtcttgctccatggttctcttattctagccgttctgctattcgccgaaagtttaaccttgaggtaatgatttatgtttccttcatttaaacaatagagaagtgagtttgggagaaaaaaggttgccgtgtaagaagatattgattaactcttttgggtaaaaacagggaagctttgaggctatgaacaggtcttgtggttgctgcggtggctgcatagaggacgagatgcaaagggaacacttggagacgacttgtgactttgtgacacatgtcctttgccatacatgtgccctttgccaagaaggacgtgagctccgcaggaaggttcttcacccaggtttcaatgctcagtccaccgtggttgtgatgccacccatagaacaaaccatgggtcgtaagtgaagcttacattgagtcgagtggtctaaacagcacttgtaatattgagtcgagtgaagcttacacacgttgtgaaaacaagtgtttctgtggaactcgaatcatgatccttgttttttgcttactttttgaataagccctctctggatgtaatttgtcgcgtgtctttctttttttttatcgaaaaacaaacatatgtatatctttattgctacgcatttgttttgacattgtctgaaatgttcatttgtttcacaattcgcaaagcctaacattgacgtaagagttttgaggaaaccctttggatccgacaaaaggcataacactatgtggacaaataaagttaagtgaacatgatagactctctacaactgcaaccaaatatgtgaagggaaaacaaaagctgatgagattcaaattttgtagtcttaaccaaaacagaacaagagtcgttttctactctccacacaaaagtctcattgacattgtgattacaggaaaaaagtacagactgtttaagaagctggaatttattccccgggcacagggactccctgcttcagcttctcacgcttgagcttctttttggaaagaggcttcttcttccttggaggtagattcttctgagcatacatgtacataacgtaattggctatgagaaatgtcacaagcagacctccaataacaagcagcactatcaatccagggttcaatcctttggcttcaacaaccgcct

SEQ ID NO: 148585 - DNA, 598 bp, Arabidopsis thaliana landsberg
ccggagaatctgttgttaacttcagatgggcacataaagattgctgattttggtagcgtaaagccaatgcaagacagccaaatcacagtgcttcctaatgcggcttctggtaatatgaagttcatgatcctttttctatattcttgagcttaaggtcttttcgatagttgtgtaaacttgtgaattatgcagatgataaggcgtgcacttttgtcgggacggctgcatatgttcctcctgaagttctaaactcctctccagcaacgttcgggtaagagttttgtgttagaacaaactttgaccactatgtgatgaatatatggagttttttttttttgaagtagtcttttagttatgtggattactacatatcctcttacttagaacaatttttctttggtatttctggaacttattcaaacagaaatgatctctgggcactcggctgcactctgtaccaaatgctttcaggaacttccccattcaaggatgcaagtgaatggctgattttccaaagaattatagctagagatataaagtttccaaatcatttcccagaagcagcaagagacctcatcgaccgataactagtaagata

SEQ ID NO: 148586 - DNA, 714 bp, Arabidopsis thaliana landsberg
tagactggagtttatggtcaggcttttccttgtgtttattatgttctaatgcaccgcacatggactggagtgtatggacaggcttaaccgtgtgctctggatgttctgatacaccggacatggactggagtgtatggccaggcttgaccgtgtgctcaggttggacctcatgatctggctgtagcataaccatcccaggcatcatttcatggttcagatctagctttcttggctccatcatagggaggtccttaagaatcctgagtgcaaaagtagagctgaagaagcatagtaagaagataaacccaaagcataagccttggtgtccctgagccattatttctatgtaataagttgatcctgctgtacattcctgataaaatgatccctcatgcttttataggaaggaagacttttacttaatagaaaacacatcccctaaacgcaagacgccttgctgaaaatacgcattaaaaatcgaattcacaaacatagcatgacaggcataagaaataactttttttgcgataacacaaatcgtatgttcagcaacttcaactctccaagtttcgaaaccttattacgattatttgcaaaaaagaaactacatcaacaccatcttggcagaagaagtcattataacaaaaacaaacaccaaaaaaaaaaactcaactgagagtattcaactgagcactacttggtagatattagaca

SEQ ID NO: 148587 - DNA, 461 bp, Arabidopsis thaliana landsberg
ttttttgagagagcatgccaaatccaaaagtaaaccactattgatccagctagatgaacagtggatacggtcccactagggtcaccaggcgtgttgtaattgtttcaaacccacgttaatgaatttgagagaatcttcttcatcagtcctttacctcattgattatcttttgtcccatgtcttctctttaaccaaccaaacatgccttatcaataggacaaaaggggttgtaggtttttcaccaatggttattcaaaccctttgatgagtttaagctttgcttcagcaacttgaggtaatcaatggcttcgtctagtagtaaaagagcttcttttccctttgcccctggaactacactctccaggattctcagagcggtgtgaatcttgtcttttcttgactgctcgtcgctcaaaccagaacccgtttcttgtttgcttgaaatgtttgattcaggaagg

SEQ ID NO: 148588 - DNA, 618 bp, Arabidopsis thaliana landsberg
cactttcaagactataaatatcaattacttgaacattaatagccaaaattacatatcaataattaagaaatctaatgtaaacagcgagcattcaaaacaaaagacaagaataataagatttcacttgcctctagagcatctgagtttaaaactcaaatgtacttaaagaccccaatgttttcaagtcttgatgtcgttagtgtctctagcacacctagtaatgacactacatcctctgttgtaagcattagcctgaccagagcgacaagcgtaataagaagcacctggtttctgacaaggaaccatatctctccttaaagtttcgtagcttatgtactgtttccgcatcatcattactctccgacttatctccgatggcatcatctcctctccttcttcctctccgattacgccgttccggttcagcattgcgtcgatttcgccgtttaccgacggaatcggaactgtgacggagattgagagatgggtttgaagacaaagtaaggataagtaaacgagagctaaggatctagacatgtcggtgtgtgaaaatttggtaagattgtgatctctgtgtttacgacaactccaagtacctcttgggagttaaaccggtcg

SEQ ID NO: 148589 - DNA, 292 bp, Arabidopsis thaliana landsberg
gtaaggcaactccggtagagtggaaaagatgactgatcatctgataaaaaaagctgaggcctttgatgtttctaaactacatcattttactatctatatagctaatgtgtatgtctgtctttgtccttgtgtttgtttttctctttgtgtttgtgtaatgagttgagaatgtacatcataggttttccttttctttttttgtgtgtgtgagggatcttcattttccgtttaatcttacattacttctcatatattatcttcaaaataaaataaatcaacttaagatggttat

SEQ ID NO: 148590 - DNA, 685 bp, Arabidopsis thaliana landsberg
gcgaccaatcccagatcttctaaaagatgtcctagtcaacttctgacttaaagtggaaaaaatcatcgaggaagcggaatcgagttgtcagttgctgtccacacgatcctagcttgaatgatggtttctctagtgaaagatctttggattgtgagaactgtaagttcatggaagatacttttggctcttcagatggacagcatttgacaggtctattaatgtcgagatgatcatcagcttggacctagttacttttcttcttgtgaggtacatattaccctgatgggcatctgctcaatgcgattttgggttttaagattactggtaactcgcaagctttcttgggatggattataggattagctcgtaatggcatccaaattcgtttgtgtacttatgttgtgacagtagggcatagtgctttaattcaatcagcaaaattttggatgcagtagaagtaggtaataataacattacctcgctagtgttttaggcttaatcagtgtttttctcttagaattaagttatcattttactctctttagcatagagatgattcgttttctttttggtctggtgggatctttcttttcatgtaacctatgtaacattaaataaaattatcttgttaccttgatctcaacttcattgtctatatgatacgtacctttcttacttgttgaat

SEQ ID NO: 148591 - DNA, 820 bp, Arabidopsis thaliana landsberg
aaaccaattctgcatatgcatttatgtcactcctgcctcaaacaatagagagatttgtttttacagaaacagagtaataaataatgaacacagatacaataatctcagtggaaccaaaagaaaactattttacaaaaacctcattcatgtcaagaagctttctctgtaatgttatttacattccctgaattccaccaatacgtcctttgatttccaatcttattaccattattatcattaccgacatctcttctctctgactgaacttcttgttgctcggttgatccagggttctctgtcaaacattgttcccaaaagtcatcgttaacgcctgtttttggagcaggcgcagtaacggtaacgggcggctctgagttcatatcaatcttcgatgatttgggtcgtgtatcgccaatacttagacttgactcagctgcatcatgatccatgcttgatgactgcaaaccgctcttctcgcatgattccgatacaagattctcccaaaacgttagcgaagattctaacttttcgacctgttctatgtgtgaactgcttggaggaagagagttctcttgaaatcttctttttcttctctcatggttttcgaggtttagtgaaagtcctggttttcccaaaacctgtgaaacatatgccactattgatttctgatgttgttccatatgttgtaaccgatctttcaatgtcgttacttgcagctcaaactctttccgttcttgctcttggttctgtaactccgcaagaaggccttctttctcatttttcagtctttctatctgatcctccatgctccgtctttctg

SEQ ID NO: 148592 - DNA, 215 bp, Arabidopsis thaliana landsberg
ataaagcttaaacatacaagaacagacaataatgaaattacacgagatagaactgatataatacacaagtgttgttgtttgctagagacaacaactaaggtgttgttgaagcagaaactggcttctcgaggactccttcagtggcttttttgaataggttatgtacctgtcttgaggtgaaaccgatcttttctaagtcggtaagctgttgagaa

SEQ ID NO: 148593 - DNA, 207 bp, Arabidopsis thaliana landsberg
ggttgaaataggtgtattctttactgcttcttttgagaaagcaataaccaataaagtagaaggctctccttcgtaattgacctggaatctgtgatatatgtattgaaagtaccataatttacagtttgtctctcagttcttgaaagtttagatgctgtctaatgatatttggtgtatgagttaagttcctagactaatcaagaagac

SEQ ID NO: 148594 - DNA, 880 bp, Arabidopsis thaliana landsberg
tatcttcttccccatttctctgaaaaccctaatttctccatctctcaatctctctgtgtttgtatctctcatctctgtttgagagatgataaggtaacttcaaagcatcctcgtgaattcatcttgtaattacaggtactctataaggaactctctagcttgattcttaaactctgagcaattgtctttgatcaattcaccaccttataaatgataaaatctctcctttttgatttttatgagaaaaatttgtttgatcaagtgttgataatttggttttaaggattaaatattttgatctgtgatgtttttgaggatttggtctttgtttgaagtattgattgttacagattctataatgtgatcctgatttaggattttaattcgagataaatggcgacaaatgcgtgccttgagtccgattcgcttctacctccacggaagcgtttactcgccggattcaagaaccagaactcgagaatcagcaatgaatctccgagtcctcctttcgcttcttcgtcctcgtctactacaacttcaaatggttcctctgcttcagcagttgtgcacactcatcatctcggccatctactcaatgaccagactcggtccccggaagagcttgctcaggcgtcgaaagcaaccgctgctttagctgttaaggttgcaaaggcggcgagagctactgctaatgagaaggccatcattgcttctaaagcagtggctgcagccaagaatgcgttggaattgtttgcttcttttcccgcagctgagacggtttcttgtgaagagcctaggttgattcgagctataaacaattctcctagagtcttgacggattgttctggtcacagaaacaagaagcaaaagactctgacta

SEQ ID NO: 148595 - DNA, 74 bp, Arabidopsis thaliana landsberg
attaattaacatccacaggtccaacaacagagaaacaaaataattatcacaagtaaaatataacaatagtaata

SEQ ID NO: 148596 - DNA, 176 bp, Arabidopsis thaliana landsberg
atggataacaataacaacaacatgatgataatcagagtcataacttctctacatttacacatcccacaaggcagtaacaacaacaataacaacaacaacaacatcaaaacctaaaatccagcttatcatagcaaatatcataggaacatttgtgtgttcaattgtcagctacttac

SEQ ID NO: 148597 - DNA, 427 bp, Arabidopsis thaliana landsberg
tattaaattattagacttggtttagttattagattaaataacaaattattaagggaatataatcttgattgattaatctaaattgttgtagtttgagatcgttgttgagccggttccattgttgctagtcctatttcttaaaatctaaccgagttgccaaggtgagggcaggatctgtggaaacatagtatcacctttacttttgtatttctgaatttcatttgtataagattagatattgggtgctgattgttaaaatgttaggattatatattaaatattgttgattctgtaatcaaacaatgaatttgtactaagggatttagacaaattcactcctcttttggctcacaaataatcaaaggaaaagaactaggttgcttgaacaaaaagctagggtttgctctgtaatagtagtctcttgtat

SEQ ID NO: 148598 - DNA, 132 bp, Arabidopsis thaliana landsberg
ctctctcacacacacccaatttgcatttctttcgtcatcatcatctactctttttgcgtttttcccagctgaataatctaaacaaggaaaagtaaaacagagtaccaatctcagattcatcagctccacttg

SEQ ID NO: 148599 - DNA, 144 bp, Arabidopsis thaliana landsberg
taagctgaaaagctcgctttctgttctcggaatcagcttctccgttcttgattgaccaaaccatctcatcaagaactgtctcagaagcagcttcagagaaaaccttctcgcaattcatagcacaagcctctaaaagctcaaggc

SEQ ID NO: 148600 - DNA, 610 bp, Arabidopsis thaliana landsberg
tgttgatctgtctgtgtgggattcttcctttagttcctctgttgatctatccaatcgaatcttacgaaaattttcggtaaagtttcactctttcttgtatttctatcataggtgattgtagagattcattagattttatgtgattacgtggtcaatttagctactaggtgatataatataaactatagttttcacttgttttgatcaacatgttttgtttttttcccgacctttttagctattgtatttgtgtggtgatcagttatttctcttgcaagtaaagtagttttgtgattttgtgaaccgagttagggttaagagatggggtgatgttggatactaaaagttttaattttgacacttgaatgtttctgggttctgcatcaaaagagtgaagatgaggtcgcttcaagcaccggttgtttgccctagtgttcgtcccagacaattgggtgtctctgctttacttgtcaactgctctgtttcgaaaactaggagtcttagaaaacaattctggggtaaccagaccaaaaatgacaagtctcaggctgctacagagaatcttcgtctgcatcttcggaggtataagagtatcaaatgtcttttcagc

SEQ ID NO: 148601 - DNA, 205 bp, Arabidopsis thaliana landsberg
tatccttaccgttaccaaacgcttctcctttaatcatcatcatcatcattttatctccgtcccttcatgttccgttacccgttaacggctgtttttttttaatctccggtgaccgttcttttctgattccaggtgttgccagctgttttttttttgggagatattttttttaaattccttttaaagttagttataagtcagtttt

SEQ ID NO: 148602 - DNA, 291 bp, Arabidopsis thaliana landsberg
cccaacaccagatacattataattaatcccagctcacgaagctttaaaatcttcaccttccatttgctattgatcatcttcttacatctctctccctctaaatatatccaaacaagaacgaaaggcaaaagagtacatacaatggtgaactttgtggatttacaaaaaccattgttgtaccgcctcatgaaattggccggagtcattccttacaccgtagagcttgaaccagggacaaagatgaacttctggatcccaaaagaaaccctaaaaaaaaccaaaaaatctgac

SEQ ID NO: 148603 - DNA, 1068 bp, Arabidopsis thaliana landsberg
acccaaacacataaaaaaatgagtcaacacaacatcttagaagctctaaatgtccgggtcgtgggtacgggtgatcggatcctgtttttggcccatggattcggtactgaccaatcagcttggcacttgatccttccttacttcactcaaaactacagagtcgtcctctatgacctagtttgcgccggcagtgtcaaccccgattacttcgatttcaatcgttacacaactctcgatccttacgtcgatgatcttctcaacatcgttgattcactcggaatccaaaactgtgcttacgttggtcactctgtttccgctatgatcggaatcatcgcttcgattcgtcggccggagcttttctccaagcttatcttgatcggattttcgcctaggtttctcaacgacgaggattatcatggaggattcgaagaaggtgagattgagaaagttttctcagctatggaagctaattacgaagcttgggttcatggatttgctccgcttgctgttggagctgatgttccggcggcggttagagaatttagccggactttgtttaatatgcgtccggatatatctctgtttgtttcgaggacggttttcaacagcgatctgagaggtgtgcttgggttagttagagttccgacgtgtgtgattcagacggcgaaggatgtttctgtgccggcttcggtggcggagtatcttaggtctcatctcggtggagatactactgtggagactcttaaaactgaaggacatttgccgcagcttagtgctccggcgcagcttgctcagtttctccggcgagctcttcctcggtgacttttttttatagatataaaaagagaacaataaaatataattggtggaatatgggtttagtggggtccacgtatcgaagaaaagaagggcctctatttgtggaggacagtttggcattgtcacaaatctagtaagataagattgttcacttgacacgtgactttcgcttttttatcactttttttcttgctctcttcattagtttataatcacaagtttatttcataaaataattggagaataacc

SEQ ID NO: 148604 - DNA, 80 bp, Arabidopsis thaliana landsberg
acggtgttctgattgccaaagcaaaatttcccctcttttgtagcgttggttgcatggaaatatccatggatggtcccaat

SEQ ID NO: 148605 - DNA, 958 bp, Arabidopsis thaliana landsberg; identical to SEQ ID NO: 52689

SEQ ID NO: 148606 - DNA, 331 bp, Arabidopsis thaliana landsberg
tctgtgagtagcgggaaaggttttaaaactgcaaaggcaaggaaaggactgaatttcaataatgttgatggaaaattaataaatgctaaggttctttcagaatctgaacgcgcaagcaaagctgaggctgaaattgtggctttaaaagatgctctttctaaagtgcaggctgaaaaggaagctagcttagctcagtttgatcagaatttggagaaactgtctaatttggagtctgaggtatctcgtgcacaagaggactctagggtgcttattgaacgagccacaagagccgaagctgaggtcgaaacgctcagagaatccctcagcaaag

SEQ ID NO: 148607 - DNA, 349 bp, Arabidopsis thaliana landsberg
gtatgcccaatcaatatatatataaatttattagatacatcaatgaaaaccaaaaaaaaatcccagaaaattaaaatcttatcaaatatgatacaacgataagtaaaacggccagttccaaaactgaaccgaagccaaactaaaaccatgccacataaatttgcactcttgggatattccaaaaactaaaaaaaaagagaggtaaatttgatatttgggaaaaaaatttacaagcagtcatataattatataataaatcccgttttaaacccatcaaataaaaattaaaaaaaccacttcatcgaactttaccttatgtgtataaaatatatatttttgggttaagaag

SEQ ID NO: 148608 - DNA, 93 bp, Arabidopsis thaliana landsberg
ggtttgttatacttggattcaacaccccacaaccccacaaaaactgctcattaagcaacaaatgaatcacacagctctagataggagaaatat

SEQ ID NO: 148609 - DNA, 180 bp, Arabidopsis thaliana landsberg
gtccaaagttgtgactgccacgtagtagccaagctcttgggttgctttcttggaagcaaacgcctctagtaactctactagtatagctctcttcaacatcagccctttggcatccatgttttcagctggaatcatcacgttccatggtaattggactttgagaaacattgttcaaccttc

SEQ ID NO: 148610 - DNA, 750 bp, Arabidopsis thaliana landsberg
ataaaattcacaaactatagtcattaatacaaaaagaaatcattgaatatggtagaggggaaacaaaaaaaaaacacgacgatgtaagttggtggaaccacattatcaaaataaaagaaggtggtggaaccaaattgaataaagtccgtccatatcattatccgtcccttaggagcctctaattagtaatattcttatgggtccactgtggcttagaggacttgattaaaaccattcttatttagtgctaactttgtgagggttggaataacgaaccaagctgattcaaaccattccaaaacaaagttgtcacatattctaaaaccaaaagtttaccggacagagaaatatggtgtgtttttctcaaaccaagctaaatggaatccattgtaaaccaaaatgttcacacctacctattcttttggagtcccttttccatgtgtttgctgtctgctagtcaagtttcattagctgattgccttgcatcatattcttggatcaactattttttttttttttttttggggtaattaacaaaatgcttaaatttctcaagactataggatcacattacctgtgtgcttaacataacttttagataggctagagaattgatctattacaagataatcaataatttacagaagaaaacattcttttttttgttctatttccataatgtaggtatgtagctgtatattatactatcttgtattttcgatatcgtgctggaactgtcacaaatgcaat

SEQ ID NO: 148611 - DNA, 142 bp, Arabidopsis thaliana landsberg
gaagcgaaaaaaagagagaattaaagtcattcattatttggggaatggagaagaagcttctttcctacagacgccatcattaacaacatcctcttaagcttctgcggattcttttcgtttgtcggaagatttcacgacgatt

SEQ ID NO: 148612 - DNA, 212 bp, Arabidopsis thaliana landsberg
aagttacaacacacaaacatgctaacattgcatcatccctaattacattaaactacatttgattctctctctctctctctttgtgtctcatgtgtcatgaactcaccagtgtcctccatatacccatccctaccccaaccatcacagccaccattaccgttgcaacaccttccatcgcttcctcctcgtctctttctgctctgcactgtacc

SEQ ID NO: 148613 - DNA, 301 bp, Arabidopsis thaliana landsberg
aattaaagttgctcgcagagagaattgatgatggagcatgaattgaagctttcttgtaatttatctcaatgtcttccacctaaaccaaatcttatttgtctaattactgtgaaaaagaaagaaaaagcctatcttgaccatgtttaatgaatgttaattacttattaaattaaactgggagaatagttagttgccaaatgaaggaatacaagaagtgggcaatgatgcaagcatctatactatttaacaaataaaaattatattcataagtctaatcttcaaaacaagatcttgggcaaat

SEQ ID NO: 148614 - DNA, 573 bp, Arabidopsis thaliana landsberg
atgcctaacatcaccaccaaacaataactcaaacctccccaagaaaaatgaataaatttattaaattagagaacttctaagaggtttatgcttcttccttttcttttttttgggttttagttttggaattgacaccgtaggttcctgtcagaataatataaacactaattgtacacaatgcttttaaaaagcacccccaactccgaaaaaaattgtcatccctttttttagttgttctgttccgtctgcttctttcttcatcagactcttttaaagtcatttcgtctcgccagcacaagctataaccggaacttcccaaccattcagagtcttttatgctaaacaaaatagttttaaagatctttcactcacccgcctgttgcttctgatccacgggtttgacctgaaccgcagaggaaacagcgtgaacattagtgaaccctggaggcccaagctgatgttgttgagttttacccataccaccacctcctttcatgttattcgctgcagatgcagccgctatggctttcgctggatctgaagtggcggtgacagctcccgtgactggaacag

SEQ ID NO: 148615 - DNA, 82 bp, Arabidopsis thaliana landsberg
attactgactaaaagaagcaaaatcttgagtagaaacaaattttcctgtatctctctctcttgtaatctccgacgaagaaac

SEQ ID NO: 148616 - DNA, 92 bp, Arabidopsis thaliana landsberg
acgtctctgtgaaatgctcaagctgattagggtttatcaactttttctcaactttcttgttatctccttcgttgtcctgtctgtcttctcag

SEQ ID NO: 148617 - DNA, 789 bp, Arabidopsis thaliana landsberg
cgaaccctcgatctcaaggcgaaagcagatttcgtagcttccatggcgagaaattcgaattccgatgaggctttctcgtcagaggaggaagaagagcgggttaaggataatgaagaagaagatgaggaggagctcgaggctgttgctcgttcttctggctccgacgatgacgaagtagccgccgccgacgaatcaccagtctccgacggagaggctgctcccgtagaagatgattacgaggtagctgcaggctaatttcgttttgatggctgtgatttttgaaatctcagtgaactgcatcttttttgtacttggaaagttgaaatttcatttaatgcaatggattcggcgttcgcgtcttccttcgtttgttagttttagtcgaatttttgttgagtgaaagttcattgaatgtctgcgcatggtggctcattgtggtataagcaggacgaagaagatgaggaaaaagctgaaatcagcaaacgtgagaaagccagacttaaagagatgcagaagttgaagaagcagaagattcaagagatgctggagtcgcagaatgcttccattgacgcggatatggtgcgttgtttgaactatatatttcaggtttttagctacttttcgttctcgtgcttttaagttctgacgattctgaatcattccatgtgttttagaacaataagggaaaagggagactgaagtatcttctgcagcaaactgagttatttgcccactttgctaaaagtgatggatcttcttctcagaagaaggcaaaaggaaggtgtgtta

SEQ ID NO: 148618 - DNA, 530 bp, Arabidopsis thaliana landsberg
ttcttgattcctgtttttttttttttttgccagcttcgctccaagaagagtatcaaacgcgtagaatccaccaaatcaaatccatggtggtgggatagtcatatcggtctcaaaaattctaagtggcttgagaataatctcgatggtgagtccattcacattatgtcgttttcatgtaatgaaaataccttattaggcttagggtttcccaaattaggtggttagtcttttttcataaaggaaataaaaaatatgccaagtttatgttttgtgtgatgattatgatcagagatggaccggagcgtgaaacggatggtgaagttgatagaggaggatgcagattcttttgctaagaaggcagagatgtattaccagtcaagacctgagcttattgctcttgtggatgagtttcaccgtatgtaccgtgctttggcagagcggtacgagaacatcaccggagagttgagaaaaggctctcctttagagcttcagtcacagggctcaggtctaatctgacatctctgcttctg

SEQ ID NO: 148619 - DNA, 822 bp, Arabidopsis thaliana landsberg
cgtcgccgttatcccccgccagattcaaatctttcttccaccatcgtcactcattgcttctcctccggtcgtaaggtacgacacgcttgtattcttcttatctattgctttctcatcgtcgtgtttctccattatatgtatctctctatgcgtgtgctacttgttcgattgtatcgtttgatcatttgaatgttatctatgtctctctctctcgctgttggtattcactctattcctcttttaatttcagtctccattgtatcaatttaagtttcggcacctctgtcttttgtttcatttttggtatttagcacctctctcttcatttctgggcttagggttttacgaattcatgattgaggtgcctcttcacattcgagagaaacttactttccatcaaaaagagaaaaagttgaatcgattctgaacttactaatctagactctcttagttcgtgtggacctggttgatgcatttttgattagatgccagattcaatctcgagctttctgagtgtttaccaagtttgatttcaaatttatgatcaatacattgtttcttctcttgtacccagtttagtgttaagtttccggaaattgattgagattgatgtctcgatgctcatagacctgaaataatcctccttctgtgcagtatttggaaccttgaagacttaaaaataacaactttttatagagggcactgtccaatttattggagagcttgacagtgtaataagatatatactctacaagcgttatacccgaagactgggtctataaatcaatgtcagaaggtgaaatggccatcattaaaccagag

SEQ ID NO: 148620 - DNA, 271 bp, Arabidopsis thaliana landsberg
caaagttgtgtctctctgaagtcagaaccaaaaatataagacgagaaggagatcaatggaggaagaatacataagaataataagcataacaacaataggagtaatctcatggggtctcattttcatccttgtaagacgaatcttctcaagctactcgttcgacttcagcacccgtatagtctcaacgcttcacgcaacaatcgctgtcactttagcaactctctcgattcaagattggtcttgtcctgtttgtcccattgcttctacatcg

SEQ ID NO: 148621 - DNA, 538 bp, Arabidopsis thaliana landsberg
tgacacagcccagtttttttttttttaatatgaataataataatattattcaaacagtttgctactctctccctcaacttcttgaaatccctttcttgacatctaaagagagagttttgtatgctttaaaattaagaaggttaaagaaaaaaagagaagaaaagaaaaaaagttgattaacatattgattaaaacatgagaaccagagtctctctgagagatcatcatcatcatcatcatcaattgatcagcatcactgtcttcctttctttgcacagcaaggcgggcatttatactgcttgatgctctctgctttagccggagttatcttgacgcattttccatggtaccaacgttcacaaacatcacagcaaatccagaactcctcatttgtgtaatgacctccacagcttccacagagagtgtctccatgctcgtcttcttcttcctcctcctcatagctctcttccattagtttcggtgttgagctctttgtctgcccgtctattgatctctgctaattacgatttttgatttc

SEQ ID NO: 148622 - DNA, 242 bp, Arabidopsis thaliana landsberg
atccctgaaatgaaccaacaacttgctatctttttccttataacgttgtttaattactgaaccagagtcgtgtggctttatgtttaccatcattctctttgttgtctttctagtaacactatcctcctctgtagcatagaagcataagtccttatcaaagtgctgatcgataaatgctcccttgcgaagcatctttttagggaaggcacctttcagttccatatgcaggcgtaacatttcat

SEQ ID NO: 148623 - DNA, 390 bp, Arabidopsis thaliana landsberg
gttaaagaatatatgtctccattgatcagatatgattaacaaaataggacaacaaattgaatgaaggaaaaaaagaaccaagtttcataactatagatatggtgttatgtacaaagcgctaacacagtgaactagccagtgtggtatggtgatattcttaagaaattttgcagactaaacaaatcttcccaaccccattcgctatacactaccttcgaatgccatttcctacgtctgtgaacctgtcgactaatcattcttttgttgtttgcaccgaataacagtgtttgacaatgcaggagttgcttcatagttcctgtaaaagagtcaagctcttaggcttattagcagcttctgacttcattcaagtggattcaaccttggattata

SEQ ID NO: 148624 - DNA, 364 bp, Arabidopsis thaliana landsberg
  unsure (1)..(364): unsure at all n locations
attaaacacagancgattatagaagatagatagagaagcgaaatcatcaacgaaacataatatagcccgagattaatatgcaatttcaccaagattagagtttgtcaaaaggggtgaaattagaatccgaaagtcattagcctactcgatccggtttactgattaccggattccacaaaagacaaaataaaagcataaacctaggataatagatagtttttttttttcagaaacagacgaagaattagatccgacgacagtttttaaacctctttgttctcgtcgttctcaacggtgatcacggtcttcttctccgcgaagatccaagtgacaccaaaaggatccgtaccttttcctttgaatc

SEQ ID NO: 148625 - DNA, 66 bp, Arabidopsis thaliana landsberg
tgatgtgatcaaatatgataaagaagagagttgattgatagtgataacagattcaattgggggatg

SEQ ID NO: 148626 - DNA, 1018 bp, Arabidopsis thaliana landsberg
ggcaaacaagaactaggcagtttctttgttttagacaacaagaatctgtgaactaacacaaaaacattgaaagaatgatcttaacaatgaaacttgttcaccctctccatcactctttgtcttcctccattccctttccctcaagtacacacatctgttatctctctctgtcaattacttgtatgttttgaaccaatatcgagacatcgattaagcaaaaattgttttttttttggatttgttataatttgcaggaaaaaggcaatccaaaccgtaccggtgctcgttaccttctcccggctgcgaaaaggtcatcagaacagagactgtcctgcctccggcgccggtgagttgtgaagggagaagggtcttacttggatgtcttctcgctacaggttagatcattctctattagttcttcacatctccacttaagctcagtgtatcaaaatccttagaaaatgttgttatctgattcaaaacagcttctgggattttgtcaactggttcagccgaggcagtaagcaccagtagaagagctgtaagcaatatatatatctatgcatacattgtgttcttgactcaaaactcaatctcttacatacaattctctgcagctacgtgcatccaagttaccggaaagcgatttcacgactctccccaatggtctcaagtccgtaatccaatgcatcatcttttgtttgaattcgatacagtactcataccgcaaaacaggattgaaaaatcaagtctttctcgcaataatcacaagtttggtttctgtttatattgttgcaggtactatgatataaaggttggcaatggagcagaggctgtgaaaggatctcgggtcgcagtacggttgtgaatacgtttcctggtttactttggacatgtaaatgctaacagttttaacaagcgttgatgcttaacccaaatgttgtgtcgtaggttccctatgttgcaaaatggaaagggataacgttcatgacaagtcgacaaggacttggtgttggag

SEQ ID NO: 148627 - DNA, 355 bp, Arabidopsis thaliana landsberg
gctggaattaattaagtactctcttgtttacgaattcaatcactggagaaggaagacttgttggttacaccaaaaagtctcttcttcaatttctttaattcagaggcagtagtagtacactcagatataaaagaaaccaaaacgatcggaatcttcttccacttgttcttttaaaagattaaagcttttttttttctcttaaagcaaaaaaaggaaaactttccctctcgcgtctctctcttttgacctcacattcgctgaatcactcttctggttttttttttttttttttttctttgccctagatcttaaagacaaggaggatcaaattatacttttttgagatctgggttcg

SEQ ID NO: 148628 - DNA, 640 bp, Arabidopsis thaliana landsberg
tctctccttgttttctttccacttcctctcatatcgtcctcctcatcgtcgtcgtcatcatcatcttcatcatcgtactcatacaactctctactcctgacgcccttcttacccgacccagaacctggacccgactgataattatggtatggaacaacacttgtttgcccagagacgtggtgcctaggtcccaacggcccgcctaagatgctccgaaccggtaggagaaagtagaactctttgtctccgatctgcaaaaggtcttgtgaatcgagcttgacgttaggattcccagggagatgaagaacaccttcaacgaggcagccatttttgccaaggacctcgagagagaagcgtcgtctagtgaagtcatagaagatccgagcgtggttgcgcgagatgttcatcccaccgccgagggatgagagatcaacgtcgacggtggctttcttagaattccggccgagtataatggagtaagactgcatatagtactcgaaatcctcaccttgaagcttcgcaaatccaacctccacatcgcttccgccaccaacagccgtagccatgccgtgaaattctccgatttgatcgaaagaggaaccgggacttccaaattagggattgcaatcgtaataatttg

SEQ ID NO: 148629 - DNA, 398 bp, Arabidopsis thaliana landsberg
tatatattaattctttatagagttcaattttaatatttttactacatcaaaaaaaaaattgttttttttatatctcaataaatatattctatttgtaattaattgagaaagattattgattataggggtgtcaaaataggttaagattcatgggtcaactcatcttaacttaattcaattcatgaactctgatgggctgaaatttttaactcaaatgggttgattgatcaaatgagttattgggtcaaatggttttatgaatgaaatgagttgggttgtaatgagtcaatggtttatctatttaaacccatcaatttttgtaaaattgaatcaaaccaagttaaatctctaaaccaatgttaatttgagtttaaccaaaatctataaaccaattgaat

SEQ ID NO: 148630 - DNA, 386 bp, Arabidopsis thaliana landsberg
ataaacatgaaagagctaggcagtgtgttgcagatgcaaagcgaaccagtgcggattcaaacgtcaaagaacacattggatctaagaggaatgcgggcggaagaagcggttcaccagctagacatggccatctcgggaagagactcgggctcgatcctatttattattcatggaatgggggcaggcattataaaggagctagtgcttgagaggttaagaaagaacactcgtgtctcaaggtatgaacaggcaaatcctatgaaccatggatgtacagttgcttacattaaatgatatatctctcaaacacattctttgtaaatcttcttcaaagtgtggtccactaactagtttcgatcgtgaatcaacgttcaaatgtacaagaa

SEQ ID NO: 148631 - DNA, 420 bp, Arabidopsis thaliana landsberg
ttttggtcaatcactgacacatcatcaaatatctagttagacaaagctagctaggatagtagcataatcaatgaacacagctagctacaaatggtacattccataacgaatacaaacactggtcactcatcttcttaatagtccaatccctgttgctgatcaaacaagtaatggagaatgcagatccagtttggtttcagtctcatggctttttgtttctctctcagtctcaacattacattcttggtatctgaaacaagctgtgagatgatcattaacaatgccagaggcctgcaagaaggaatacataacagtaggaccaacgcagcgaaaccctctctgcatcatatctttgctaatgtactctgcctttggggacttaaccggtacttgacgaccatatcgatagccatttcttaa

SEQ ID NO: 148632 - DNA, 415 bp, Arabidopsis thaliana landsberg
ctttttctctttttcattgactctctctctctctctcgctctggaatcatcctttatttctgtgactgtgtgcactttcagagaggagagagaggcccaaaaccaaaagaaaagaaaaggttgtggcttgcagctgaatcaataccatctccatatatacaatacaccttcactattcccccttttgtatttttattatatttttcccatcaaagtctgtttttttagactccgatttgccgctttgtgtgtgtgtgagagagagaaagagagctatctatcctctgttttatggtctctggatctctgacaatcgagttgagttaattacaacacattcctctctttctcaatcgatctgtgaaatcctagattgttagctgtgtctgttttcagacaaatatgaacaccggtg

SEQ ID NO: 148633 - DNA, 237 bp, Arabidopsis thaliana landsberg
tatgtcataaaaaatatagtttatagttcttttcttctttttcattacattgaaattatatttttcacaaacagtaaagtgaaaatcgtaaatacaatatacaaaatcacattagacatacaatgtttctaaattctttcaaagtttgaaacttgagggcctcttaagcctgttcctagaatgccaagccagaagatattttcttttattcggattggtctacttactcaagaagtt

SEQ ID NO: 148634 - DNA, 380 bp, Arabidopsis thaliana landsberg
cagttaactttcgatctctactttcttttgaagttttgctatttgctgaccatcaagaagttgcccttttttttgttttgcttcaagtatctcaatttgttgcaactttttcctcaaagctcggacttctttggaattgtgttgagtcagctcatcttctggttgcaagaatgaatccattcgagtaccaccaatactggaaaagtgtttcacatggctgtcacgagttcttagaatgtcgctctcactttcctcctcttcactgtcaataacaacaggaaatgtggctgttggggttggaagtggtcgggagctccatgtttcagatgatctgtcatccagtaatttctcaagattggcaagaacatcaggtgatgtat

SEQ ID NO: 148635 - DNA, 400 bp, Arabidopsis thaliana landsberg
gtcgttatcaaccctcatcatcatcatcaccaacgtaaccaccgacgccatcatcatcgccattaacaactggatctgtctccgtttccatcaaatctctttctctctctgcagatcaattgattttttacaacgtgattgaagcggggctagctccggtgacgatagttgattggttttgtcccttaagatgagctccttcaatggtaacgaacggcgtcggcggccgtgaatcatgagagagatggctcagtttctttttcttttctctgatcttcctctttatcatcagattctatcttagaaacttatcaatgtgcgtttgattttttttgcttgggttccctttataataatcattagggtttagtttttgaatggaattctcttccaataaaca

SEQ ID NO: 148636 - DNA, 549 bp, Arabidopsis thaliana landsberg
ttcaggcacacgctaaaacacacaaacaaaaaaacaactcttcaagaacatatacatttaatatttatataaacaaaaaagaatggatcttgatttaatacaagatctgcccatcttgaatttcccaccagccatcaagatccgagccaacaccaacagagatgatgacggcggcggctgcaccactcccacttcttccgaccacaagattcctcccaccacagccaccactcctccttctccaccgcagaaaccccgtccaccttccacaccgtcgtctctcggcatcagatcttgcaagagaaagcttatgacgtcattgtccaagtatgagatcatcgtcaacaaagatgagatcgagcggttcttctcctctgtttacaaccaaacgatggcgtcatcaccaccaccaccacgacggctatcacggtggccaagcggcgaagaagtttccgttcttgtcacgaagatgatcaataattggacgtttcattaaaggttcgataatttcgaataggtttttcgattcttatgtatttttatgtaatg

SEQ ID NO: 148637 - DNA, 399 bp, Arabidopsis thaliana landsberg
gtgacatctccagtccaatgggagacaacagtaaagactctcttatccaaaggacttaaaagcagctacgaattgggacctggaaaggtatttttctatcttcgtaaactcattatagatggaggtttcttcttcttcttctaagttgtgtgttttgtggcattcaaacaccaggtaattgcagggatattcaagagagtagataaaagcgcaagtttcgaaaacatcagtgcttgagagtattgctagctttttgttcacatgtatttgagttgagaatcattgataataagtaaatttacaacgtatgtctgtggaatctctctagtgcttcaatagtttggaattcaaagttttgtatggaatatttatgtgacactttacaggatatatgtattg

SEQ ID NO: 148638 - DNA, 436 bp, Arabidopsis thaliana landsberg
tctcgatgatcacttgtttcctcgaggtgagactacgaagatgccattgagctggcctcagagaaagagcatcattttggatgtggctaaagggttggcttatttgcattacggtgtgaaacccgctatttatcaccgggatattaaaggtacgaacatattgttagatgtcgatatgagagcgagagttgcggatttcggtttagctaaacagagtagagaaggagagtctcatctcactaccagagttgcgggaacacacggttacttggctccagagtatgccctctatggtcaactaaccgagaaaagcgatgtgtatagcttcggggttgttatattggagatcatgtgtggaaggaaagctcttgatctgtctacttctggatcaccaaacacttttctgatcacagattgggcttggtcattggtaaaa

SEQ ID NO: 148639 - DNA, 657 bp, Arabidopsis thaliana landsberg
aatttgtcttcattgatcctggtaaatcccaatttccatatccaattgcatgttcttagattcttcgataatctgatctggttggttactgagaaagagatcgatctacttggaatgtttatggatttaagtttttgtttaggtttaaacggacatttaggtgaaatgggtgaccttaaaggttcaaattcaccacttcatataacaactatggttccttctccaattttcctctggagatttaaggtggttttgtttctgttttgggctttatgttgctgcaaggtaaagatcttattctgttaagtctgtgtattgatgttaaaatgtgaatctttgatgatgttttgatgatgtgtatagattggatgggattcagttatgagaatgagtatcgacctgcgagatttatttttgtatgaagcgtttctttattacaatcctcttcttcttgtggttagtttactctcttttatccttttagagaaactcttttctcttctgattagtgattgctttgtggatttttgaatactttagacaatgatggtttggctgtggggagtgaacttatgggtgttctctcaaggaagtgttaattattccaaagtctttgatcttgatcataaccaccttactcatagagagatgtggaag

SEQ ID NO: 148640 - DNA, 526 bp, Arabidopsis thaliana landsberg
aggacggagaagcatttcaagggtagaagttaaggaaacaaaaaagaagaagttagagtatttcccaaggattgtgaaccaaaagatgagagaaagaaagataatggagattgttgatcaaaggctgattgaagttaatgaggtagatgaagaggaagtgatgaaattggtgtgtgtggctttgtggtgtatacaagagaagtctaagaaaaggcctgatatgactatggttattgagatgcttgaagggagagttccggtgaacgagccaccggattcagatgttgttgtggtcgatcttttggcggctgatgatgatgatgcaagtaccggtgttcgacgggtagtaaatatcccgaaattgcaaatccatagggagaggaattttcgtttatcatccatttgctctagtatcatatctcccatctctccacgctagttttttttgtgtgttcatattggttttgtttcaatcaaaaactgagtatgtttggtgtgttactattaatcaacctttgatacgtat

SEQ ID NO: 148641 - DNA, 499 bp, Arabidopsis thaliana landsberg
gtttgtttggaggcttaaatcgcgcttaaggtggtctcgtaagagtgatcataataatattcagtgtagttatgatctccggagctatcatctgaatttcgacgacggttggtctcgccgacggtgattttaattacatagacgttgctattattgtctatatatggagccttttcttttcatattttgtagtaaattaaattctcaatctgaaaagatgatttttttgtttcgtgttttcttgcatacaaaattgcaagatcttgatatttctattcataggctttaacttttgatccaaatacaaatacttgtcatagaaaacaacatttgtatgagcctaatttatcttagctttgtagtcttcattttttcttgcaacactattaactcgttgtgtttttcgttgatgatatatatgatgttgatgaattggtaaacccatagatgacataataaatataattgatgtggaagaaaaagatataggaccagttaa

SEQ ID NO: 148642 - DNA, 228 bp, Arabidopsis thaliana landsberg
ccataattgaaagttggggtattaaacgacactttttctcaaacttacaactaaaatagtaagatagaaggaaagcgatttaaaccaaaattaaccgaatacaaacagatttctttatttttgaatatcttttgatagagaactatcgaagatgtccgcgacaaactaaagaaaatgattcctcttatgaagatgagtaactgtcatacaatttcaaatttctaacct

SEQ ID NO: 148643 - DNA, 135 bp, Arabidopsis thaliana landsberg
aaacacatacatttgcactcagtctagagacaaagagagagagagatggggtcaaagacggagatgatggagagagacgcaatggctacggtggctccctatgcgccggtcacttaccatcgccgtgctcgtgtt

SEQ ID NO: 148644 - DNA, 462 bp, Arabidopsis thaliana landsberg
tctcacaacaggttcagttttgatcgttattgcgtttggattgtttgcattacgatatcactgggaaccaacttggggaatgaaaaattctgaaagattttctgcagcaaagccattgatggaacaagggtttgtttcttttctctgcatcctctttgaactgttctttaataatctaacctccgaaaccctaattcttaattttattttagtggcaaaagttcgagaaagccaggttttatgagtgaggacagaatcagtgagttgcctgaagttttgcttctgcagatactgtcttcacttcctacaaaacttgtcatatccacaagtgttttgtccaaacgatggctatctctttggaaaatggtacaaagactcgagtttgaatcttctcgaaacatatatgactttgcttgaaacgttaccaggtctttgctttcacataaagctccagttctagag

SEQ ID NO: 148645 - DNA, 346 bp, Arabidopsis thaliana landsberg
tgggaggaaaataaaatctgaaaataatatgcaaagaaatagaaatcgatccctgcccttaacgaacgaaatcacatagtacagtacaaccttgtaaaaagctagcagataaaaagagaacattcagtagaagccaaagagatgcagaagaacaaagctcaatgacttgaagcggctggagaagtaagctctctagaagacaacagtgtcgagcatagtgcctagtgtctgaacaatgttggatgacatgaggttcgagacatgttcttccagatgcttctttgcatcttgtcttcccacattcacaattgccagcttctctggtgacaactcgttctcctcttta

SEQ ID NO: 148646 - DNA, 438 bp, Arabidopsis thaliana landsberg
ggatggatttcgacgtgagaatcggcggcggacgtaacgacgaaggagaaggagttagcggatgcgtcgaaacggatgttggaacggagagtgggatggtaaatctggagtttgtcgagggtattttggagattttggagttttggtgttcgggaaagtaagagagctatgacggcgatacctgtgccgccgtcaatcgctctgcaccagctgtactcggttcctccgacgggtcgggtcatggatttgggtacccgatttggctcactcattatccttgagaaagaagagagattgttttcacttttttgggattttaagattttacttgtatcatatattgtcaggtgggtaaatatggggaagatacagtgacgtaccttttactcggttaagtgtaatttttccggtttatcaaccaaatagaaatgattttgc

SEQ ID NO: 148647 - DNA, 177 bp, Arabidopsis thaliana landsberg
agtatgaaaaggctatcgatttgtttagaggatgaaagagttgggtccttcacctactttggtgacttccaatgtgattctcgatgttttcgggaaaatgggtcgatcttggcggtaaattctaggggttttagatgaaatgagaagcaaaggattgaagtttgatgagtttacttg

SEQ ID NO: 148648 - DNA, 175 bp, Arabidopsis thaliana landsberg
ccaaattaacaccatgaacgagagttaacgactcccaaggcccaacacatgacaataattaaatgatccaattgctcctagatgacaccatattcaatgatctaagtgaagtgaagtaaatacgaccaaaaaaagatagggaaaaagattacaggtagtagtagtatagtacacc

SEQ ID NO: 148649 - DNA, 308 bp, Arabidopsis thaliana landsberg
ctatatcttgaggattatggtcacattgacttcgtacttggctcaagtgctaaagaagatgtgtataagcacatgattcaatttttcagagcaaaggttaagtctagtagttggtaaaatactaaatactctgttctgctttgcacatatttatcttccacagatatatgtacacatctgattgtaaatattttccttattgaactaaattttctgcttgaaagagctacttagcaccaatctagacatgaacagatagaacaatccagtaactcaagtgaaatagattggtcgtcgatgaggttaga

SEQ ID NO: 148650 - DNA, 324 bp, Arabidopsis thaliana landsberg
tgcatttaacggttgtttggacggtggattctctgtcgacggggccgacgatgaagcaagttgtaagacggttgaagcagctacaacctccgtcgtgttagcacctccctccgcaggatttgattattattctttctttaaaaaaagttctctcagttgtaaacttgtatgtgtacgtagtagttgttagaagaagaaagagaggttgaatttcctatgggttctctcgagggtaaaaaggacatttgaaaggggaagccataggaaggttgatctctctcagtaagcagaaaaccataaaatgagaaagaattgtttgtagct

SEQ ID NO: 148651 - DNA, 197 bp, Arabidopsis thaliana landsberg
ttgattttcacaatttttgaacaactgaagatcatgagagtaacaaagctctaaagtacaaacaaaaaacccagagatggagcaaagtgaatgcaatacagatgaagaagccgtaaagcgatgagctagacgacgacgattattaatcaatatagttgtaaaatcagctaaaaatgaagagaagttagaaaacaact

SEQ ID NO: 148652 - DNA, 524 bp, Arabidopsis thaliana landsberg
tctagtgatagagaaagatatcgtgatcgagaccgaaacatttatggttttttgacacagagaccgtggtagagatgatagagggccttatgacaggagatcgaggagtgggagagaggaccgagatcgaagcaggtcacgatctcctcatggaaggtctggtcacagaagggtgtcgagaagccccattcgccaatactagtttgagaccctcgtggaaggtctggtcacgaaagggtgttgagaagcaccatttgccagtactagtttgagataaggtgttgtcactatgtcttggggccaggaactttgcaaattaatgaggtagacaatgtgataccccctttggtttcataagcatgtgttgtcttttggaacttccttgttaaaatttatggataaaatttgtctttctaccggatcacagctattctaagagtttgagaccttaccgattctccttcatcggttatttgttaagaggtcaaaagcgttgaggtaggtattacccgtaaaacttttac

SEQ ID NO: 148653 - DNA, 985 bp, Arabidopsis thaliana landsberg
  unsure (1)..(985): unsure at all n locations
atttaaagcccattcgatatcctaaaacactgtatcatcaaaaaacacctcaaagaattattcattcaggcatcttctcaaatttttgtttgtgaaaaaaaccgacatcaaaagatctctcatttattcgtttcgtttctgctgttttgagtgtcgggttcgtttctctgttatcttttttttccggcgttcgatttgaaaaaatccggggaacaggtgatcggaatcacggctatacacgggatatcacggggtgttagctcacatgtccatattgtccgacagaagggttgtttaatcgaaactaatcctttgccgcacggaggacgtggagctctgccgtctgaaggcggcagcccttccgatctcctctttctcgccggtggcggttccagctttaacttcttttcctttaggttttaggagttagggtttgttagtgttttttccttcttctttttttggtgctcttgaatcgcttttttcttgggggaagttttttcttttgctcttcgaaatttgtcttttttgagaatgttgaaaatcaaaagagttccgaccgttgtttcgaactaccagaaggacgatggagcggaggatcccgtcggctgtggacggaattgcctcggcgcttgttgccttaacggtacgttttggaaacctgaatcgtcttttttaatcatgtttaaattttatcactttttttttattcaccttatgatgtgtttgttcaggggctaggcttccattgtatgcatgtaagaatctggtaaaatccggagagaagcnnnnnnnnnnnnnnnnnnnnnnnnnnnnnnnnnnnnnnnnnnncgagtcccttgttctcggagaggtaaatcatagaccactgattttgatattctgataatggtttctgtagcttggcagagtctaatcagtattcttatgtttagtgggaggataggtccaaagaggactttttcgctatgatgcactgcctgcg

SEQ ID NO: 148654 - DNA, 299 bp, Arabidopsis thaliana landsberg
aaaagcaattttaaattaccttattcaattttgacaagactttatggtcaatgtgtaaactgttatacaaaatcatacaacacaggaggagcctgaagattttcttaaggacaaacaacaaaatggaaatggaatatagaaacaccaaagaataaatatcaaaccctatttcaaaacattttgatgcttataaaaaataatctaacactctcacaaaccccaattcttcttcaagttcatggctcgtacctttcctcgttcctatttaacccatgtttgtattcgatttaatacctcct

SEQ ID NO: 148655 - DNA, 354 bp, Arabidopsis thaliana landsberg
tttctgatctcatataacaaaaattgaaggaatcagatgagttaaggcattacaatattcagtttaaacgttgtatcaaaaaatctgaaacagcctttgaaggtcataacaatcagacattgtcaagttgtcgaaactaacagagaacaagatgtggaaccaaaatcagcatcaccttcctttatatttacatggctaatatatgttcgagaagtacatgttaggaccatgaagctatgagtcatgttgagtcacctattcccttatgaaccagcatatcatatactttgtctactttactcggctttactttgaaaaaactataagcattcagactttttcttttatctgccc

SEQ ID NO: 148656 - DNA, 342 bp, Arabidopsis thaliana landsberg
gaaatatcaggcaaatatttctttggcgggaggaccattgaatcttcagcactttccagtgacccgaaaatggctaaggaactttgggacacatcatgtctcatatttaacgaattgcagcaaactcacacttgaagatcaaaaagcttgtagttgttgcttgctaatgacataatcctaggatccaaactgtatcaccttctggtttcttgtataaaatcagtttttgtgtttagtattcccttgttagcatctacgtagattcttcttttataattctttttgttcaaatttcttattgttaccaaaggaaatttttgcttagggatttgttgtcaactt

SEQ ID NO: 148657 - DNA, 490 bp, Arabidopsis thaliana landsberg
gcacgagattgtatcaatctactctgttcttgcacctccaaatctgactcctgctcagtccaaccgtttttgcttctcgctcgctcttcttcaggttcacatggagatttcgtcttcttatttaggatgttttatttcatgttcatatattttgctgaatccatcagatttctaatgattttctgtcttgttgttttactctgcagtgcgtagcatctcattctgacacgagaatgttatttctcaagggtaatgttctttttcttttcatcaggctaagcttaatgttatatagtatgtaccattggggatgtctattatatgctcttgtctatttgatacgagttagtggggttatctgtttattgtatatttattgcatggtttcagtttatttcgtgaagcaatacaactgatgaatttgttgttatgccttttcttcgttcttgtgcacagctcatatcccgttgtacctttatcccttccttaa

SEQ ID NO: 148658 - DNA, 232 bp, Arabidopsis thaliana landsberg
aagagagaaagattgactcccaaacgcagaggctataaagagctgattggatccgaaatgagtaattcgtagggaattgaagagagaaattgaaagaatttgacagaaaggaaagaacttttctaagtattggtagagattgatcttgataaaaagcgcaagtgcagtgttttgagctggctgggcacagcgtgcgatgaagagagagagaagagaagatcgaagacgggaa

SEQ ID NO: 148659 - DNA, 396 bp, Arabidopsis thaliana landsberg
tgatcatcttgagatggtgatgaaactcttaagatcctcttctgcttctctttttatttgccgtgtcataatgaaaattgcatattcagatgggcctgtgtgttgagtaagtggacctgtgtccagagagttgaatgagatgggcttcattttaggcccacatgtttatcgatcaggttcattctcttcattatatgaaagtgtcctatatcgcaacattctcttcattaatcattatattagtttatcgccacaaagttcactattcaaagattcgatttttctctcgcaaacagaaatttatattgacttttaagaaaaaatacaaagtatatctatcacacaactcacaaaagagataggtacaaacataatgacaaatcacaataagcacac

SEQ ID NO: 148660 - DNA, 453 bp, Arabidopsis thaliana landsberg; identical to SEQ ID NO: 59866

SEQ ID NO: 148661 - DNA, 504 bp, Arabidopsis thaliana landsberg
aggtgttcaacctcaattgatggagaccaagaccgagacaacttcaaattccgaatctcactctgaggacgaggaagtgtaaaaatgacactgcttgtttgggtgagttatttggcaaaactaaagttatgaccttgatggattgagcaaatcacatttctatctatatccatgaatcctcaaggtcttatgattttgttgggtttctgataaaagaaagattgaagcttgcaggctcttcaggatctcttgtcaagaccaagagctgccgaattcggacaaccaagagcaagtgaaaagacgtgaaatagaacgaccatatttctatacctgataccaaaatttggaatatcgaataagactagtgttgtaggcttgtgtagcatgtcccgctgtttctcttttaaacagttgttgtatatgtatatctctgtttccttgctctttcacttatttaacaaagagttcatgttaatgaaattggaaatgaggtactcttagata

SEQ ID NO: 148662 - DNA, 78 bp, Arabidopsis thaliana landsberg
ggacgtccatagggtttatgctagagccatggtcagcaaaaacctgcacaagtatagtccaaatcgattctttgacga

SEQ ID NO: 148663 - DNA, 650 bp, Arabidopsis thaliana landsberg
ataaaatattatatttttttctgaatatgatgtaattcaaattttttaaaacggacatatattattcaacctatgaagaaataatatgtatacaatgtcccacatcgcttagaaaaattggacaatggttcagacccatattataaaaggaccaaaatgattctgattacgaatgagctggaagcttgatttatcaggcgtccaaaattaaaatagttatccgattttactcggattttttattttcaagaattgaaactttaaaatgtttcaagaaattataaatattataactttatcaaaagttaaatattataattttaaatttttttataaagtttatctttaaaaaatgctttaaatatttataattttaaaacttataaagttttaaaaattataaattgaattttacaagaaatttaacattataaatatataaaaaatatattaatacgaagcgatatattacagaaaaaatcttaaatataacaatcaaaattcaatgatgaattttgggtcgatattgtatttttttaagtttcaaattttataatattgaaatttataagaaaatgacaaaaattatgttaaatttcacgggaatgggttatatggtaggacgggtttgggtggataataattacgat

SEQ ID NO: 148664 - DNA, 107 bp, Arabidopsis thaliana landsberg
aaagaattgttcagggtacaagttaaaagagatgactggtagtggcatatttactgataagggaaaagttggatctgaatccgatgctactactgatccaaagactg

SEQ ID NO: 148665 - DNA, 235 bp, Arabidopsis thaliana landsberg
agaggattatgacaaggaggaggagatgcttagacaatttgacatgaacatcacttatggtccgtgcctgggtatgacgagacttgatcgatgggagcgtgcagtgcgtcttgggtgaatcctcccaatgaaatcgagaagcttttgaagaccgggaaagtccagcaagattgtctgtggcaaggtcgtgtctagataggtgttctttaatcctttatctatgcccttgtatgat

SEQ ID NO: 148666 - DNA, 339 bp, Arabidopsis thaliana landsberg
caaatgaagttcagagcttgttggtaatcttcctttggctctcaatatcatgggttcgtctttgaaagggagggacaaggaagagtggatagagatgatgcctagtctccgaaatagtttggtggatggagaaattctgaaaacattaagagtcagctaatgatcgattacatgggaattatcaagaaatattcctttatattgcgtgtttactaaattgctgtggagtcgaatacattataagcatgcttggagataatgctatcattgggttgaaaatactggctgagaagtccctcatacatatatcaccactggacaaaactgtagagatgcaca

SEQ ID NO: 148667 - DNA, 662 bp, Arabidopsis thaliana landsberg
attttgaaatctcaacaagaaccaaaccaaacaacaaaaaaacattcttaataattctctttctgttatgtcgatgacggcggattctcaatctgattatgcttttcttgagtccatacgacgacacttactaggagaatcggagccgatactcagtgagtcgacagcgagttcggttactcaatcttgtgtaaccggtcagagcgttaaaccggtgtacggacgaaaccctagctttagcaaactgtatccttgcttcaccgagagctggggagatttgccgttgaaagaaaacgattctgaggatatgttagtttacggtatcctcaacgacgcctttcacggcggttgggagccgtcttcttcgtcttccgacgaagatcgtagctctttcccgagtgttaagatcgagactccggagagtttcgcggcggtggattctgttccggtcaagaaggagaagacgagtcctgtttcggcggcggtgacggcggcgaagggaaagcattatagaggagtgagacaaacgccgtgggggaaatttgcggcggagattagagacccggcgaacaacggagctagggtttggttaggaacgtttgacactgctgacgacgcggcggtggcttacgacagagctgctttcaggatgcgtggtttct

SEQ ID NO: 148668 - DNA, 195 bp, Arabidopsis thaliana landsberg
gatctctctacttcaataaatctccaccttgctttaagaacaaagtcttaacaaatggcaggaatcaaagttttcggtcacccagcttccacagccactagaagagttctcatcgctcttcaaaaaaagaatctcgactttgaattcgttcatatcgagctcaaagatggtgaacacaagaaagagcctttcatc

SEQ ID NO: 148669 - DNA, 209 bp, Arabidopsis thaliana landsberg
ctctccttcctcgaacagtcgccgaaacattttcgccggcgttacaccggagaattcatccttctttgtcttattactctactacccaatttcagtttaaactcactatcttcccaatttgatgattcagtgattcaaattcgaaacttcaagcaatgttatcgacattgcaaccgccgcgttctctatcactcctccctctacgccgg

SEQ ID NO: 148670 - DNA, 190 bp, Arabidopsis thaliana landsberg
tcatgtgtttgttccacttgtgtgttgaagtcatttttcttcttctgtcttattgaggcagggactaatggggggtttatctttcagttgtttcgtttaaattccacatttgtgcaatgaactggttggtgtttctttaagatataatcattttgccactgtagtgagatcggaggcatgcattacagag

SEQ ID NO: 148671 - DNA, 106 bp, Arabidopsis thaliana landsberg
agtgattgacaaatgacacatacctctttttctacaatcaaagtttataactaagaagaacaaatgcaatagtaataataaagatttgaggacatactgtgacaaa

SEQ ID NO: 148672 - DNA, 90 bp, Arabidopsis thaliana landsberg
agtaggtcttatagccagtcacggactcgcagaaacctgacaagagcagcaactatgttgaatttgttcactcttcgccgtctgccttgg

SEQ ID NO: 148673 - DNA, 149 bp, Arabidopsis thaliana landsberg
ctgtccttgttcttcaggtatattctcttgtccagagcttgaacctattttccgatccgccattgatgcgtattgtagatctaggaaaatggattatgctttgttagcgtttgatactatgaagagattgatcgatggtaaaccaaatg

SEQ ID NO: 148674 - DNA, 363 bp, Arabidopsis thaliana landsberg
atgttacactacaagctatattgtattggtaatttttctaccatttagtaccattacatgtgataagcaccatacttcatcaactaacaacgaaattttcaatcatgaaggaaccaaaaattatcttccaagtatagagaacacgatttaaaattgtctaagggatccaaagacatggcaacaaaagagaccgagtatcttacgactcttgaacgatttcctcagtgacatcgataagatcctcaaactcaacttctttggcttcatattcatcttcttccacatcacttacttcaccatcccgaaggttttgcctcacgagtttctcctcttcatgcagagacttccactgcatcacccatt

SEQ ID NO: 148675 - DNA, 213 bp, Arabidopsis thaliana landsberg
atacaactttttgtctctttctctactaataataataatccgaactttgtttggtcttctacttcaattcataatctttgacggcgatgactatggagcaagaaattgaagtcttggaccagtttccggttgggatgagagttcttgctgttgacgatgaccagacttgtcttcgtattctccagactttgcttcagcgctgccaatatcacg

SEQ ID NO: 148676 - DNA, 669 bp, Arabidopsis thaliana landsberg
tgctttgatacgatgttgctgagataatagaccggagaaagacgacgaagagatcagcgattttgtttactcctccaatggattcagctcgagaggtcagcgatggtagactcaccgtcgaaggtttctctgtagcttctcgagcttttgccgataagtggaagatacataaccaatcgttccctccatggtcttgggttcctctgatcaatcgaactctacttgtttcaaagaaggttgatgaacaccaattctccataattcaaccttctttaagatactgttttttaaattccttggtcttgttgttttattagcaggaggaaggttacttgtcgctggagaagatcataattctcagttcacttgaggtagattcacagctcttaacagtgatgttcttcttttcttgtttctcacaattaagtttgtgtgtaggaggaaattccagaggatgaatctctaaatgtagctactgattgcttggaaaaagaagaaacagttgatcacacgattttggtacataaccttttgagaaattctcattttaactatctatgaagcaggtatctagaatccatgagattgttttccttgatgcccttttatttgtgttaggtccctgccatggaaaatgaagcactcttctatgatatgcagatagtttgc

SEQ ID NO: 148677 - DNA, 232 bp, Arabidopsis thaliana landsberg
taagactggatcagatggggagattcgtcgggtttgttccgccatcaactaatattttttaaaacacaaatgtgagctttgtttttaatttatgaattcgttaattaataatcacttgttttaaataaaagcttgctacagcattttgtggtcgatggttacgttttgattttcaagtgtaagattgtacttgtaaacaaaaaatgtattatataaaagtgttatttgtttc

SEQ ID NO: 148678 - DNA, 471 bp, Arabidopsis thaliana landsberg
catccgcgttcagtgtccgcagaacggcgagcgacttgtataggttgtcgagagagtccacgaagagctctcggcaatccgacaacgcgattcgctcgcgttcgccaactgctgaacgctgcgttttgagcaagagcctcagcacccgtttggtgtcggttgtggtaaccgcgacgctagctcgagcccacttgctggtgttgtttcgagcgacgattgcaaacggccatagcgttcggacgcagaggcggttgtatcgcgttacgttgcacgcgtttctaacgtatgtgctgtactgcgtcacgatgtcgtttgtgttgatgttgctaccggtggaggctaacgacggatttgggtttagtgccacaagaagagagagaagcagaagaagagtaaacgtgataggagaagaagaagacgaagtcatgttctttattggaggaatccaaactttttaagaatttgggacga

SEQ ID NO: 148679 - DNA, 144 bp, Arabidopsis thaliana landsberg
aaatatcatccatataacttctcacttactttttaccatacgtataattgaatttacttttcgtgtttgtgtttgtctagcttcatgtatgcatctcaatattaacaacagtggttatcatattattatttcttttgtctaaaa

SEQ ID NO: 148680 - DNA, 420 bp, Arabidopsis thaliana landsberg
tattaaagtgggggaaaaacatgaactaaaaaccagtaataaaagaaaagatcattctgcagcattcatcagcatatttagtacatgctgtacttgtcgttcgtcgcttcgggtcgaatgctcttgtagatggacatggcaattggaagaatggctgtgagagcgatttgcaactgatccgagctgctggttctgactgtgatctgtccgctcatcttgttgttaagtcctgcacgaagcgcaatctttgagttccttccaacagagacttgagattggagattggctccaagggctaaatcgcctctccactttaccagagacagcccaaaagaagattggtcctgtccaattgggaaatcagcttccctaagcctgacctcgaggttcgcaccataggccgaatctccctgtgatcgc

SEQ ID NO: 148681 - DNA, 430 bp, Arabidopsis thaliana landsberg
cgatcttgtgctgaagatatcgaaaagatgtcatctttgggtaggattttgtctgtttcctacccaccggatccgtacacttggcggttttcacagtataagctgtcttcttcactagggcgaaatcggagactcagatggcgattcacggcgttggatcctgaatcttcctcactcgactctgaatcctccgccgataaattcgcttccgggtattctgaatttgctttaaactacagagcttgattgtttgcgtattcattgataatgaaaggaagaatcaattttttttgttggattgctcaaggttttgtataatagaagggcctgaaacagtacaggactttgccaaaaatgcaattacaagagattcaagataacattcgaagccgacgaaacaagatcttcttgcacatggaagaggtactta

SEQ ID NO: 148682 - DNA, 492 bp, Arabidopsis thaliana landsberg
tgttccagcgttgaacaaagtgcctagccacatcacggcaaggtggtccccataaagcacaatgcacatcatgccaaggcatccgtggatgctttttacgctctaattcatctttcagagcatcctcccaagtattgggttcagactctctggaaaattttaagtacgttcaaaccaaaaaatcagagggttgaattcggaaaggtgaaatgactaatggacatcctggtttgtatttaatacaaaatttgatttcatcacagctaaaaataactagcaagtgacacataagttcttagtttttattacatctaaaaatcaactctttattcgcataaagaaggaaattcttacctggggttgtaatagtcctttccaggccatgtcacagaagggttatctccaactttatgttcaaacgtgtcatatcggccaaaacacaagtctagccctccgataaagcaaacctgattatcgacgatgacgagtttt

SEQ ID NO: 148683 - DNA, 98 bp, Arabidopsis thaliana landsberg
ccgaaatcgtctttgtcgtcgttacctccacctccagaattccgaaatttctgggaatatcgattttgatttctatttcctcacgctctaatttactc

SEQ ID NO: 148684 - DNA, 446 bp, Arabidopsis thaliana landsberg
ctaaaggatagagatgagagaagagagaagtttatccgataacagtttccgcaatcattatttaacaattgtttttacataatatgtttaaatttatatcatatcattttattatttaatttataataaatcttattattgttactgatatttaatttaataggtcttagtgacatatactgcaactttttcaatttaaagcacaagagtcacttgttttaaacataactcttatttctaattttctatagcaaatttattataggcaatgttcgtcacgttaacgctgcgccagggatctgcggttgaaatttaaacgtcaacaatagcaaaagaaacagaaaaaaaataataaggatgtcgttgcggccacttttacaggggataccggtgtcgtcggcatcgctaagaaaaagcggcgaccatttttatagactctgcggctt

SEQ ID NO: 148685 - DNA, 163 bp, Arabidopsis thaliana landsberg
aagaatggcactcaaagcgattctctttttgggtttatttctcgtcgtgatagtttttccgatcaccgtctacggtggagctgtgtgtccggcgagttccacgtttggtcgtggaagctttcctgatggtttcttgttcggtgctacaacttctgctttccag

SEQ ID NO: 148686 - DNA, 324 bp, Arabidopsis thaliana landsberg; identical to SEQ ID NO: 13553

SEQ ID NO: 148687 - DNA, 294 bp, Arabidopsis thaliana landsberg
tttctttaacatcattatacaaagttacaacaacttgaaaaaaataattatataagcccattaaatcttgtatcataagcccagcccaaagttataaacttttcaaaatgcaaggagctaaaaaacaagttggttttgttggtttcaaataaaaccaaaccgtttttttaagattacgaatcgaatggtttatttttgctaaatcggttaggttctctctccagacctattagtaaacctcttgacaaagattaggcggtcgtctctctgaaattttctgaaacctcttaaacc

SEQ ID NO: 148688 - DNA, 386 bp, Arabidopsis thaliana landsberg
tgaattcatgtaacaatagtcaatagccaatggagatctttgtacatatttttcatggtcagtctcagtccaaggaatttaaattgtacaaagccgtaaaatcaaaaggaaaaaagaattaagagaaacaaaaaacaagttacgaatacaagaatgcactgtaaattttaaattattttcaacgtatatatgtatgtgtatatcaaagataatgcttagattatataccgtttgttttattttaggatcgttgatataaaatcattttgtttttaagggataaaaggttgagagtcatgaaccaagtggttctgtatcccggtctgattgaacgagataataaccggaatattgtgataatactcaccggctccgacggttccccc

SEQ ID NO: 148689 - DNA, 110 bp, Arabidopsis thaliana landsberg
gactccattataactggcttctgcgactgttaattttgattcccatagcacaatttggctgtacgagggaaatcgagcaagcttgccaagtagtatgaatttgagagcca

SEQ ID NO: 148690 - DNA, 352 bp, Arabidopsis thaliana landsberg
gcagcgatacgttgagagactctttcactcgatagcaataaactccgccgtgacgtcaaggggagatggtcttcctcaaggaatgtaaaatcagactccgatgaagagatgttggtaggttcatggcacatcttatacatttgaattagagtaatacagaggaaaagtacatggagactgaagaaaattgctataatcgagatttctccaaatttgctaattgcgtatagagctacaaaagcgaattagataataagagagaagggtttgttaagaaggtaaggagaatgaagaaaggaatctcctttggacatgaacacaaggagaagaatctcagattgtcgaaaccctg

SEQ ID NO: 148691 - DNA, 92 bp, Arabidopsis thaliana landsberg
atctcttcttactaaaaatattcaatggatccatcaaaatatccttttgatatcgaaccttaccaatagcagtctaaaattgaagagaagta

SEQ ID NO: 148692 - DNA, 115 bp, Arabidopsis thaliana landsberg
gaaagaaaacgtacttccattaacgctgcttggactctaggattctggaatgccatggcaacatcagggttctccatgatcttagatatgacttcttctggagttagtcctattt

SEQ ID NO: 148693 - DNA, 527 bp, Arabidopsis thaliana landsberg
attcatttctattgccactcatagcaattgagttttctcaccttttttgctctttatattgtctttgagttcattcaggtcttgaagaagagcactcttttaagctgtgtgaaacttgcgccgttcctgtgaagaactacttttggcattgcagatttcagagagctgtgatttgtgctatcttaaaaacggacaagttctatgttgtggcggatgagatgagggatgctatctgggttgatgaattttctgaatgcctgtctctggccacggtcagatcagcaggctcgttctgcctcagattctggtggccgccaagagggtttgctctggttcagagactccggccagcacgtctttggtgatttctccatggccgtcgttcaagccaacagcttgctagaggaccagagccagctcgagtctggctctcttagctcccacgactctggtccctttggcacctttgttggcgtctacgacggccacggtgggcctgagacatctcgcttcatcaatgatcatat

SEQ ID NO: 148694 - DNA, 421 bp, Arabidopsis thaliana landsberg
taccaaactctctctctctctctttggttgttatgcttctaaaacatgtggttatatgatagtaagaaaccttataatacaattgaaatcgcctaagaagcttagagagataagtaacatatgttatctgaaacacgtgacatgtgacatctatttttctgtaagtggaatatatcagagagctcctctagggaggatgttatcgcactcaagagaaagttgtcgccggaagttttgcatgaaagcttcggcgcatttgtcgacatcatgaatcttaggcttgctctctagatgacgactaccatttgtaagggttgtcaccgattttctcttctctgttatgactttggagttggtactgtgcacagaaagtggttgtaaggaactcattttcctggctttttatgtgtgttttggatag

SEQ ID NO: 148695 - DNA, 660 bp, Arabidopsis thaliana landsberg
ccaaagagaaaacgtatgagttgcttaaaccataaacctcaagctcaaaattttatcaaccttataaagtttcgttttctcgagattttgaatcttttcagctaaaaaagatcacagctttttgcgttttctggatgagtttgagataagagaagatgaagattcagtgtaacgtttgtgaggcggcggaagcgacggttctatgttgcgccgacgaggctgctctttgttgggcttgcgatgagaaaattcacgccgctaataaactcgccggaaaacatcagagagtccctctctctgcctctgcctcttccatacccaaatgtgacatttgtcaggtctcatcatctctttgactttttctctcgatttacaaaatctttgatctgatttcagattacccttgactgaaattctcaatatttagagaaaagtttgaatctttttaggattagagaggccataaaccagtttttttagttctgattctgttagtgtgttttttctcaaatttgggatttttgtgtgtacaggaagcatctggattcttcttttgtctgcaagatagagctttgctatgtaggaaatgtgatgttgcaatccacactgtgaatcctcatgtttcagctcaccagagatttcttctcactggaatcaaag

SEQ ID NO: 148696 - DNA, 129 bp, Arabidopsis thaliana landsberg
cggaagaacgccggcggcgatggcgacggtggcgccggtggcgcgtcagttaatgtcgaagatgaacctgattcgtttggtggtcgaataggatctccgaggaggatattcttgttctgcttggcgttt

SEQ ID NO: 148697 - DNA, 605 bp, Arabidopsis thaliana landsberg
  unsure (1)..(605): unsure at all n locations
gggcattccgccatttctcaagtatgggcacgacaggctacctttccctgncagagttttgacatagtttcattgtgctcgctgtagagtgccatggcacattgaaggttagcaacatagccacaatagatatagagtctttgaatggaaactcctcctggatcttaagtcttaacagtctctttcgagtgatccgtcaaactttttggtatctgtttctgatgtttgtgtgcacaatacatgggcaggtggtaaacttctcctggagcttaaccgtgtattgagacccggtgggttctttgtgtggtctgctactcctgtttatcagaagaagaccgaagatgttgaaatttggaaaggttgtgaaaaaacattatccttctttatctaattgcattggatcaggttttctcacacgtcatgttggcgacttttgcagctatgagtgaactcattaagaagatgtgttgggaactcgtatccattaacaaggacactatcaatggagtaggtgttgctacttacagaaagccaaaatcaaatgagtgctacaaaaacagatcagaaccggtgcctccaatttgtgcagactctgatgatccaaa

SEQ ID NO: 148698 - DNA, 349 bp, Arabidopsis thaliana landsberg
gatcgatcaccagattcgtgtttgagtacaagggttttctcaagctctcgtctttctgaatcaaactggtctaactcttacatgtatccagaggatgatgataagctcctcggtaatggtaaaagagctttggaggttgttggtgaggttagacagaccaaatcacttaaattaatgggtttttcgattatctatgatagcgattcttctgactattcattgagtggtggggaggagcaagctgatgctgctattggtgatggctcatcatcaaggcaggagcaagaacagcaatctgattttaatgacaatggtggtgattcttcggattctcactctcttaacaatg

SEQ ID NO: 148699 - DNA, 335 bp, Arabidopsis thaliana landsberg
acagaaacagacaaacaataatgtagcttaaagacgatgatgaaaagtagttcagaacatagctcagcacgatggcagagtaaaactattacagatggtttatgaagtccaagaagacagtggtggagtttcagaattcttgtaagtaactatataggtggctgacctttcccctttcacagaatcgggatgtcccatggcgtcaagctcggccatctcttcgatactgagtttcacagataaagctcctatgttctgattaaggtttttgatcttagaggttcctgggattgggcagacatcatttccttggtgatgaacccatgccaaagcta

SEQ ID NO: 148700 - DNA, 211 bp, Arabidopsis thaliana landsberg
ttttggtttgtagggggatcttgggacagagtacttagtgaggccagttggtagagctgaagatgaggaggatgcaagtgattttgagccggaagagaatggtgtggaagaggatatagacgaaggagaagacgatgagaatgataactcgggtggtgctgggaagtcagaggctccgccgaagaggaagagagctcctgaagaagatgaa

SEQ ID NO: 148701 - DNA, 1007 bp, Arabidopsis thaliana landsberg
ctctaattacttaatctctgaatgcttaagataataactataatctaagagtaattaattaaacgataagtggttaaatttgttgaggttaaaagtgaagcttcaatggcaagaggtcgaaagctgacgatgagccagagcgagaggtacctaggaagcagctatagttacggtgacagtaacggaaactccgccaccgacgaatcagagctcacggaggaggacatctggtcacacgccgtcgatcacagcccggagatgctggaatctcatggagcgtggaacacacgcgatgctgtggtgaggaatgggcgcgtgggtggtggtttgtcgctggcgtttgaggacgcgtcatcttcgccgaggatcgtgcaccagatacgtggcggagcagaaggagatgtaggtggtggaggaggaggaagagttgagaggcagttggcgtcgtcggctccggtgaacgtgccggattggagtaagatataccgagtcaactcggttgagtcgatacacgagtctgatgaagaggaggaggaagattccgggatgatgatgccgccgcatgagtacttggcgaagagccaacagcgacggagcagaaaatctggcggcggtggctcggtgtttgaaggagttggaagaactcttaaaggacgagaattaaggcgcgttcgagacgcgatttggagccaaacagggttctacggctaagttagtaatataaaatttgaaagaaaaaaaaaacaatataaaacttcaacataaaaactttggaaaatattttgcttattttgtcagtttagagttaattttgcaactttcttgaatcccaagcttgagatgtataagatttatatattgcttcccatgcaaacgctttttcttttcttatttttagatccataaactaattgtgggaaaattttcaagaacctgctatgcgtataattttctctctttttgctgttgtattgatttaattaaaaaaaaatcaatattttaatgtc

SEQ ID NO: 148702 - DNA, 284 bp, Arabidopsis thaliana landsberg
atacaaaaactaaaaaaaaaaattgatggatttttttatatggctacaaaagaagattgttggatacgtaatcgaaaatgacgttatccttcaagacttgttcttcttcttctcctcgattaacaccaaaatccatcgccggagcaggagacgatgcttctcaattcttccatcacaagacaagttacagagcacacacaaccacactcttcttcatcctcgtttctctttctctctttggtttcatctctctttattattcccccaacacgatttatcgagct

SEQ ID NO: 148703 - DNA, 471 bp, Arabidopsis thaliana landsberg
tcgtcgtctcttcttcaattgcagctagagagccatggcctcctccttcaacgaagaaaccgccaagaagttgcttacccaggtctgtaatttatctatgcttccttcactctcatctctaatttccccgatttcattttcgtagcttcttttgctgatggttgaaggttgagttctacttcagtgacagtaatctacccacagacggatttctcaacagggaagtcaccaagagcaaagatggccgtatcctgtatacatatatattgttgtagcatacagatatagttgaaaagttattccttagatgcccgaaactagtggttagtttgcctctggtttgttccttctctcgtatgaggaacctccttggcctcggtaacatcaatagagaagacatccctccgaggattgtggaggaagttgctaatctcttgcgcacctctgattttcttaaagtttccaataatg

SEQ ID NO: 148704 - DNA, 312 bp, Arabidopsis thaliana landsberg
gcatcacttggaacattgtcgaccactggttccagcacagattctttcggttcaatcttgaacacaaacacgggaactggtgttagaggtacccccgcatcttctaaagcttcaactcggagtaatgccactagaagtgctggtcagagctctagctcagaccctcacgggaaacgacatatgagttattgaagtacataaaatctggtcataggtgattgtaaatagcgagctgcacatataatatttgtttcataatttatttaattttgcttttgaaaagtaaattaatttatttttttgactgcagta

SEQ ID NO: 148705 - DNA, 450 bp, Arabidopsis thaliana landsberg
aataaaaatcataagcctcataagacaagtttgctttgaaattggttcagtatacaaatagaagataacaagtatacaatgaaaaatgagcgtttgaaggtaaatactgagtacaaatattcctccaaattcacaattgagggtgatgtttgcctagaatcataacaagccaacttttctctgaatcaccattgagcatcctgtgggaacaactcagaaatgaagcctagaaaaagttacaatacaattatatcaaattcaagaatacagactgacctagatcataatgaaatagaagcccctccaattatctaatgacaaacagaagagtcatggaaacctgttatgagatgccccagcaggaaatgaattggagcttcagctactgcgtctgcatatatataagcaagtagccaagttctgcattcagccattcactggtacagagaa

SEQ ID NO: 148706 - DNA, 376 bp, Arabidopsis thaliana landsberg
tcttctttctctcgaactttctctctctaaatattttgtttccttttctctctctctctctctctatttactttcgttctctctattttttttgtttggtttagcttatttgtgaagtgttaaatcttattcagtttctggggaaattaggtggggaggtgaaaaagggggaaatataattgaaattgggttctctctgctgtgcaataataatttctgagaggattgtgaagaagcgctcttatgtaagaagatatctcattattagttatttacatgagaatctgacattcttaacaactgtctgtggggttagttttgtccaaagaactatacagagatgtctcagaccaactgggaagctgataaaatgtga

SEQ ID NO: 148707 - DNA, 235 bp, Arabidopsis thaliana landsberg
caaaacagtgtcgtattaattgattggtgtggcgaaacaaatccgtcgttttgctccgttgatcggcaggtgatcaccagaagcctcgtcaccgtctctttctctcccccctttttcatgacgccgccgagaccaccgtctgggcgagtaaggtcgctgcgtgattattcttcggaatcagaaaagatggatggtaccggtagttgggacacgcttgaatggaccaaactcgatg

SEQ ID NO: 148708 - DNA, 490 bp, Arabidopsis thaliana landsberg
ttcttctctctctccgtcaatctcttcttcgtagtacacggttagcttccccttcgttactccgtccttacacaacaacaaactccaatcctcagtctccgttaccttgactctaggaggtttcgtctccataaggagagcagcctttgtcgcttgtgtttttggtggctcaagaaaagattcatctattaagccattgtctctaccacctccgctggtggtggtagtggtagtggctcggatccgccagaaactaacggcgccgtcacgacggcgatccatgtccaaagattgttaaagacgaagttaacgtagtcgaaagccaaaacctctaacggagaatccaaagtcgccatttctgaaatgtttttattatatcctaacgaagaagattgaatcagtggttatataaagggagaaagaaagagaggattagtatggggagagattgaatcttagccgttggatggatctgaagagagatagatgg

SEQ ID NO: 148709 - DNA, 237 bp, Arabidopsis thaliana landsberg
tcttcttcttctccttcttctcactgtaaaaaagaaaaaaaaatggcggaaactgagagaccccaccggtcttcaagtattaacagtagtagcaacaacaacagtggttcatcaaccgatctattcatttgtttcacatctcgtttctcttcttcttcctctatgcgtctctcttctaaatccatccatagcccagctcgttccgcttgtctcaccacttctcttagccgtcgtctc

SEQ ID NO: 148710 - DNA, 225 bp, Arabidopsis thaliana landsberg
cgtcgttgtctgggaatcggtgacttttgaatctttgcgactctcttgtagtgataaattgatcgttatctactttgatactctccggtcgtttttctccggtgctggagatccgattccttatcttttctgtcttggctcgagatccgagccaagcagtaaagaagacgactttgtttcacgatttggaatttgattcctgcgatcacaggtatgacaggttag

SEQ ID NO: 148711 - DNA, 840 bp, Arabidopsis thaliana landsberg
ttggatttggttctcgaaggtggttctccggttggtactgataacggaaaaactccaaggcttggagtgattccaaagtacgccggagatgagtcggagatgaaatggtttgaagttcctggattcaatatcattcacgccattaatgcttgggatgaagatgatggaaacagcgtcgttttgattgcaccgaatattatgtcgattgaacatactttagagaggatggatctggttcatgctttggtggagaaggtgacgatcgatctcgtcaccgggattgtgacacgtcatccgatctcagcgaggaatctcgatttcgctgtgattaatccggcgtttctcgggagacgtagcaggtacgtttacgcggcgattggagatccgatgccgaagatctccggtgtggtgaagcttgatgtgtctaaaggagatcgggatgattgtacagtggcgcgtagaatgtacggttcaggttgttacggcggagaaccgtttttcgtagctagggatcctggtaatccggaggcggaggaggataatggttatgtggttacgtatgttcacgatgaagtgactggagaatcgaagtttctggtgatggatgcgaagtcgccggagcttgaaatcgtcgccgccgtgaggttgccgcgaagggttccgtacggattccatgggttatttgtcaaggaaagtgaccttaataagctttaactatataggtaactaaaatagttaatagaataattaagtcttattaattacgtcccgtacaacaaaacaaaacgcatagtgttgttgcacacttgcactttatacatttaagtaaagtacacatag

SEQ ID NO: 148712 - DNA, 465 bp, Arabidopsis thaliana landsberg
gccatggaagtcaaaggagccacccggagctctatcatagttccttctgttcaagagatggtgaaggagaagatgatcacgacggttcctccgaggtatgtacggtctgatcaagacgtagctgagatagccgttgattctggtctaagaaaccagatcccaatcatagacatgagtcttctgtgttcttcaacctccatggattccgagattgacaagcttgactctgcttgcaaagagtggggattttttcaggcaagtctcaactaaagctacactattttcttatttaaccaaactgccctgaaaatactcaactctttacaaaactaccccatcttcttttgtgttagcaaattcatatggaattcaaatttatccttgtggcatgtctttatgaatattcaacagcttgtaaaccatggaatggagtcaagtttcttgaacaaagtaaagtcagaggtt

SEQ ID NO: 148713 - DNA, 223 bp, Arabidopsis thaliana landsberg
ttcataatgtgaaggcaaaaaacaaccgattgagatatacatggaatctcagagattatagagtttaaactaaatcaaggcccactggttgtttaagaggtaaaagagtcggaaatgtcttccatcacacctttcccatcttcaccatcatagtagaagaagtttttcaacgggtctcctttgcctgatactgctttgatcacctcctgccacatcaaaaaat

SEQ ID NO: 148714 - DNA, 438 bp, Arabidopsis thaliana landsberg
ttcactacttcttcgtctctctctctctctctctctctgtatcccttgtgtgtcggtgatcagatctcgtgccgacgaaaacgtgcgtctaaagcaatgctgttcgcactctgctatcttcaattcctcgatttatcttgaactgcgattgtttgttgttgtttcgatttcgttgggggtaattgggtgaattagagaggtgaatgagaaattcgcctgcgattctgtctctgtcggtgatcgattgccggagcagaaccaggtcggattctagcttcgccatttggagtagtggtcgatggggccaatgcggctgatctgaatttctatttccctccccccaattcagatcgaattctagggttcttctaattcctgggtttttagtctgtgtttcaattgagtcacgatgcagcaagataatcgcaaaaaggtgaa

SEQ ID NO: 148715 - DNA, 446 bp, Arabidopsis thaliana landsberg
gatcgccatatcgttgatcaagaccagagcgtcgtcgatccggccgagtttgcagagacgagcgatgagagtttcgtaggagtgtttccgagtgtagccggcgtcggtctgaggcaaaatacggcggagatcttctaaggaggaggagtaagagtctgtgtttgttaggaatttgaaagtagctgtcgtgttgaaacacgcgtttacgacgcggctgttgaggagacgacgtacggcttccaaatcgccggagcttccggctttgaagatgaggttatcgaattcgacgcaagtacgacgaccaggtgaagcagttggattgggatttacggtggagaatgaacgtcccgagattgattgaagcagaaatctggaattgttcgcttctttaacgaatcgtcggagaagagacatcgtctgattcaggtcaacggagattaggggtt

SEQ ID NO: 148716 - DNA, 242 bp, Arabidopsis thaliana landsberg
ccagtaaattaaagctgagccaaaaggactagtaaagattacaacaagagttgttcacaatttctcaagatcccaatttcgtcagatcatacaacaacatttgttcaacatctggaaaactatcttgagatcgagataatggccgagagagaacactacaagttaaaaaaaaaaccatgattactaataatacctaaacaacaaacgtctcttttcctctctcatagttttcacttccacag

SEQ ID NO: 148717 - DNA, 200 bp, Arabidopsis thaliana landsberg
cctcatcatatggatcaaaatccatccaccgatcttcttcctcctcatccacctcctccaccaccgcctcttccggtcaccaccactctccaagaaaccttccagatcgcagagcttcacctcacatccgtctctgaatccgacaagctcctcgctctacagctactcgagcgggtagtcgtacctgacccgccatctga

SEQ ID NO: 148718 - DNA, 412 bp, Arabidopsis thaliana landsberg
ctttaagcaaaaagctcataaaatagttaccaatagccttttacatataagtggaagactggaagtattcagaaatacataagcaaaaccaaaacaaacctaacacaccaacaacaactagaccacatacaaaaaacatttacaagcaaaacacttttcaaacaaatactgttaactccaaatatcttccacaccagtttcttgatcaatgtgctcgaccaacagctttcttgtatttgtagcgttttgaaatccagaggtacactaagaagttgaggaaactgagagttgccaacaagtagaaaaagtaatcaagatggcctcggttcaagttatccggtatccaacccggtttaccgttcttcttcgttatcttcatcacaaccgtcacaagaactgtgctcaaatagtt

SEQ ID NO: 148719 - DNA, 407 bp, Arabidopsis thaliana landsberg
acgcctttctagggtttggtttatgaacgctccgccgtaagaattgtcctccgccgccgcgttttcccgtcgattcagaacagaaggattattgcttttgccaatctgtatcaatatccgtttgattatccttgtaatttcgtgtaaaaaccattcaaggtttcagcttcttccctcgttctttagggtttagatttgatttggggttgggatgagtagtccgttcagtgaagagatactgattgataacctcgctaagctcaacagcactcagcaatccatccaaagtatcctttttttatattcgaattcattgcctcaattgattacatctctgtgttttggattagctcattcacattggtgtgtcttcagttgattaaacctcttactgtatgcttaaatgt

SEQ ID NO: 148720 - DNA, 300 bp, Arabidopsis thaliana landsberg
agcaagactctctctaagactcatatcattacgtcatgagttcaatagcaagagaccgaaaggaacaaatggtgatccattcttcaatcgtcttgcttcaagaaagattcagacaacttcagagagcaagagagttaagagctgaacgagagctcctaaaccctaaacctaaccaccaagacaacatcttgcaatattacagcgaacccactagtttcggtttctttcagtttctacctataaactctcaaacatcttcgtcacagcagctcctatccctctccttatgcttacactcca

SEQ ID NO: 148721 - DNA, 840 bp, Arabidopsis thaliana landsberg
ggaagtttctctgatcgccatttccacgtcgtactaagcttctctttcgccatccgttttaggcaacgaagacgaagatcatgaaagggcttacgaggcttctcaattctctttcgcgacatacagcttccgtaacttgttctccatcttcttcttctcttctgatatcacgtcgctctctgtttatctcggcggcgacacactttccggtgaatttctcggagtcgataacaactaatgcttctcgtaactgttcgagatcttcttcatttcccttcaattggatcggtatggtaatttctaggtcgctaatcttcacatttgtatatcagtaaaatgttaaaagagtagtctttttgtcacatgattcttgaaaatgaaatctgatggcttgaaattggtgtaatgagcagagcaaaggaggacaatgtttatccaaacacaatcaacaccaaacccctcttctctaatgtttagtcctggtaaaccagttatggagattgagaagtgctgacttcacataattctcgctctgctatgagttcacctttagctaaagccattttcgccattgatggtattcctcgtcttttgctacaacatacaattgtttcctcctcatataatccgtgttttgtgactaagattgtctctgttgatgcaggtgtagttcgagttttctatgggtcagattttgttactgtaacaaagtcagatgatgtaacatgggatatactcaagcctgatatctttgcagtggtaatggacttttactcttctggtcagcctttgtttctcgactcacaagctacagctgccaaggataccgctattcatgag

SEQ ID NO: 148722 - DNA, 263 bp, Arabidopsis thaliana landsberg
gcgtaagatctcttgaataataaaattgacatgaatatatatatttgtaaattagtcagaatatttatagacatatttaccaaagaacatcataatgaaaaataattatcctgttttattgtcacgatttagatttagacaatgcagtactaacaaacaaaacaaagacactgcatatatgtcggcaaagccagtgattttgtctcttcttcaaatttcatgttaaccatatgccacattgcttctatgataaacaacaaaca

SEQ ID NO: 148723 - DNA, 310 bp, Arabidopsis thaliana landsberg
catgaactaatcgaattcttgtgagatatcttgagatccaaagatatccagagattttatctttttctaaacataaattataagaagtgagaatgtattttatataagaaaagaagtgagaatgtaaactattattatttataggaacatataaatataaacgactttgtatgcatgtgtacagtattatctcgagggaaaacagttctatacaataatcatagcttgtgtgtgctagctttatgtatggattgcatcatggttttctgtctgtgaaataaaactctataatatattatgtgtatataga

SEQ ID NO: 148724 - DNA, 638 bp, Arabidopsis thaliana landsberg
gcaggatccacacgtggctgcagacggtttcacatactaagcagaggctataagagcgtggctggacagtgagcatgatacttcaccaatgaccaatgtcaagctttctcacaccagcctaatagctaaccatgctcttcgttctgcgattcaagagtggcttcaacatcatttgtgaaaataaaatccttcaaaccctcaatccctgttctcttatgaaaaaacgtttttgccttttctgcgggaggcaacagagtaagtgagtaagattagtgttttcagtcttccttatacatatacatacgatctaatcatggatagcagcatatttgtttactttttcaagcatagtgtaagtcctccatatcagtcatatatgaaaagaagaagctggtgagatttgtatgtggatatgtatatatatatatatatatatatatgttctgtatgaaaaaaaaagatatatgcttattcggtttgtgtgagaagaactgccactattttgttcttccattatgttcggctctcttaagaacaaagattagcctctaattattggacatgatctcactgatgatgcctttgcttagctaaaattaggatgagtcttacatttttagtcaagactatcgtgtaag

SEQ ID NO: 148725 - DNA, 522 bp, Arabidopsis thaliana landsberg
tctccattcataattttgactccactttccaaaacaaacaaaaaaaaataaatactaatataaaaaattctcaaatctaaaatttcagatttcagaaatcgccatggcttcagtgactctaggttcatggattgttgttcaccaccacaatcatcatcatccatcttcaatccttaccaaatccagatccagatcttgtcctataactcttactaaacccatctcctttcgatcaaaacgcaccgtttcatcatcttcttcaatcgtttcttcttccgttgttacaaaagaagacaatctacgccaatctgaaccatcctctttcgatttcatgtcgtacatcatcaccaaagccgaattagtcaacaaagctttagattcagctgttcctctccgtgagccactcaagatccacgaagcgatgcgttactctcttctcgccggtggcttaagagttagtccagttctatgccccgctgcttgtgcactcgttggccgtgaagaatccagcgctatgccagc

SEQ ID NO: 148726 - DNA, 466 bp, Arabidopsis thaliana landsberg
aaaaccacatcgattactcatggaaatgcatacaactataaacttcaacaaaatgcaaattatgaaaatgattgctctctcttatttctgaaagcaagcaatttggcgcctcaaggcgtatcaaagacgaagagtcttgccaaggaagggaacttgttgggttaaggcaagagaacctctatatatatggtcgatgaaagactacaaatttcgaccacattttaagcgagacgagtgttagggtctgcgaaactaccagccatacttcttgaagaagtccctggttctctttctagctcgagtgaaaactataactatgcatgcgagcacccatggaggaaaggtcccaatggagatgttgttcttgatccaagctggagggtctttcaatagaaatgttattaagagcgtaacaatcacaactccgagaatgattctggtgatgggtttgagcagggaatcctga

SEQ ID NO: 148727 - DNA, 202 bp, Arabidopsis thaliana landsberg
taagcgtggtggtttctccaaatgaatgacttaagtgttttattttctggatctggcttcattttggaatttgaacccctctctttttctctgaaatttgattgcatttctctgctgtttaaggataatatgtgcctctgtttgtctgttatgacttgatggtgatgatcaataagatttgagacaaggaattgtggtgata

SEQ ID NO: 148728 - DNA, 199 bp, Arabidopsis thaliana landsberg
ttttttttctttttctcataagtattattttattgatatgtctccatttgaactttctgaataaagctacaaagggcataaaagcccataacagacagccatgaaatatgcccattagagatacagttcaaggaacgtgtcagaatcataaagatgagctgaggacacgtgttacttccacaatctcttgtggatgaga

SEQ ID NO: 148729 - DNA, 244 bp, Arabidopsis thaliana landsberg
ggaatagtgtgtgtgagtgttattctccttctccttcttcttcttcttcttctccagaaaaaacaaaacttttttcttttctctctcaacttgcagaagaagcgatttacacaaggttttgtgattcttctcacttatatataatcttctgtatccttggaattggtatcaaaatcgattcttttaatctgtcattgaaggaactgggtttatacatctatctctcaagtcatagaatctgcat

SEQ ID NO: 148730 - DNA, 84 bp, Arabidopsis thaliana landsberg
aatctctctctttctccgccgaacttcttcgaatcaagtttccgtttatcactctaatattgttaaagtttccactgataccac

SEQ ID NO: 148731 - DNA, 236 bp, Arabidopsis thaliana landsberg
taaggagcttaacggccacacagtctaactatggtggtgaggaacgaactcggggacatttagtcatgagatacaacattttcgtggaaaccagttttaacaagacgtacataatggatatatcgacatttcataccaagtcttacagaaaagacttgtctagttattgtatgtatatgtacaaacatgacttagagactcaactctatctgcgtgttgtcgcagactctgtgact

SEQ ID NO: 148732 - DNA, 185 bp, Arabidopsis thaliana landsberg
agctccacatacagaagatcacatgctctatctctctttctatcctttgaattaaagaagaaaaattagagaaatatttcaaaaatagcaaaaaacaagataaagagaattctctcttctctctctctctctctctctctcacgctatatctctgccttgtcgctgttaataaatcgtaatagcg

SEQ ID NO: 148733 - DNA, 301 bp, Arabidopsis thaliana landsberg
cctgttgatatcttgagaagacttctggaatccaactctccaaggtcccttctagaagattttttcacccgctttggagtaggcgaagcagctgccatgtgcttgatgttagctgcccggataataaattttgaagatttaattagtaacattgttgccgataaagcagctgaggcttttgaggatccgagaattgtaggaatgccacaatttgatggcagtagtggattgtcaaatactagaacagcacctggaggtttcagcatgggccaagttgttcaagaagccgagcccattttct

SEQ ID NO: 148734 - DNA, 129 bp, Arabidopsis thaliana landsberg
aaaaagcttcccctaccaatttgcggacaagaagctgtgaatcttctcaattgtgtttcggaatcgaaattcgatcaagagaaatgtctaattctactgcaatctctctgagaatgtgttctatctaag

SEQ ID NO: 148735 - DNA, 380 bp, Arabidopsis thaliana landsberg
acacttatatgacaactaaatatacttttatgtgatataaacaaggactattcacttgcacaagatagtcatagattaaatacaagatgcatgcaactaggtccaaataatcaaccatcggaattgccgtgtcgagttatatgacaccatcttcagaggtttttctttctgagtgtatcaatgaatcttttctgtgtaatatcgtttctggatatataatcaagaaaatcgttgaagctgaattctccatatgcagctggtttattttcattgacgagctgagttgctggacttattttcttgtgcataggtagactgtgaagacttgcaaaagagagccgcttgtaatctttgttcactgttacacgatgaaccacact

SEQ ID NO: 148736 - DNA, 519 bp, Arabidopsis thaliana landsberg; identical to SEQ ID NO: 73053

SEQ ID NO: 148737 - DNA, 351 bp, Arabidopsis thaliana landsberg
  unsure (1)..(351): unsure at all n locations
ctccaatctggcaaataaatctcactctctcaatcaaaaacacacatcaaaatcaaaaccttctcttcttcttcttcttgcgagttgcaccgaaacactcaacaaaaccaaatcatccaaattgggtaaaacaaagaaacccttaacaagaagaagatcgaattcaagaagaagagatggagaatggagcaacgacgacgagcacaattaccatcaaagggattctgagtttgctaatggaaagcatcagaacagaggaagaagaaggaggaaagagagtaatatctctgggaatgggagacccacactatactcgtgttntcgtacaacacaagtctctttttaagctgt

SEQ ID NO: 148738 - DNA, 4167 bp, Arabidopsis thaliana landsberg
  unsure (1)..(4167): unsure at all n locations
ttaccgattttatcaccaccgtcgtcaaattcttcaacaactgcacctcctccgttacagactcagcccaccactccatctgctccacctccggttacaccacctccttctccgccgcaatctccgccgccggttgtatcatcatcaccaccaccaccggttgtttcgtcacctccaccgtctttttctccaccaccgtcacctcctgtcatcacttcacctcctcccaccgttgcttcttcccctccacctcctgtggtgattgcttcccctcctccctcaactccggcgacaacaccaccagctcctccgcaaactgtctcacctccaccgcctcctgatgcttctccatcacctcccgcaccaacaacaacaaatcctcctcctaaaccttctccttcaccgccgggagaaacaccttcaccaccgggagaaacaccttcaccgcctaaaccttctccgtcaactccaactccaacaacaaccacatctcctcctcctcctccagctacctctgcttctcctccgtcttcaaatcctactgatccttctacgttagctcctcctccaactccattacctgttgttcccagagagaaaccaattgctaaaccaactggaccagcttcaaacaatggaaacaacactttgccgtctagttcaccaggtaaaagcgaagttggtactggaggtattgtagctatcggagtgattgtgggattggtttttcttagcctttttgtgatgggtgtgtggttcactcggaaacgaaagcgaaaggaccctggaacctttgttggatacacaatgcctccttccgcttattcatctcctcaaggctcaggtaatataacatagaagaatacatctcaggttctgtaaaggcattttgtagttggataatctaagatccttttgcatttagggtgcggttagaaaccctagttggtttgttcattaacggttcgagaactgttgaaagaactgtgtactgagtagtatggttagttttagtaacttaatgagcatggaacactcactaagttttggataatgtgtattgttaatgtcttgatcaatctgcatttggttctgccagtgtggtttctgtgtcttctctttacagtatatattgagtgttgtgagtagtatgattagtttcagaagcttaagaagcatgacactctcgctgagttttgactgcttgattttgcttaatgtcttgatcaatctgatcatccccttttaatgtagttagcttctgactatgtgtttctctgtgttgtcggtacaatgctgtggttatactttcagtctaggatatgagaccaaatatgtaactagagaagcagctatttttgatacgtgcgacaaataaaaaaggaaaagaataatcttttagttctgatcaaatgtatagattgtctccgtggtaatcatcaatgcatgaaccaacacattcttacttgtttgtttacccagtattgagttgtttattaacagaaaactcgtgttgacagatgtaatgctcttcaactcgcgttcttcagctcctcctaaaatgagaagccattctggtagcgattacatgtatgcgtcatctgattcaggcatggttagcaaccaaagatcatggttttcatatgatgagttatctcaagttaccagtgggttctccgagaagaatcttctcggtgaaggagggtttggctgtgtatacaaaggcgttctttctgacggaagggaagtggcagttaaacagttaaagattggtggaagccaaggggagagagagttcaaagcagaagttgaaatcatttctcgggttcatcaccgccatttggttacactagttggttattgcatctcagagcaacataggttgcttgtatatgattatgtacctaacaacactctccattatcatctccatggtaccaaatgcctcatcttcttaaaccataaacttatccttttataactacataaacttcaatgcatgtgtatgcgcagctccaggaagaccagttatgacttgggaaactcgggtaagggtcgctgctggtgcagctcgtggaatcgcctacttacatgaagactgtaagttactgatgcttttttgtttttccatgatatttagttttcataattttgttaccttctaatgctctgctttttttttttgcgttggcaggtcatccccgcattattcaccgtgacataaaatcttccaacatacttcttgataacagctttgaagccttggtaacatcatatgagctttattctagtcattaaacggtctttctttcacaacgctgacctcttagcaagttttttgtcacaggttgcggattttggactggcaaaaattgcacaagaactggatttaaacacacacgtctcaacgcgcgtaatgggaacctttgggtgtgtgtgtatgcactatttattagaacgttctttgtgtgaaaatcaactactcacagaagaactaaccgatattaactgtcaaattctcttaggtacatggctcctgaatatgcaacaagtggaaagctgtctgaaaaagcagatgtttattcgtatggggtaatactgttggagcttataactggccgtaaaccggtagatacgtctcaaccacttggtgatgagagccttgttgaatgggtaagtgcagctctagttttaccatatttcttgaacttccatgattcaacaagtgtcttctaaccccctttggttacataacttttattaggcaagacccttgctgggtcaagcaatcgagaacgaagaattcgacgagctagtagatccgaggctagggaaaaacttcatcccaggagagatgttcagaatggtagaagctgcggctgcatgtgtccgccactcagctgcaaaaagaccaaagatgagtcaagtggtgagagctttggacacacttgaagaagcaacggacataaccaacggaatgagaccaggacagagccaagtgtttgactcgagacaacaatctgctcagataaggatgtttcaaagaatggcttttgggagtcaagattatagttctgacttctttgatcgctcacagtcacatagtagctggggcagtcgtgaccagtccagatttgtaccttagtagtttttattgcctttgcttctttcttctttccctttaaacatgtcctcgatcttgtatattcttttgcatgatataatgtatttttgaaatatacatacatacacacataaaatttggtagtcttttgaagaaaaagaataacagatgtatttgatagatagtggtccttgctttatctaatgattgctgaaccgggttaacaaattgagtcttggtttctcttgtttacttgcttaatcgtttctttgtactgagttcttaatcggatttgtgagctgtgagttgcgaatcaaagcttagtgaggtctatcgaagataggatttacaacatctcttcttcgtaatcgcccttaaaatagttacacaataaacatcattttcttgtttcttgctttccaagaggacaagttttgtctagtagacaaaattaagtaaacaaacctcattgagatatttagatcaaannnnnnnnnnnnnnnnnatttgccgtgagtttcaaaaagccactccaaaataacaatgatgtatcttgattgaagcatatactgatcaagttgattttcagctcaatcttcaaaaacaattgaagaatgaaagtgaaatcgagctatctaaattcatttatgaaatgaagtaaaaaagagagtttcacatacaaaacaaaacatctaatgctaaagtctctcgatataatccaagtcctcaccgaatacgagtgggcatgtgcttgaagctcggggagaaagtctcaacaccttgatcatctcaagttttggaacaacagtatcaaccaagaatgttgccttctttaagtgacaagcgtttttcaaaatgtaaacagcaatatctctatcttgtggcctaagtatagtgaccatttgaaaatttgtaggctcggcagcgagcatcaaggaacataagtcagttgattccacttccagaaaacgataccatatacgcttatcatccccattttttaagcccaatcagaataataagactaaaagtaataagaagga

SEQ ID NO: 148739 - DNA, 288 bp, Arabidopsis thaliana landsberg
aagcaaagtgggttacaaaccattattattgctttatcaaatttgaatattaaaaatgtacataaatcaaacaaaagaccaatacacaagaactataaaatggactctcaagtgtttaaagtcacacagatgagaagagaggttattctataaggccaagataataataaaaacactactaagcaccactctgtacaaaacaaagtattgactgtgtaacaaacaaataaacaaactgtgaatgagcacaaaagataagccatagtaagattttttgtttttagaaag

SEQ ID NO: 148740 - DNA, 134 bp, Arabidopsis thaliana landsberg
ttacaatttagctttcggattcctccatagaacccgtcttattcgttaccttcctctttatgatctctcatgatcatcgttcttctccaccttgatccgactgtgtactggttgaattccaacactaccgtctc

SEQ ID NO: 148741 - DNA, 239 bp, Arabidopsis thaliana landsberg
gcaaataaaagacagcgattgccatatagtcctgctgaattggctgccacagaggtataatttgtcgaattcttataaactattatttctttcgtcctctttaattggtctgttgtggaagtctgaagtcattaattagtcttaccctcctgcaggtgagggctatggagtgtattaaacagttacttctcagatctgcagaagcccttttcctactacaacttctttccaacatcatg

SEQ ID NO: 148742 - DNA, 238 bp, Arabidopsis thaliana landsberg
acagggaggaatcttttatatgttatgtataataataattgagaatatggaaagagtatgtgagttttgtaaagcgtatagagcagtggtttattgtatagctgatacagcaaatctttgtttaacatgtgatgcaaaggttcattcagctaattcactctcgggacggcatttacgtacggttttatgtgattcttgtaagaatcagccttgtgttgttcgatgttttgaccataac

SEQ ID NO: 148743 - DNA, 1425 bp, Arabidopsis thaliana landsberg
caggaattaaaccaagacggcccttttaactcagtggtagagtaacgccatggtaaggcgtaagtcatcggttcaaatccgataaggggcttttacgttctttactttctaatagtcaaaatttcatttgaaagtctataatttaatttcaaattttgttaatttcattctaataaatttcattctaataatataataactaataataaagttagcgagtaatttaaaaaataaaaatgaacatttgtatattataatacaattacaatgaataatgataagtcgtctcttgaatcgccaaatatatattctttttttttttcgatttttcgatagattagaaatcgacaaatccaaaagaaaaagtaagtggacctaacccatcgaatcatgactatatccactattctgatattcaaattcgatagagattaaattgaaacagtagattttttttatttcatatttttgtattaggaaatccgtcgatatctcttattgaatcttcttgtttctatatatttcataggaaatatattgcgttcctgcctagagaaagagagtctttttgcaaagtaataactaaaagggcgtttcaatattttttttgattcgagaacataacaagatcctacattctctttgtattaagaatcaatttgtattaaaaataaacaaaaatcgaatcataatcatggcttcagatatcaattaaatatttccatattgatgcatccgagatgacaatgtaatgtgatcgaaggtgtatgtgagaaagaaactctcatttacagtttcctataattttatttaaatattgaattaaatataaataagaaattttccccttttttgacagatacataagggcatgtacatatagatatcaaagaaaatagaaaaaaatattaaaagttccctttttgcttcaacccgtcaactaaaaaaagggtataaaaggaaaataacaatagttgatactatagtatttaatagacaagtatttaatacacgcaaaaaagaaaaaaaaagttctttattctttatctgaataatgagtcatccgacaattcatgatttagattcaactacttatacttattaataaactaatagcaaggaagaaacaaattgagttgatccgtttacctaagtaaggaccaataaaatcaaaaattttgatcttcgaaaccaattaaatgaaattctaagggttccattttatggggcagtgcgcgagaaattaaatcataaacaaatgatagaatttgagcgccctgaaaatgccataatatataacatcaaaatctataacattaaggtgttcggaaatggttgaagtagatgaataggaggatcgctatgactatagcccttggtaaatttaccaaagacgaaaaagatttatttgatattatggatgac

SEQ ID NO: 148744 - DNA, 241 bp, Arabidopsis thaliana landsberg
ttttacacacgtgctgtggaaatggtagtagcgacggagggaagacggtgatggagatgcttcttgcgttaaagagccttcttcctccaccggtgaatgtcggtggtggagagacggaggagctgtttcaagagacggcggagtatatcgtgaagcttagaacacaagtcgtggtgttgaagaaactgattgagatttacgataactcttctgatcagaagaaagatgttgttttataatg

SEQ ID NO: 148745 - DNA, 1970 bp, Arabidopsis thaliana landsberg
gatgggcccaatcgatgaatctaaagaatcaagttctcctagagacgacgccggtcacggaactcacacctcatcgaccgccgctggatccgtcgttgaaggagctagcttattaggctacgcttcaggaacagctcgtggtatggctccacgcgctcgtgtcgctgtttacaaagtctgttggctcggtggttgtttcagctcagatattttagctgcaatcgataaagccatcgccgataacgtcaatgtcctgtcgatgtcactcggcggtggaatgtcggattattatagagacggtgttgcgatcggagcattcgccgccatggaaagagggattttagtatcttgctcagctggtaatgctggtccgagtagttttagtttatcaaacgtagctccatggatcacaactgttggtgctggtactttagatcgtgattttccggcgcttgcgattctcggtaacggcaaaaatttcaccggagtttctttgtttaaaggagaagctttacctgataaattgttgccgtttatctacgctgggaatgctagtaatgctactaatggtaatctctgtatgaccggaactttgattccagagaaagtaaaggggaagattgtgatgtgtgatagaggaattaatgctagagttcagaaaggtgatgtggtgaaagcagcaggtggagttggaatgattctggctaacactgcggcgaatggtgaagagcttgttgcggatgctcatttgttaccggcgaccaccgttggtgaaaaagccggtgatataatccggcattacgtgacaaccgatcctaatcccaccgcttcgatttcaatcttaggaacagtcgtcggtgttaaaccatctccggttgttgcagcgtttagctcacgaggaccgaattcgattacaccgaatattcttaaaccggatctgatcgctcctggagtaaacatcctcgccgcgtggaccggtgctgctggaccaaccggactcgcctccgattctcgccgcgtggagttcaatatcatctctgggacgtcgatgtcttgccctcacgttagtggtttagcggcgcttctcaagtcggtgcatcctgaatggagcccggcggcgattagatcggcgcttatgaccaccgcttacaaaacttacaaagacggtaaaccgttactcgacatcgcgacagggaagccttcgacgccgttcgatcacggtgcaggacacgtgtcaccaacaaccgccactaatccaggactcatctacgatctaacgacggaggattacttaggcttcctctgcgcattgaattacacatcgccgcaaattcgaagtgtctcgagacgtaattacacttgcgatccgagtaaatcgtacttggtcgctgatttgaactacccgtcgttcgccgttaacgttgatggagccggtgcgtataagtacacgcgcacggtgacgagcgtgggaggagctgggacttactcggttaaagtaacttcggagacgacaggagtcaagatttcggttgaaccggcggttttgaatttcaaggaagctaacgagaaaaaatcgtacacggtgacgtttactgtggactcctcgaagccgtctggatctaacagctttgggagtattgaatggtcggatgggaaacacgtggtgggaagtcccgtggcgattagctggacatagtcgtaaattatggcaaatgaaaggggttttatggaaaagaaaaggtgttcacagatttattgtaatgccgtttttagataagaagaaacctctgtttagcaaaaacgacatgcagtctgttaagacttgcctagtttgtttttgggatgtcttgctgtttttcattttaaaaagaaatatattctccggctacaactgtagctgggtctctctaggtgttttatcatgtgacttgagatagttaatgaagagaaaatgtttgaaaaataaaaaa

SEQ ID NO: 148746 - DNA, 95 bp, Arabidopsis thaliana landsberg
ttttttaatgaggggaagattttgattgagaaagtgagggatcaaaactaataaaagtttttgttattaatagaagaaacagagctcttgagatt

SEQ ID NO: 148747 - DNA, 324 bp, Arabidopsis thaliana landsberg
gcgactcgtgtttgtttagtgaagcgatcaagcgagcgagatcagtcaaatagctttttcattgttcctcagatcgaagaagaagaagaagagcttagcaacaatggtaaatctagatccgtccaagtgctttcagtcacagctaatttgatctctctatttgttgcttttacgatttctgattttgtttggtgtgtttgtgctcgttcccggtgagaaggcggcgaaaccgattgcgagtccgattccggtggcgctgtatccgactttatcggtgttcactcttgcgattggtctcgtcattaccgctatcttcttcatgta

SEQ ID NO: 148748 - DNA, 150 bp, Arabidopsis thaliana landsberg
cccacactctaatatggtatcagagcccgatccgcacatactcaacccgatccacatcggtccggcccaatacttggcccgccgatccatgcccaaacatatcgagatcattggctagaagagccatcatctcgagggggcgtattaggg

SEQ ID NO: 148749 - DNA, 596 bp, Arabidopsis thaliana landsberg
caaaaaaccattcttctctctcaagggtgggttagcccaggtacttcgtgcggcgccattgttgaggtttcttctgttaaccaagctaagatcgctgaatccgccggcgcatgttctgtaatcgtctcagatccggttcgatctcgcggcggtgttcgtcgtatgccggatccggttctcatcaaagaggtaaaacgagctgtgtctgtacctgtgatggcacgagctcgcgttggtcattttgttgaggctcagatcttggaatctcttgcggttgattacattgacgagagcgagattatctctgttgcggatgatgatcatttcatcaacaaacataatttccgctctccgttcatttgtggttgccgtgatacaggagaagctttgaggagaatcagagaaggtgctgctatgattaggatccaaggagatttaaccgcaacaggtaacattgcagagactgtgaagaacgttaggtcattgatgggtgaagttagagtcttgaacaacatggatgatgatgaggtgttcacgtttgataagaagatttcagcaccgtatgatcttgtggctcagactaagcagatgggtag

SEQ ID NO: 148750 - DNA, 277 bp, Arabidopsis thaliana landsberg
aagagagtgagagtgacggcgaggaagaagagaaatgtggttcgccggcggtggtggtggactgaggaagctctgcagagcgtcggctattttcgataacgagataagttataactctttgttggtgagatacatgtccagagaacgagctgtgaacgtccggaagataaaccctaaagttccgatccaagaacgttacgccatttctaattctctctacgatctctttaagctacatggtcctctctccgttcccaacactgtgctccgcgctcag

SEQ ID NO: 148751 - DNA, 271 bp, Arabidopsis thaliana landsberg
tataatctatcgctcgcggtggcggatgtggaggaggcgaagatcgagcagccggataccgcggttgcgattgtgagagtgtagaggaagataagggagagaccggagagagatgggaagagacggagggagattgtgaggaagatgcaacttgaggctgagcctaagaggatgtagttgcagagaaggaagatgttgtgtgtgttgcctttcgatttcgacattcccattttctcgaattcaagaagagaactttggtttttttttgggg

SEQ ID NO: 148752 - DNA, 335 bp, Arabidopsis thaliana landsberg
tgtatatgaaacgagtttgaggaatcaaaactatctaaaaagacgtaccgaaagtgaaaactaagaatatactgtatgagacattagaggaggttgtcatctactcatagtgttgacttttgatgaaacccaaatgaatgaatgaatggtggcgccatttcctttatgaaggaacaccccttttgttttgtcattttctatttgtacagcctaattgttaggttgttttcattttgaagacgggcctacgagatcacttttgtttgtttatcgtatcatatgggctctataaatatgacccacccatgtaaagcccaagcaatctgcatatagaa

SEQ ID NO: 148753 - DNA, 614 bp, Arabidopsis thaliana landsberg
  unsure (1)..(614): unsure at all n locations
cgtgaagaatcttagagagtcgccgttattgatgcatttatacgcggaggctaatggtggtttgacgacgacggcaacgaatccaaaggcggaggattggacagagatggaaggaaagtggggtagaggagaagagaggacgccggaaggagttatattggtggagaagctcgcagacggtgannnnnnnnnnnnnnnnnnnnnnnntggtggcgcgtgtggggaagatacaagcgcgtgggggattgtggcgcaaggaagaggatcggatactgggccggtttgttatctattgaaaacgacccgggtccggtcgggtatgggtacggtttgcacccatttctgtttggttaaggtcaagagttttagggaaacggctatgtcacagttgaataattcgtggttggtgcagactggtcaatgagcagtgattgtcaaaggatttgcactgtaaattatttatactctttgggttttgattatgaaacccttatggatgatcaaattacatttgttattaatacagaacattttttaggaatttggattggtgatataaatgtaaataaaatggtcaaagttggttggttatagtgatttgtttaatcaaagaa

SEQ ID NO: 148754 - DNA, 383 bp, Arabidopsis thaliana landsberg
cacagtccccggtgatgcaagtgaatcttccggtggttgcgtcttgtgtgcagagagtacgaccccaaatacgaccggaccaagctgcggggatcgggataacacgtgtctcggtagggtttaaggagaatccggttgtaggtaaaggagaggttccggcgccggagagaagtccaggccagacggtgtagctacactggttaacgatggtgaaagtggtggaggaaactccatagatgaaaacaagaattagaagaagaaagagagaaacttgagattgacccattagagcagagagtcaccagaatctaaatatatgaacttttgtgtttttatgtcgccggagatgagtttaccggtgactctgtttctgctctcgagag

SEQ ID NO: 148755 - DNA, 403 bp, Arabidopsis thaliana landsberg
gatcgagaagtattttgaagcaaatgttaaggaggtattataagatttctgaaaactgctatatatctttcaagtgtttgttaaaacagtatccaacgattttaaactttgctgcagatcaagtcgtggaactcagaggaagagtataagagtgcattaaaggaagctggcctgctggacgagtgaggaagagagacagcatgtgttcaaaccatcttaaaagactatgtcgtctgttttcttgagattgttttaagaaagaaacttgtatacctctttgaggttttcttgtaatctttttatctgattgctgagagtttcagactttgtagattttttgttaagggaaaaggaaaacatttttatgtcaatgtcaatcactttagtatgaacctaaacagta

SEQ ID NO: 148756 - DNA, 382 bp, Arabidopsis thaliana landsberg
tgtaaaaccttaataatactatgctttaaaaaaggtaaatatcatgacttgtattcattcatacatgaaaacatcaaaaatagccctctagcaaaacgcttccacctaattgcttagactgcaaatctttcacatgctttgattctaaccacttcatcgacgcgatctgtctctcatcttttgtgctccattccggcaagacctcaataattactttctgcaatagtttctgctcaaatccatctctcagaagaacttcaaggtctttgacgttccccctcaaatctaacaagacactgcatagtccacggttgtaacaataatccaaaatggaatccaagtttatcttttccaatactacggtttcgaccccgctactact

SEQ ID NO: 148757 - DNA, 323 bp, Arabidopsis thaliana landsberg
cagaccaacaaaaaaaaaagagggaaaatctccttgttcaatagtcaataagttagccgctatcgatctttagaaagatccgtcgatgagtccatcccatggcgaccggaccaccgcatttgcctcgacggatctagtcatgttgagcatggtaccggtattcaaccatccttaatttcattctttgataccttttaggcatgatactcttgatatatgattctataaaggtatatatattgaaactattttatgcaagaagtttattattgagggcacacgtgcagacatgtttcatgctaaaccatatggagaaaggatga

SEQ ID NO: 148758 - DNA, 383 bp, Arabidopsis thaliana landsberg; identical to SEQ ID NO: 148754

SEQ ID NO: 148759 - DNA, 555 bp, Arabidopsis thaliana landsberg
caatccttgttctcgccgaaatagagaattttgtgaatctgggtttttagttcaggtgttaatataagattttgatcaaaagaagacgagattcgatccgatccgatctgattgaagaagaaatggcgaatctgtatgtgaaagcggttccaccaccggatatgaataggaatacggaatggttcatgtatccaggagtttggacgacttacatgcttattctcttcttcggttggctcgttgttctctctgtctctggttgttcccctggaatggcttggactgttgttaatctcgctcacttcgttgtaagtcttcgattgtgtttatgctttagagatgattttttcacttagggttgtgactttaaattagatgatggattgattccttgttttttttttatttcctgagatctggatgtgaatctggctctagtgtttgaattgatctctttggttattagcaattttttagttggtttagggttcgaatgaagaggcaattaccttctgattgatcagttttagctatcgtatatcgttgagcttggat

SEQ ID NO: 148760 - DNA, 567 bp, Arabidopsis thaliana landsberg; identical to SEQ ID NO: 24036
  unsure (1)..(567): unsure at all n locations

SEQ ID NO: 148761 - DNA, 360 bp, Arabidopsis thaliana landsberg
gtgatgaagggcattccggttatagctggtgcctctaatacaggccccgaagcttacactgtggctaatgtattcccatggatgctcacagtcgctgcaactaacatagaccgtaccttttatgcagacatgacttttggaaataacattaccataattgtatgtgaaatgttttttcaggtcttttcaccaccgggtttcactactcttggaaacttactcttttcccttaaaaactgtttcagggtcaagctcaatatacaggtaaggaagtatctgctggtttagtttacattgaacactataaaaccgacacctctagcatgctgggaaaagttgtcctgacgttttgtgaaagag

SEQ ID NO: 148762 - DNA, 395 bp, Arabidopsis thaliana landsberg
gacgagcaagcgtgatatccaagaaaccaccattcttagccattgaaaacaataaaaaaaccagcacctcatgatttgagatgagacgcatcttttgttgccaaaaaaattattgcatataagttttaaaattttcaaagttcaaactaaattaaggattttttttttactattcacgtaacaataatcacatcacatgatccaaaattcgattattgttcaaattattttgtaaatttagccatagtttcattttttcacttatatgtttgtgaaataacgatttgtgtttggaattaaaattaggggtgttttataaatatagtaaaactaggatagtgataatgtaatatattgaacgttaaaggacaaagatgggaaatagaaaataaagt

SEQ ID NO: 148763 - DNA, 939 bp, Arabidopsis thaliana landsberg
taaaatatttaaaaatttagagcctgttatcgtaaaaataaataaaattggaatctattttaattatgttttttgttaatggattttagaaaaatatgggagccaaagatcaacgaatgcctacaaaaccaataatttgacatgttaacaaaaaattgtaaaatccaaaaaaaaaaggtaattgaagctgataaccctcttgttcagcgagtgggttaaagtgtgaccgagatatacgagcacggcatcgttttacgtatcgtgatctgttggatctcaactcggttttcttaataatcagaatccggttagagattgaatttgggttttgttagttttgcttcttctctctgcaaaaatcctccatccgcttcctcacgaaaaaccctagcacagctccgagatcccttttgtcgccatgggagactccggcgatcctttcttgcgtaatccaaacgccgctgttcaagctcgcgctaaagttcagaacagagccaatgttcttcagcttaagctggttcgtctcttctctctaaattcgctgaattcgtgattactctctagattttagtttcgttgtctattaggtttctagctaatcaattggaatactcttaagtcgtttgatacttgcttcggttctattttcgattgcgttgtaacactcatcagctagttctaaattgaattgagattccgattttaggtcatatgatttgattatattggtcttgattcttgagcttgttttatagttttgaatcagtttgattgatatcttgttgcttaaagctgatataatggatctatctgatatgcagatgggtcagagccaccctactggcttaacaagcaatctcttgaagctttaagagccacgtccgccattggagtacaagccaccaccagagaagagagagtgcccgccttaacaggtat

SEQ ID NO: 148764 - DNA, 451 bp, Arabidopsis thaliana landsberg
aaaagttccaagtccaacaatgacaaggaaaccaaagactcaactgaaatagcaaaaggttccaagtccaaacaatgacaaggaaacaaaagactcaaatgaaaggaaaagatagttgtttttttccatcttgaatgggtttattccagggctagtcaaatcccgaacctcgtaaaaaaccaatctccttgaggttcgttcttgactcctccccttttgaagctctccaatagattaccgaaatgggggtggttcaagcagtctgacaaggaaacaaatctttgatcctcctcacggttgtacgaatcagattctcagtagttgcaacagaactaacactcagctctagccttaggacctgactcaaccagcatttggaaggaaatggtcaaaagtgatccttcttcttttcctccaggcttacccgtaccatctggaaaaatcgcaaaac

SEQ ID NO: 148765 - DNA, 338 bp, Arabidopsis thaliana landsberg
gatcgttatgtgaagaactgtagaatgggaggtctcctaaggagacgaaggtggtggttccatgacgacaaggtttgatgcaccaccaagattaaagagaagcctttatatgttaatgatgacatttaaaaatgtcaaaacctaactttttgtctcactcttactgtggaatatgtcaagtgaagagctctgaattatataagagaacactgagagccggaatctacatttcgtactgaacatgtgcacaaaaagattaattaatgctaaacaataagttgtcattaatgccaatagttattacacaaatggttttttcatccaaatatctctaaaaa

SEQ ID NO: 148766 - DNA, 368 bp, Arabidopsis thaliana landsberg
  unsure (1)..(368): unsure at all n locations
ctactataaaataaagacatgaatatatatgagtatatttcttatcgcatttcagaaagtctttttgggtatgaacataaattttagaaagattttcaaataaatttaaaattataacaaatttctaattaaataaacggganattaaatttttcatttcatactctcaaaaaccataaccccaagaaaaggcaaattgttgcagggtgaaatttcagtttacctgaccagtaaatcaagtggtaaaacatgagtaagcaacattactttttgccctgatgcttaatttccaaaatccttggtaccttggtccatatagacctccctcatgcaatacttcttggagttctcgtcgatagctcaatata

SEQ ID NO: 148767 - DNA, 95 bp, Arabidopsis thaliana landsberg
cagaatcataaccatgactataaccagaaccataactataaccaaaaccatagctataaccaaaaccaaaaccatcaaggcaacaaccccaagaa

SEQ ID NO: 148768 - DNA, 202 bp, Arabidopsis thaliana landsberg
ctctgctcgagattttagtaggaggcaagctcgattgcttgcaattagatccatggatgaagaagaactcacactttctcgcgcgtttttagctcaaggagatttttgaagaagtggtcgttttcgaattgtcaacttcagaagaagaatcaactttggttttttcttttcccttctctgtatagctttgaggaggcgcttc

SEQ ID NO: 148769 - DNA, 1478 bp, Arabidopsis thaliana landsberg
ctccgacaaaagcacgttcacttgtgccaccgacaaaattggaaatcttacattttttgttttctctaatcaaaattattgttggaacgtagacaagatccgttccaagattcgtctttttttttcaatttgattcctgggttatctgaaagatcttctctttgcttcgatttctatctccgctgcttgtgaaatcaacctttatggtatgtaatctcgaactcagctaaaacacacttcactctcggaaacatggagacggaaacgaatcaggttttacggaaaccggagctaaaatcatacagtcacaaacaatttcactcctcaaatgcgttagagatcttaagagaaacagttcgaattctccggtacaatcttggtgctttaatgttaactactgctgttttgatctgtcctgtctctgctttgctcttaccaaactttttagttgatcaatcattagtgaataaactcacagtgaagcttcttttagtggcgaaatcaagtggtcttcctttgcagccttttgtcaaacattcttgtcagaaattcgctgaaactgctgtttcgtctgcaatgtgtttccctgtgtttatcactgtgtctctgttgtctaaagcagctgtggtttactcagtggattgttcttactcgagggaagtagttgatataagcaagttcttggttatattgcagaagatatggaggagagttgtgttcacttacgtttggatttgcattctgattgttggttgcttcactttcttttgcgttcttcttgtagcaatctgcagttccttctctgttctcggcttctctccagatttcaatgtttatggagctatgctagttggtttagccttctctgtagttttcgctaacgcgattataatctgcaacactgcgattgtgatctcggttttggaagatgtttcagggttaggagcattgatgagagctagtgatttgatcaaagggcagattcaggttggtttgttgatgttccttggatcaactttaggattggcgtttgtggaaggattgtttgatcacagagtgaagaaagttagttatggagatggctcttcgaggttatgggaaggacctcttttggtgttgatgtattcctttgtgacacttatagattcgatgatgagtgcagtgttctattttagctgccgagtttattatagtatggaagcttctagaggtgaaactcagccaatcatggaaacggttacggttgtggatgctgagtaatggtgcgttgtgcggatcaaactcggtgaatggacatggaaacgtattagctgaagaagaagttgtatatcatcaaatggggttttattgagcactttttgtttcactttgaaacttgatgcatctttaaggtttttgttatatatggtttctctgtttacattgtttgaagattatatagcatcccaagttcgttcatagttctgctcttgtttctt

SEQ ID NO: 148770 - DNA, 378 bp, Arabidopsis thaliana landsberg
ctagattgagagacgagattcggaggttaggatcggccatgtcggtgaacgctaggaaaccagaagggctcttagcgaggagaaggtttctattggtggataaggtttggttgtggatagggatctgaagctgattttggattagggttttgagttgggagactgtgatatgaggtccatctacactcactctctccaatccatctctgcttcggactctgagcatcgtcatcttcgttcgttcaaaaacccagcatttttgaggaacaagaacaaaacagattcgaggaaatctcgaaacctgcttgaagaatttataagacaacaaagagaggatagagaacaaatacttgacgtatggattttttggaaggtata

SEQ ID NO: 148771 - DNA, 262 bp, Arabidopsis thaliana landsberg
ggaagttttcccttttggagttggatgattctcattatgctgcaatctgtattgaagatgatgaagctagtggaggtgcaatttttcagttgacatatctcttgatactgaaaaatccattttattcagtaatttcttcatcacatctttttccttcttgcaggagctcctatgagggtgattgtccgaaaaaccatcccgtttgtagaagatgaacttatatctgaaagcaaacttctttagatagcggagcctgaaacct

SEQ ID NO: 148772 - DNA, 306 bp, Arabidopsis thaliana landsberg
tatgtcttttaatacaggaagttgggcagttaaagctgctgggatcaccagttttgtcaaaagtggagtgtgaagaatcttttatgtctgaacaggcttctctctttcaatcatctatccggcttttaggagagtactgtcctatatctaggaaaaagtccactcataaagttggtggtttgcgttttgaggaggacatcacgagctgtattggatttcagtttatgcaactgagtgattatcactgcctcttctgacatcccttggttgtttacgtttgttgaatcaagatggctttgcaaaaca

SEQ ID NO: 148773 - DNA, 896 bp, Arabidopsis thaliana landsberg
ctccaccaatctctctttctctctctcaaaagaagagaaactaataattctcaaaagctcacacacagaaacagaggaatctataaggaagttttggtttttggttatcaacaatggtggaagcaaaagatcaagatatgggtgatggtatgcaatgtataaaccatccatttactaaaaacccaggtgggatctgtgctttttgtcttcaagaaaagcttggaaagcttgtaacttcatctttcccacttcctaaacacctcacttcctcttcaacttcttcttctccttccttcagatctgactctgttggtagcacaaccactgcctctgccgcaaatctctcagcgtctctttctctctctgtctccggagcaacaaacaacaacagcagcaagcttccgtttttgttagctaagaagaagaagaagatgcttactgcttcttcttcttcttcgaccacggctcatccgtctacaagagaagtcaatctacaaagaaaacgaagacaacgtacggagattcagatttgagcccgagaaagagaaatgggttttggtccttttttcatctctactcttcgaaacaacatggtagcagtaagaaagttggaaactttcatcaacccataagccagactgagacaaaaacagagttggcagagactacaacagtgggatcttcgtcttcttcgtcagcttcttcttcaatgtcaaagagagttgttggtggtggtgggagtagtagtaacagaaacggtattgatgtgattgttgaagaagatggaagtcctaacattgaagtcacaccaagtgagaggaaagtgtcgagatctagatctgttgggtgtggaagtagaagcttctctggtgatttctttgagaggatcacaaatg

SEQ ID NO: 148774 - DNA, 274 bp, Arabidopsis thaliana landsberg
acgagacatcgagcataaaggaaccgatgcagctgggaagttgggtggcgagcaaagagaacacattggtgagtgatggcataatcttacttgaagacgggaaagtgaaacaagacatttcacttaggctacaaaatgttgaaagaggtgttcttgagatccagcttgaatgtcttcctctcactcaatgatgatactttcttcttcatccctcttcttttttttttctttaaaagatttatttctaaatttatagtgaagaaaagatgctgct

SEQ ID NO: 148775 - DNA, 301 bp, Arabidopsis thaliana landsberg
tgattagaccaacatttgttttctatcaatttgtttgcatatctgtactatcacacacattttttcaatctataacacacacacacacacaatgatcaaatgtacacatgactcagagcgtatgtaaatgtacacatgcaaagaaaaagaggcaaagcaactcagatctttttgatctgggaatccagcaaagcacgaccagtatggcagatccggtccctttacctaaacttatcccaccatgattaaccattcaatataagatgcaaacctggacctgatccaggtaaccgagcaataa

SEQ ID NO: 148776 - DNA, 257 bp, Arabidopsis thaliana landsberg
gtggtgatgcaaggtttgtgccttgtactaactgtgatggtagcaccaaagtgtttgaagagcaagatgcacggtctaagcggtgtcctaaatgcaatgagaatggactggtgcgttgtcgtgtgtgttgtctctaagtgatcagtttgatcaaaagatgtgtgtgagacaggggatatagattgattgactaaacatggtatttggttagtaatgtatattcgaataagtcagttggctcaagccttttattattt

SEQ ID NO: 148777 - DNA, 335 bp, Arabidopsis thaliana landsberg
gtgcattggatgatttcaaagatctcaatctttctcatcaaaggttactcctttttcctatgtgtttacctccatagtctcaaacttttttggatttgagtttagagactttcaattcccaagttagagatttctgtgttttagctctgaatcgtttttgggatgtgttgttgtagaaatcaaagggaagctcaagaggaggaggagaagaagaggaaagaagagacggttttattaccgagtggggttcaaggtcttggaatgggattaccagatatgagaagcaagaagagaggaaaacaaaaggtttccaaagaggatcatgttgctgaagc

SEQ ID NO: 148778 - DNA, 551 bp, Arabidopsis thaliana landsberg
agagctggtgctgtggtggctaagtatggagacaaaagtgtatactttgatttagaagatttgggtaacacaacaggacaatgggatgtgtatggatctgatgctccttctccttataacccacttcaggtttttgtacactcttaaatccttagatctatatgcttcttcaaattctaagactttgtgattatgttgcttgcagagcaagttctttgagacatttgctgctcctttcacaaagagaggtttgcttctcaaatttttgattcttggaggaggctctttgcttacatatgttagtgcgaactctaccggcgatgttcttccgattaagagaggtcctcaagagccacctaagctcggtcctcgcggcaagctttaaattagctttctaaaatctttcaaaaagtcagaaactttctccccaattctatgaaccctatttatgtatattgtactgtgttgtgttaattgctttgtaagctagtgattctgaaaatcagttatgatgaatcaatgaaattgcatttcaagtctgctacaacaca

SEQ ID NO: 148779 - DNA, 216 bp, Arabidopsis thaliana landsberg
actatgtatcgttacagcagtagcagtgcatctccatgaaactttagagacttccaagtaaaggtggtaatataattgagggattgctttcttgttatgtgcttagtgactcaattagccttgttgtatttttgattgttatatcttgtttgtatcacctgaagtatttcactttctatacgagcttttaccgccttttttacttattgaaaaata

SEQ ID NO: 148780 - DNA, 385 bp, Arabidopsis thaliana landsberg
tgttccggttataatttatttgtcttgaataagaagaaggcttccaagaggcaatgcataaggaaggatggagtttttcattttcatctccaagactgagttcagttcaaggctctgatgatcctttctatcaagaacatatgtcaaagagttccagatgcagtagtcccggttaaggagtctaaaactggtactagatcagaacccaaaccaatgttcatagcaatccaatccatgtaatcttccttcacatttcttgtacatgtcattttctctcttgttatacctaactgtaagagaaaatgtccggttcggattttggtttagttttaaatgtgtataccggacaaaaactatggaaccatactaattaatatctcgaaga

SEQ ID NO: 148781 - DNA, 988 bp, Arabidopsis thaliana landsberg
gttatcagctactgccgtcaatgctccaatggtggctcctgaggtcttgtctgagttgactccttatattgtcttagctgagaagcttgggaggttagctgtgcagttagcatctggaggtaaaggagtacagtccattagggtggtctatcggtcagctcgtgaccgagatgatttggatactagactacttcgtgcaatgatcacaaagggaatcattgaaccgatctcagattcatatgtcaacttggtgaatgctgatttcatagctaaacaaaagggtcttcgtattagtgaggaacgaatggttgttgattcatcaccagagtaccctgttgattccatccaagttcagattttgaatgtggagtcaaatttcgctggtgctgtctctgatgctggtgatataagtattgaagggaaggtgaagtacggagttccgcatttaacttgtgtcggatcatttggtgtggatgtgagccttgaagggaatctgatactgtgcaggcaagtggatcaaccagggatgattggacaggttggtaacatacttggagaacaaaacgtgaatgtgaatttcatgagtgttggaagaacagtgttgaggaaacaagcgataatggcgattggagttgatgaagaaccagacaacaaaacacttgagaggattgggggtgtttctgcgattgaagagtttgtgtttcttaaactataaagtttgagatggagttgcattgtggtgtatgaagaataaaactgtgacccggattaaggtgttttatccagtggttgttaagctgtagagaatctgtggtgttgcgagcgagtgtgtgtatcttggtattattacattgttcttgttttgctttcttatggtatgtaatgcctttggttaatgtcatgtttctcttgtaaaatgcttttgcttatattttacgatgaaccgttggacttgaaaacaaaattcctccatcactactcaatggat

SEQ ID NO: 148782 - DNA, 1000 bp, Arabidopsis thaliana landsberg
gctgaatgcactggcattactctcagccctgttcaggccaagagagccaatgatctcgcgactgctcaatcactctctcaaaaggtagctttggataaaacataacctttcattttgtgaaaatttcatctaacgtatggacattggacttctaggcttccttccaagttgcggatgcgttggatcagccattcgaagatggaaaattcgatctagtgtggtcgatggagagtggtgaggcatatgcctgacaaggccaagtttgtaaaagagttggtacgtgtggcggctccaggaggtaggataataatagtgacatggtgccatagaaatctatctgcgggggaggaagctttgcagccgtgggagcaaaacatcttggacaaaatctgtaagacgttctatctcccggcttggtgctccaccgatgattatgtcaacttgcttcaatcccattctctccaggttattatattccctaacctttgctgccgaaaacattacttaactggagttttttactaaactagaatctgaaatatgtgtttttaggatattaagtgtgcggattggtcagagaacgtagctcctttctggcctgcggttatacggactgcattaacatggaagggccttgtgtctctgcttcgtagtggtatgaaaagtattaaaggagcattgacaatgccattgatgattgaaggttacaagaaaggtgtcattaagtttggtatcatcacttgccagaagccactctaagtctaaagctatactaggagattcaataagaccctaagagtagtgtctcatgtgaaagcatgaaattccttaaaaacgtcaatgttaagcctatgcttcgttatttgttttagataagtatcatttcactcttgtctaaggtagtttctataaacaataaataccatgaattagctcatgttatctggtaaattctcggaagtgattgtcatggattaactcatatttacatgctttagca

SEQ ID NO: 148783 - DNA, 562 bp, Arabidopsis thaliana landsberg
ccgagcacgtaagaggggcttttacatttagcaatcaggtaacttacctatttaaaatcgtagtttatacgtatattatcattttatacataaatttgacttatttattctaacatcaatacttcacagcttttgcaaaactgtggagttgcagtcgtatattactttggaaatttcttgtcatggagaactttagccataataggtgattcattcccatcaactatcccgattttaaagattcatttctcctgattattattttatttgccctaaactaaaatatagatatctaattaaccaggtagtattccatgttggatacaagttattggtttgttcttcatacctgagtctccaagatggctggttagtcatataaatcaatcgtgaaaaacttatatccatgaacatgattgttgtaatttgtaagtaaatatataataatatatgaacataatatttacaggcgaaaaaaggtcgtgataaagaatgtgaagaagttcttcaaaagttaagaggaagaaaatacgatattgtgcctgaagcttgcgaaatcaag

SEQ ID NO: 148784 - DNA, 228 bp, Arabidopsis thaliana landsberg
gccttgatgaagaacgttcttgctttgttgttattattatattgtactctacaaatttcttctctacaccacagtacaagtctctggttcattagtttggctctatgttcttgtcgttgaccacaaatcgtgtagagtcggtgtcctgtcctgatgatatgaagctgttctctcttctttattagttgttttgcacttttaagaacgtcttagccttctggaatccgc

SEQ ID NO: 148785 - DNA, 311 bp, Arabidopsis thaliana landsberg
aattcatgacgaggatactaaaccggtccggtttaggagacgatacgtactccccacgttgcatgttaacctctccaccaactccatcaatgtacgaggcgagacatgaatccgaattagtcatcttcggagctcttaactcactatttaagaaaaccggaatcgaaccgagagaagtcggaatcttcatcgtaaactgcagcttgtttaacccgaacccatctctctcgtccatgatcgtaaaccggtacaagcttaaaaccgacgtcaaaacttacaatctctccggtatgggatgcagcgccggggct

SEQ ID NO: 148786 - DNA, 224 bp, Arabidopsis thaliana landsberg
ccctaaataactgcacaagctctgcctccactggcttctgtttaaatccagcccttatcatcctcacttgccattgcttgtacgtctcaggtctctccactctatctactccttcacatgctatcacattcatcacttctctcccgtaaaactccccaaaaaatgtatcctctccgggttttctttggacagagtcgcaccaaacaagtcaaagagtgccgagt

SEQ ID NO: 148787 - DNA, 158 bp, Arabidopsis thaliana landsberg
aaattattactataggctatgaggttgagatgtagacgttattgcatgatctatgcagcagattggccggtcatatattagtaatttgacacaaaaaaacagctctttcttgtttccaaaaggtttcaatcaaaacgctaaagtcaaacaactctcct

SEQ ID NO: 148788 - DNA, 885 bp, Arabidopsis thaliana landsberg
  unsure (1)..(885): unsure at all n locations
aaaccaggtacctgcgccttgaaaccctttatccgaacaagaattacgttatcaatagctatgaaacaaaaaccgattctggcttagtgaatggttgtgtgactggaaaataaccctgaagatgtagactactgaatcttgcttgatttgatgattctcagatgttttttttaagtttnnnnnnnnnnnnnnnnnnnnnnnnnnnnnnnnngggcatttgttagataaatttgtaaactctgtttaagtttcaaccttttaagtatttgtgttgtttttgcattagtgattgattcttctgaacttccttcttcttctttaatgataaaagctactttagcttcatttgtgttaagttctgaaacagagtgttttgacttgatttggtgatgaccacgttagaactcttagaatttagattattataattattatcatcttccataaacataaacaccccacactttaaaacacaccaattgaccaacaattaatcaacactaatacaagttttaacttattgacataacacacaacacaaactcatctttctttctctgcttcacttgaatctcaaatccatttttagaaagtctctacggctgctgtaggactcagttctgtaactgcagaagcattcttcattgctgcgaaccgtggctccttgggctgaaacttgacccctgcataaagcttcatgtagtcatcaaagacgaaactcgggtactcggaatctttctcgacaagcgaagtagctggtgagatctcggcatcgcttcccgggttgtaaaacgatgcaaccgacatcctgtttccttcttgttgagtcaccacacggtgcagcacactcttatacttcccgttggttatcacctacagacaatt

SEQ ID NO: 148789 - DNA, 228 bp, Arabidopsis thaliana landsberg
aatatctggtttatttctctggagagagatcaggaacatcttcctcaacaacttcaagaattactacggattggaagagtgtgcgattatttgttattccgtctcttatttatctgatacataacaatgtgcagtttgctacattgacttatgtggatacgtccacttatcagataatgggtaatttgaagattgtgaccactggcatactgtttaggtatctgtttt

SEQ ID NO: 148790 - DNA, 100 bp, Arabidopsis thaliana landsberg
gaaacgccgaagctgacttcttcttccttcttccacgcgttctccaaatccaaatgcacactcgtataaattgatcgaagacgatctcaatcaaatcaat

SEQ ID NO: 148791 - DNA, 336 bp, Arabidopsis thaliana landsberg
aagagacgcattgtcatcgttccattctcgatccttaagtactccacggcgttccatgtcccccagcagaacacctcgaaagctaccacaacagacaaaacagagcattttaggtaaagaaacagcagtcattcaaatctcaatgcatgacattttaggtaagaaaataaaacatcagatcttgtaaaacacttacgacatggattaaatggatggttaaactcaaagtaatgctttctcttcatttttttctttcccttcaagatcacttgtggatccacatatgatctcctgtaaccaatacatgtatagcttcattaggattcattcaccact

SEQ ID NO: 148792 - DNA, 439 bp, Arabidopsis thaliana landsberg
ttgatatctttttcttcatcatatcagcccagcccaagatcgtgccatcagggtcaatttcaaagagcttctctacaatcttggtgtaggcgtgttcatgacgcctctcatcagcagcaatggtgccacaaatcttcccaagtgtcaagtctccaagatcctttgccagtctagcagtgtttccatgggagatgaatgtagctctttcttgaaaagaagtatatatgaatcccaagtaagggttgttttcagtttttggatcctacaaaacaaaacacaatcaatacgaccaaaaaaagagacttgtaggtttagcctttataagaaaagctagccatcttattatactataagagcttaccattccagaaccaatgaggtattgaatagttttttcaatctgtctcatgtctactcgtccagacagataaaggtactt

SEQ ID NO: 148793 - DNA, 969 bp, Arabidopsis thaliana landsberg
tgtaactttttatgagagtttgttgcatagccgaaaattttgacttacacgccggaatatacctaacgaaaatggaaagattcatagttatccacaaacattaaatgcccaaaataaccttgcacgtcattctcaacataagaagatggtaaaaatttgactatatgaggttaaaaaaaaagaacagacaaaagaagaagagaatcttatacgaagcaacataaataacatttctggtttttttttagttttaataaaagaaattaaatcatatttttttcttcattttcacgtcacctgagagccacttccgtcaccggagttacgagccaacgcttcagcaaccgtcgcaagtttctgcaaattaagcttcacaaccgtatcagcaaacatacgagtatcatcctccgagtttccttccggcatatcaacgacgtacgattccaaaaccaccgtccagatccgattctctttctcgaaccgatgcaccgtcgtaacagatttgtaattagtcagcctatgttcgcctccgatgatactgaatccggtaactctccgttcgtcgtcgagtatatcgagtctttccgttgatgtgttcgccggtaatccactgatgacgatcacgtcgcgcgtgcatccgacgcgcatctcgaagttttgttcgacggagcaggatttgatgaagtgtttgtatgtttgtggtttgtcgaatcgtcgtacgattgaccagacgagttccggaggcgcgtggattcgttgcgcgtggagtgatgaacagcttcctggatcgagttggtatgtgtggaactcggcgatgagttttttagttccgatcgttcttctggtgttaactccgaaggcatggttgtgatttggatcttttttttttttttgtgaagttttttttgttttgttttatttatccaattggtttgagattcaccattgaagacgtcgacgagcttttag

SEQ ID NO: 148794 - DNA, 399 bp, Arabidopsis thaliana landsberg
gtgtctctatctatgtcaatgaaccctagaattacacttcaccaatggcagattctttatttacacacccaggacaattctaataccttataaaaaaaaagctctgttaaaaataagatttgttgtaaacaaaccaaaaaacagaatgattactactagagtactagctagctactgtagaatctatacagcgaagtggttaccattgatggatccttcatttataatagtcgggttagattcgatccgtggagttacggtctctactgatgtgacacgacgctctattattgttgttgttccctgttctattgttctgcgacgaagatgaagatgacgaggaagagaaaaactgaccaaagactactgaaccacctctgattgagcaaacgggaacgt

SEQ ID NO: 148795 - DNA, 139 bp, Arabidopsis thaliana landsberg
cagtagatcttctcgagagatatgcgacaaagaatcgtggcatgattacatgtatggctgctgggaatgatgtaattgttcttggaacaagtaaaggatggattatccggtatgatttcggagttgggagttctactgg

SEQ ID NO: 148796 - DNA, 228 bp, Arabidopsis thaliana landsberg
tttcggaaacaattactatcccttttggttaattaatctcagtttctttacatcaaatttcaacaatttctatgtatcaccaacacacgaatctgctaactaatcaaaaacaaaaactaatctattttcctcataatacttttcttagttttggacttggatttggattgaagtttacgcttcgaacttgaatcactctgagacttcttcttcatcacagtaaacctt

SEQ ID NO: 148797 - DNA, 441 bp, Arabidopsis thaliana landsberg
agcactatacggtcgagctcagggacatacagctgattcgaggcggcgcgtgaaggaacactgaaggagaagccatcaccggcgagaatagaacgggcgatctggacgatgactgtctctatctctgtctgcacggaggagagtgagagatctgcgacttcacggcaggaagatgagagagagaggtcagctagggttagtggtttcgatgaagaggaggaggcacccccggctcccgcggcggctttgatagaagaggaaatatacgatttgagaagctccgtgataacgtcgtctgattccagaatgcttttgaaaggaagttcctcagcctcgtcatcttttgatcgctttcgcttcttcttatccgccatctgtagatagcgacgacgacggagacgcggcggcccagagagttctggtactaacaatggcgggaaa

SEQ ID NO: 148798 - DNA, 70 bp, Arabidopsis thaliana landsberg
  unsure (1)..(70): unsure at all n locations
ataaacgaaaaacataactgtgttcagatctcgaatatacatttccaaaacgtgacaagtntgtgttttt

SEQ ID NO: 148799 - DNA, 220 bp, Arabidopsis thaliana landsberg
caggtggggttgtcctccaagcaagtttccatggacttacagtgcaaaggagacttgttatttactacaaggtaaagtgaaagtgtaccctaatggatccgatgaaggcgtagagatcgaagcaggcgactttgttgttttccctaaaggaatgagttgcacttgggatgtctctgttgctgttgacaaacattaccaattcgagtaaatggctggtatc

SEQ ID NO: 148800 - DNA, 233 bp, Arabidopsis thaliana landsberg
catttttatttaataaaagacgactattatcatcattattattttgaaagtggagaacaacggacctacttattttgtgagatgatactcctatatgaatatgatgatttaagaaacgtagcataaaaataaataaaagtttaccaaattagggagaagttgaatgggaagggaatcagagagagatacgacgtcggatccggaggtaaccaaacttgccagctccaggtgac

SEQ ID NO: 148801 - DNA, 711 bp, Arabidopsis thaliana landsberg
tgaacgattgaatcttttcttcttcgttggttccaaccctaatctagggttactctctctctcgcttccttgtgttcttcgttcttgccgatttccacgagcattagcttcagagaccttgaattggagtgcgtttggatcaaaaacagttgagcgaagatgaggattatgattaagggaggtgtttggaagaacaccgaagatgagattctcaaagccgccgtgatgaagtatggtaagaaccaatgggctcggatctcgtctcttctcgttcgtaagtctgctaaacagtgtaaagctcgctggtacgagtggctcgatccatctatcaaaaaggttagtcgtgttcgcgtattccttctcttaactagtagtgttcggaacaaaactatggatctggcgaacatttttttgtttggggatttggccttttaggtagtttgttagcttgttactaggtgctttagttgtatatatgtattgatttgcatctggaaattcataaaaagtgtaggcagaaatgctaggagttttggagtattcgaaggttttcttatgtttttgaattagaactgagtttaattttgtgatgttaatgtagactgaatggaccagagaagaagatgagaagcttctacatcctgctaaacttctgcctactcagtaaagaaaatattgctcctattgtgggtcgtacaccatctcaatgtc

SEQ ID NO: 148802 - DNA, 908 bp, Arabidopsis thaliana landsberg
gggtttcctcacatagcaaaactacaaaccaataaagacagcctcttcttctaacaaaagcaaactgaaccaagaatggagtcgctgatcaagtcccagcacgctcagcaactggcgggtcacaagaatacgaccggtaaaactccgtccatggagatgataccggcgacgggacttgcgatgtcatcggacgaaagcatgatgctgaagctgattcaacaaactcactccccagatgctcgcgaagtccaagtgcgtggccttctctctctcgttgaagatattctcgatcgtgccactcttgactctgaagacaccaacgcctccgttagtattcctacacacaatcaatttcgttcttagtacgtacgtatgatcatgttcctttacgtacttgctttgatttttcagatgcttccgttgcccactgaggataaactgatgcagtcaagcatgatgagcgttcttgatagtgtctcctatgctatcgatcgtgttgcctgcgaggtatagctacattcactttttgtttgccacaattcaagtgattctttgtttagacttttttggctcaccaaaataacatccaagttattaggtttcgttcgggctaaattcggtgtgttttggttcagtttcaggatattcagtctaaatataaatatgttgaccatcttggttcggttaggttgcgcagtttccacctacccctagatatcaatctttgtggttatagatgctcttataaaccacactctctaaagattgttgtacacgtaaccagcaataacttgttacagaagcaatacactgtttacgtggttctctctctgttcttcttttcagatagcctataagtctctgacgggatctgattcacacgaaatcacaatgtccgtgttcgaaca

SEQ ID NO: 148803 - DNA, 303 bp, Arabidopsis thaliana landsberg
  unsure (1)..(303): unsure at all n locations
tcttccatatcctgttcttatgagagcttgttaaagaaggatgaatcagttntttttcaagttatgacttttcgtagctgtgtcttttcctcgagtctctgaaccccttgagtgaaatgttgtgagcataagtttcgtcctgttacccagaacattactttttgttcgtgcgtcttccaattctcagtatgttttttctttttctcttagcgtctttcttttgccttgttggtcaacccattgatgttcaaacttcaaagtaaataagggtcagtctacccagcgggagaatcattgatcttg

SEQ ID NO: 148804 - DNA, 380 bp, Arabidopsis thaliana landsberg
aagaaaaaaaaatattgatttcattttgttgattttctacaaatacataaatcatttccagaaaaggaaaacagcatcaatttaagcctagaaaaccctaaaaactctgtcgaaagaaaatgagaaaatttaaaagaaaacaaaaataccagcagagtcataagagcaacagatgacgccatggcatttttcttacctcttcctaaaataaaattaggataacaaacataacaaacaaatctaaactaacataagagagattctattggaaagaacccaaacaagtctcttacgatatctgttatcatgactctttgttgttgttgttgttgtcgttggctaccaccactactgttgttcttcattaaacgtggacctta

SEQ ID NO: 148805 - DNA, 416 bp, Arabidopsis thaliana landsberg
ctctctctttctcgtgagcttcaattcgaatcggccgttcttcttcttcttcctccaatctctttactccaatggaagaagacgatgagttcggagatctatattccgacgttctccagccgtttcaacctcccgttgttctccctcctccgcctcctcttcctcaccgttcaatcgacctcaacctccgatcccaagatcaagacgtcgcagaacctaattcagctccaatctctagggtttcggacagcgatgccgtaaaattatctactcaggacgcgactcgtcaagcaattgtcgatggtggcggcgacgataaggatatgagctttgatatcgaagaacccgatgccgattctacacctacgattcctggtcttttcgttactggagcgttacctggtttggctacagat

SEQ ID NO: 148806 - DNA, 569 bp, Arabidopsis thaliana landsberg
  unsure (1)..(569): unsure at all n locations
actgatggttcattggcgtgtgttgcagaaagccntactcgtttcacgctgggtgaagtatgtgcgctaanagcgtttaaccttttgaatatagtcttttttatccaatctctgggaaaaaagtaacaagcttttattgatgtggatgcaaacagacgaaggaagagctgttacaggttctgggactacaagaagagaaaggaagctcactcgagttcctgcgcaggggatacaaggtttagcacattgtctagattgtttttgtctctttcttgtatatgcgcatagaagcttaaactggtccgaaactgatggtgttgcagtcggcaacttggtgggaagaggatgtggagctcgaggcatcatctaattggcgtaactgaacgatggccaagtcatggattcacacttttggtaagtttgttaagtctctcaagattgagatatttacacttgtatatgtgcaaagttggtagagagagtttggcagatgttcatgggaatgattaaggatagtttaaatatgtaatctatatataactcagtccaattatgatagtgtgtgctcc

SEQ ID NO: 148807 - DNA, 117 bp, Arabidopsis thaliana landsberg
cgaaatgtatttcttctgtttaaatttttattatctgtttgaaagatataatacggttgtgacatgaaaaatggtatggttgtgacaatattcaaaaacaatattcatttttttttt

SEQ ID NO: 148808 - DNA, 586 bp, Arabidopsis thaliana landsberg
ataaccaaaactaaatcaacatatgaaacaaaaaaaactgagagatcttgatatcacaagtcactagaaagaaatacaatcgcactaaaccacaaataaagccacttaactgcaatagcacatgttgcaagaaaagggagtctaagttcaaaaccattgtgcaagcacaacacatgaaaaaaacgaaacaaaagcttagatagagcaatagaagtgttctgggacctgttttgaaagaaactaccacactacctcacagttacgatgtcatcaatcttcaaaatcatcctaacgcattcagttgctaaagtgatcgcactggtactcacaagcaggggctgaacaacattttcctccaagatgttagtgatctgtcctttcctcacattgatccctgcgttgatttccccttgagcatgcttgttcctgagttcagtcacaatggcgatagggtttaaccctgcattctcggctagtgtgtaaggaataacttcgagagcttcagcaaaagacttcacacagtaaccttccatcccatgtagcaccttagcccaagcaccgagctgccttgagagctcaatctctg

SEQ ID NO: 148809 - DNA, 501 bp, Arabidopsis thaliana landsberg
tgagtacaatcatttcatttcatataaaacacatgctagaaaagagcgcacagagaaacaatgttaaagatccaatgtatatgacatattaatggaatgtaatgagcgaaaacccctaaaatggttgctatgtgttgggacaaaaacaacacatgacaaataaatatcagagcccaccacttttgaaagcgcaaagaatcttattcctaacatacacaaatgatacaacaagaggagattaagacatttacataatgacccctccctttgtgttaaaaaggggctgtgttacgcatgttatacctcaccatgactccttccagtctaatctatcgagaccgtccacgattgctctgcgaaactcatcattgtgaagtataaaggaagacacgtgtccacctgtgacccatctcacttctgaaccaggccacgccttttgaagctccaacactgagtgttttggtatgtatccatcatcctacacaaatcatataatcagca

SEQ ID NO: 148810 - DNA, 89 bp, Arabidopsis thaliana landsberg
gtctgatccaacaagaaggtgaatatagagcacatgttcttcttcatcatgcagccctaccaaactctcaaaggtcagataaaatcttt

SEQ ID NO: 148811 - DNA, 291 bp, Arabidopsis thaliana landsberg
catcagcaacttccactcttcttcttctcttcaatcattctctctctctctttccctcatatacacatcaacacaacacgaagacatctctcattaatggaagtttcaacatcatccatgtcttcaaaaccagaacaaatgcaaaacccacctcctatgatctcatctcctaggtttcagcctcagataatatctcctcatcatcatgaccagcatcaacatctctcaaatcattatccaacaacttttgttcaagctgactcttcttctttcaaacaagtcgttcagatg

SEQ ID NO: 148812 - DNA, 440 bp, Arabidopsis thaliana landsberg
tttatataatgcaaatctcatattttcatgaacaaaaaattacaggttttgattaaaaactaatcaaaatgtgaatactgaagattttgtctacaaaacaaaaaggaagacttttactttaaactccatgacacaaaacagagctcccttatttgaaaactttacttcgtctgtctcatcagttatcttctccaagagtaaacttcacaaaccttctgactttgatgttttccccaagagtagccactgtttgcttcaccagatccttcaccagaacactgtcgtctttgatgtaaggctgctcaagcaatgcccattctccaagcctctttgagattcttccttccacaatcttctcccttatgttctctggtttcgacaaaagatcctctctttgcatctcaatctctttttctttctgctttatctcctctggaatg

SEQ ID NO: 148813 - DNA, 339 bp, Arabidopsis thaliana landsberg
tggtaataaagagattcgtaactgaaagtttgaaacttttttttctccccacatgaagaagactaaacagagagagatgattattactgcacaaagtaaaaagacaacaacaaatccacatgaatattacacaaactttttatctcaacaagtctttcagtttctcactcgctcttagcagcttcagcttgtctagctccaacagaaaataactctgtgatgacttcaagtggcatgcctttagtttccgggactctaatgaacacaaagacccatgatatgcaacatacgattgcgtacattacaaacacaccagctagtccaatgcatttgagcagc

SEQ ID NO: 148814 - DNA, 203 bp, Arabidopsis thaliana landsberg
attttcttgtatgttggaatggatgccttggacattgacaagtggagatccgtgagtgacacaccgggaacatcgatcgcagtgagctcaatcctaatgggtctggtcatggttggaagagcagcgttcgtctttccgttatcgtttctatctaacttagccaagaagaatcaaagcgagaaaatcaacttacacatgcttta

SEQ ID NO: 148815 - DNA, 485 bp, Arabidopsis thaliana landsberg
  unsure (1)..(485): unsure at all n locations
tctctcctgtaaacgaaacaaagaaatggctggacaaaagcnnnnnnnnnnnnnnnnnnnnnnnnnnnnnnnnnnnnnnnnnnnnnnnnnnnnnnnnaagaagaagtaaagcaagaagatcaaacatacagaggaaaatcatgaagtcgaagaagtgcctcaagaggtcactaatggtgtagaggaagagttgagtaataaagagaagaagaagtaacgtaagagagaggagatagagtctgagaagaataagaagaaggatgtcccgcagaagaagcttgaagctgaggatttaggacaaggagagagtgaccaaccataggttgttgtgactgggaaaggtgtggaagaagcaaagtatgcagctttgaagacttttgctgaatcgaattcgccggagaatgttttagattgttgtaagactttcgagaagccgtctccgagtcagtcacatacgaggccgtttttgttagatgggcgtgatc

SEQ ID NO: 148816 - DNA, 281 bp, Arabidopsis thaliana landsberg
tgttctaccaatggcacaggatccatatcttgcctactctaagaagtgagattgtgtagtcttcaaaaacaaaccagagatgctaaaagaccagatcgtagaatattttttggtatagcttataaagtttctgttttgtttgtctaaatattttatctcccggccccttgaaccatattaatttcgggtgaagttaatgtgtcttgtcttccttttattatgtaacatgttatgtatatttttcatgttttataatagaagaaagctgaaagttggaaaca

SEQ ID NO: 148817 - DNA, 85 bp, Arabidopsis thaliana landsberg
gcaaatgcgcgaaacgtttttggaccaattctaatttctaaagtaacgcgataaatctaatgcattcccacaatctgtgtttgtc

SEQ ID NO: 148818 - DNA, 355 bp, Arabidopsis thaliana landsberg
  unsure (1)..(355): unsure at all n locations
aaattaaagagtaacaacattacatcatccatgactgtttatatacaactgctatgacgtcattttaaacttgatcatcacgaggaactagtaatttttctgtcccaaagatcgaacatttacacttacttacacatgagtaaaattgtacataggaagcaaatcatacgatctcaatacatccatgacaaatcttgcttaaacgagacagacgttgcagcaccatgaacacctcttcttgaaacctgaggacaatcttcaacaacaagcaactccaacttgtgagaaccaacaagtggtctcattccatcgtctgtcactcccagacattntgataacttcaacacattgagcg

SEQ ID NO: 148819 - DNA, 103 bp, Arabidopsis thaliana landsberg
gaagtacatagctctcattggacttgcaaatgaccatccccagcttctgttccttcctccaccaccatgacctttgttatgattatgatgatgatgatgttca

SEQ ID NO: 148820 - DNA, 284 bp, Arabidopsis thaliana landsberg
caactgagcaattgagaggaaaaagaaagtatgacatgtaaaaaaacagaagaaacagcagactgaataaaaatgaacgagaggactaaagcccggacaaataaactctacaaatcactactaaaccaccaccaaaactgacttctctaaccttttaacatcttaatttacacaccccctgatatcttcaagcctcatcgtttctcgtctatggctcatctttttctgtacacatgaggaacaccaggaggcagatgttacaagtgttttttggagcggtatgt

SEQ ID NO: 148821 - DNA, 237 bp, Arabidopsis thaliana landsberg
cttcgtttacaagtacatacacataaaatcagaatgatcattagatacaatagtgttacacataactcatacggacatataaaataaaataacacttgtagaacatatcccattcataagaaacgtaattagcctcttaaacaaaaaacgtaagaagctaatcttcatttttttttttctcattccacacaaattgtcccattaaacacacaaaaacgaggtacaattacttaacac

SEQ ID NO: 148822 - DNA, 631 bp, Arabidopsis thaliana landsberg
tttaattgaaatcagacttggtttaattagaatcaatcacaatagagaaaactggaattcttgtaggtacagtgtattacagatgcatcacagctaatagttataaatacaaacgtggtgtgttgttctgactcttatctacaaacacttaatctggacccaaccaaccataaacaaacccacactggtccattggtccacatagtctcttaattcggtttctttagcaattcttcataccacaatccatgaacagaacgtgacactgttgccacaagaacaagaatgtctgaaacctctatgaccttgtccgagagagaagctgctccgatctttcttagcattgtttccaccaactgctttctcttcgtgttgtttccggccaaaaccgcggctctaatggctaggtatatggtctgtgatacatgtgtgaacactgcgtctcctgcttgtaagcttttcacaagcatgtttgcgattacttgtttctttgtctctgcatcgttagaatcaagaagctcggagagtgtttccatgatttctgaaagacctgcatcaggttttgcgtctagcatctcgtaaagacggtttatgcaagtccgtgtaatagcctccatgtcaatcgaggatg

SEQ ID NO: 148823 - DNA, 590 bp, Arabidopsis thaliana landsberg
ttcgatctcatcattatccttctttctctccatggcagaaactcctcaaccgtatctcatcttcgtcttcttcgtcttcactctaaccgttgctacacaaaccaccggttcggttaagtgcaaaacaagtttgctccgttacccgtttggtttctccgacggttatccgatccgattcaactgctctgagataaccggagaggccgtgatcggtgaattcgctgtgcaagaagtgacaaactccaacatctacgtcgaaatcccgccggtttgcaaacgcaacatccgtaaaatcgaacaacttttccgggaaaatcttgctccgtcgaaattacagaacataattctcgtccaaggatgcaagaaacagaacaagtcttctaattgcttaatccgcaataaattcgttgaaaaccggttaaatctcagcaaatgtaattctccggttagctgtctcgacggagcaacaacgacaactgccgatgtgatgagtttaggcgacgttgtgaacggaagtggatgtaagtattggttctcttctatttctcaatcgcaagtttctgtcaatttgggtcgacttaagcttgatt

SEQ ID NO: 148824 - DNA, 286 bp, Arabidopsis thaliana landsberg
tcaacagataaaagttttgatcttctaagaaacatagatcccaagttaaaattaaataacaagtcttacaagttatgattcatcaaattattatttttgatttagataagatacatgagcataattttcatgacaagaaaacagaaacataacaaacaaagatagatgcacggttctcctgtctttaacctctctctaagatgataagaacatacagcaacattaattaataatagccagaaccagatctgttttattcaagcgatcctcctcacttcctcaccta

SEQ ID NO: 148825 - DNA, 458 bp, Arabidopsis thaliana landsberg
ctcatcttctcttccttatctccttaaaaatcttcccctgttttcttttttatatttagagctcctctgtttcttctccaataaccaaaaaaaaaaaaaaactcttcctctgtttgttttcaagttctgacatcataaattcagaccgagaaaacataaaaatttgagtcttttgatgatcggaaactgatgactcccgttctctgcgaaatcctgctctctgggctcacggtcaaatctgctctctgccgtagaacccatctcgttcaatctttctcagtcgtcttcctcaactggttttacaacgtttcatgaattgctacaaactctaattaattttttcagacagatcataaaaaaaaaaccaaacataaaacataaaactctgtcctttttttgtcttcttgtaacttttcttgttaaaaatcaatggcgtacatctagcagcgcattttaga

SEQ ID NO: 148826 - DNA, 134 bp, Arabidopsis thaliana landsberg
tcttttgtatactcaaaatgctgtaaattggatgcaatagatcaataaaggtccaagctttgcattctttaactcggaatatgaactagtcctgtacaatcaacttttggtcaataaaggtcaagactttttgc

SEQ ID NO: 148827 - DNA, 409 bp, Arabidopsis thaliana landsberg
cccggggaagctcttttcaatggaggtccttgcgagctcttcattatccccaatttcttttactaagcctaacaaaataaaccctaatttctcaatccaggtacttttctttcgtatagttgactcctttttaagtttctctcctgcaattccccaatttgtgtccgtttagctgtgtaatagaattttcaacctttgcaggtgaaattgtgggtaaaacaacctccaaagatttcaaaagctagcaaatttagttatgctcgtagtcgtagtaacatttcaaggagcaatgcagcaaacccaggagtcgtgttcgtctgtaatagattcccgtgtgttatcgaaagaaatgatcagaggaaataatctgggaaggttatgatgaaatcttctgttaatttcagacaga

SEQ ID NO: 148828 - DNA, 445 bp, Arabidopsis thaliana landsberg
atccattttaaatgtaaaagatcacactttacaaatgccctttcctatatttgcccatatttgagaatacagctgatgctcatagtcatagctcaaatcataagaaagttcacgaacagttcacttcattgccacactgtttgctgcaatccgcatcacttactgctgttacaagcccccttctctgcatatcaagaagcaaatccgaagcagcggccatgtttccctccttttcataagctctaatcaagagatcaaaaacagccgaatcaggacttattccgctattcaacatttcatcgaaaacttgtcttgcctcaaccatcaaacccttgctagctagcccgtaaatcaatgtagtataggctaacaaatcaagcaaaagaccttcctgaaccattctggtttttaacttaaacgcatccaccaaattcccttgcttaca

SEQ ID NO: 148829 - DNA, 319 bp, Arabidopsis thaliana landsberg
aacgagagaaaaagatatactatcgatcaattgagaaaaagggtctgtacggtttagtaatgctaatgtacttggtgggtagtggctttagtcaaggtataaataaccatcccatatatatatagattaaattactataatcttaatgaatattatctctttgattgatgattcattgattcaatgtgtgtacgtaggggaagtgacatggttgagtaacgaagttgaatggcgacttattctgaccacgactcaacttcctatcgtggttacggtaacatcctcgttgtgcgatgaccggtgcactatattggatgat

SEQ ID NO: 148830 - DNA, 953 bp, Arabidopsis thaliana landsberg
ccctgtcgaataacaaagctcaacttcagaatggttgcatttcttggtgtagcttctacagtcttagttcagacacaacaagatgtttactctctccatgtttattgttggttcagataaaggagaaggatactgcgtggttcgtaaagttttgtgttccttggtgtaaacactggttagtatccttgtttcataaaattacctaacaacttagcagtttggcttgtttatcccttgttgataaactggatctgagtgtccagcaagaaactggggaatttgtgggaagacttgggaaaagcaatggagggagacgatgaaattgaggttggtgaagtagactgtggtactagcagagctgtttgcaccaaagttgaaattcactcgtatccaacggggatgctattttacaatggagaagaagtttcgaaatataaaggtaaacttgcttaggcacacacgaccaccacatgcatatttggactttttcaatcctttagtttagtaatgctataagtgatattttttcatacttgcatttgtgatctcaggaaaaagagacgttgaatcgctcaaggcttttgttgtagaggaaactgaaaaggcagcagaaaaagcacagcttgaagacaaggaactgtgatacaactagtcggtgattattagaacctgatacattgttccctttggttttcattttgcctatgcagttgtgtgactcttaccgttagttagataggcatggttttcagcacgatggaggagcatctttgggtttaaaggtttttcacaccactgttttgctaaaatattcagtttccattttattcagagtcagataagcaaagacgtaagtgtagttagtcgagatttcttacaagtttgtgttgtatgttcgttttaagagcagctgcagaccaaagttcttgctttaaaatttcatattcagtgaa

SEQ ID NO: 148831 - DNA, 548 bp, Arabidopsis thaliana landsberg
tatggttactgagactggatggcccaccaaaggttcaccgaaagagaaagctgatgcgtcttctgacaacgcggagacgtacaattaaaacataatccgtcatgtagttaccaaccaaggcacacctgcaaagccaggagaggcaatgaacgtttatatattctcattgttcaacgagaatcggaaagcgggtttggattcagagagaaactggggattgttctaccctgaccagacaagtgtttatcagttggatttcacgggaaagagcaacgggtttcactctaattcgagtggtacaaactcaagtgggagtagtaatagctggtgcattgcttcttctaaagcttcagagagagatctgaaaggtgctttggattgggcttgtggtcctggaaatgttgattgcacagctattcagccaagccagccttgttttcaaccagatactttggtttctcatgcttctttcgtgatcaatagctatttccaacagaacagagcaacagacgttgcttgcagctttggaggagctggtgttaaagtca

SEQ ID NO: 148832 - DNA, 622 bp, Arabidopsis thaliana landsberg
aatgccggagattgaacaagacgatgcagcggcggagacggtggattcctccaccgttaaattcggtacaccggaagcactggagtatgtacggtcgctcacggacgttggcgcgatgacacgtcttcttcacgaatgtatcgcttaccagcgaagcttagactcagatctcgacacgcttctatcgcagcggacggagcttgatcggaatctcgttcagcttcagagatcggcggagattctcgatatcgtgaaagcagatgcagatcacatgctcggaaatgttcgatcgacttgtgatctcgcggatcaagtcagtggcaaggtacgagagctcgatcttgctcaatctcgtgttaatgttactctctcccgcattgacgcgattgttgagcgagggaattgcatcgaaggcgtgaagactgctttggaatccgaggattacgaatctgctgcgaaatttgtacagagatttctccagattgatttgcagtacaaggattctggttccgatcagagcgaacagcttcacgcgtcgaaggagcagcttgaaggtattgcgaagaagaagctcttggcagcaatagaccagagagatcatcctacaattttgagattcgtg

SEQ ID NO: 148833 - DNA, 398 bp, Arabidopsis thaliana landsberg
cacccattaacctcactgtcgatatacggtcgtactttttcttctattctcttctctttgcccttttttttttctctttttcttgattcaatgattgggtccctctctaagctcaagctgctgtcatctaaattaattaatatgcgaaaataaaaattattgggtttatttttgttggaagttttgtaattttgtgtagagattattgatcagtttttggttgtgtacatttatgagttgtacttgtgccctatcctttgaaggttacatggataaacaagttaatgtcttgaatcggctgagtctttattatagaatcaatttgatgaataagttaaaaatttgaagctggttttaatattcgacaccaatatagcaatcaacctaactgaaattga

SEQ ID NO: 148834 - DNA, 479 bp, Arabidopsis thaliana landsberg
tcttttagtatgtctcaattgggtcagtcaaagtctccgtttttccaactcttcaagaggaagaaacaaggctctgctggttttgccgatagtatgttgaagcttgttaggactttgcctaaggttttgaagtacttacctagtgacaaggctcaagatgctcgtctctacatcttgagtttacagttttggcttggaggctctcctgataatcttcagaattttgttaagatgatttctggatcttatgttccggctttgaaaggtgtcaaaatcgagtattcggatccggttttgttcttggatactggaatttggcatccacttgctccaaccatgtacgatgatgtgaaggagtactggaactggtatgacactagaagggacaccaatgactcactcaagaggaaagatgcaacggtagacggtttagtcttgcagaggagtcacattgtgactggtgatgatagtcactatgt

SEQ ID NO: 148835 - DNA, 616 bp, Arabidopsis thaliana landsberg
ttacaaaacgaggattgctacatgctataaacatacaaaaatcaacaagctttctttgcaaaccagaaaaatctaatcagtattttgggacaattattgtttttcaagtgtcccatatcataacaatggcaatgacaacaactccaaacaacacagccaaaaacttataacgaggctcatcaacatgaactttcttgtttggtcgatacccttttgccaacaaatggttcacagacacatacacaaatatcccacacgccaagctcatcgacaatgcgaatatccaatccgcgatggacccttgagtcgttgcatcgatgactatcccgatggcaacaccaattgggctcgagatggcgaatgcgaaagaataagtgattgaggagaataaaggacggtcaggaatcatacggagaagagctattcccattgcaatcgctgcaaatatcttatggagtgttattgtccagagagctctccaagcatctgatttagtctctgaaataccaatagctatgccttcgaagacagagtgaaaacagagagctacgatcaatagaatgctatctccaatcgaagtttcagttgttgctgacctctgattcgatttgtcttc

SEQ ID NO: 148836 - DNA, 296 bp, Arabidopsis thaliana landsberg
aatgtaatgtaactgtatatattataacatgaagagtttggttatacataaaaactcctgttaattgcatgttttggtactctagataacacaaggatgtcaaaaagaaggaagaaaaaacaaacagatcacggaattgagggtcttgaaaaacagtaaggaaacttgatatgatcggtgaactattcgtggtatagatacaagccgagaccaaatcgagcacatgctctgcagaatgctatttactcaggtgcagtaactggatcctcgatgtgatcataagtcgaaggtactgt

SEQ ID NO: 148837 - DNA, 345 bp, Arabidopsis thaliana landsberg
acaatggccgccactgcatccttggactccttcggaagcttgatactgttcttcagcttctctctcttgctcgccaccgacggcgactcctctagcatcctctgaagacctccgccagctcttggatccaccatctccgccacaatctccttctgaaactaataattcacgagattcttcactgacagctgaagatacagagcaagactgtccacaatccttcgtaagactatcgtccagtaagatgctatcctcatcttcatatcgaaggcttgctgcaggagatgagcatgatacttccgtaggtgagagatcttcacaattccaccaaatccagtcaacgag

SEQ ID NO: 148838 - DNA, 369 bp, Arabidopsis thaliana landsberg
caaaacatgaatttccggggaggttgttgtattgcgaggtacggtggtagtggtggtggaaatgatatctcgaaggttgatcggattatgctccggtaccgtccgattgcaccgagacctgattctggtggatctcctgcttcaccgacggagaagaatggatcggtgataactaacgtttcgtcgagatcacggagaggtaagagaaaatattcaaaggagaataatagtagcagtaccggatccgttaatagtaacggtaacagcaaacgacagagaaacgatgagacgaagaacggatctggtggtggtagagagatcgtgacgttgcctcttcttccagagactcctgagaagaaagactcgccg

SEQ ID NO: 148839 - DNA, 308 bp, Arabidopsis thaliana landsberg
atggagctcatcaccagactcggctaatgctaatttaaatcgaggagggaggaaagggtgcatagagtggccaagaggtgcacataagaacagcttgaagacaaagctcatagaagcacaaatcgagagccaaaaggttcagctgaagcatgtccttgagcataagatctaggccacaacatattccaaaactaccagtcctaggccatactactattctttgtggctgagcagcagaactggatttttgatcccgttctcctgctattgccattgtcgcgtgatctagcgctggtcaagccaatcaa

SEQ ID NO: 148840 - DNA, 278 bp, Arabidopsis thaliana landsberg
tttgaatccgatcgttaagtacgttttaattatgtcgataactttatgaaagtaaaatgccatagaatacaaaaacatatgaaagaaaccaaacatgctatacgttaaaaaaaaggagatgaagtgaaatgtatatacattttcttattaacaggacataactttttttcttttctctacatacaatcttgcaagaaagtggacaccaaacatacacacgcaaacaaaacatcaaccaaccatcaagcaatcacaaaacccagtcaattacactcgga

SEQ ID NO: 148841 - DNA, 246 bp, Arabidopsis thaliana landsberg
aaagaaacggcaaaaatttatgctgaaatctttttttcttccttattctcctctttcgcttgatttcgccgtccgattatctctatcgccgataaatatccggcgtcactcagtagatcttgaagctgttgctttcttgctttgctcttcgcgcaagattctctttctctgttttcattgaggattcgaagttgatcgctatttgattcgattggttttgagttttcgatcctcgacggtgattga

SEQ ID NO: 148842 - DNA, 313 bp, Arabidopsis thaliana landsberg
tctttctccggaccttcagctctgaggatttttaaagcttttaagcgcttattggagttcttatgttcaaacgtgagtcttgtctgcctgaaaaagcttgtcttggcttggttctgaaatgtgactgaaagtattggttttaggcagattttgattcttcaattttttttcgttaagagggtttcgtgtatcagacaacatctgaacagagaaaagtatttatcttttctgttggttactacagaattggtgggattttattgcaaaaggtcaataaatggcagaccaaagctctgttgatgggattttagag

SEQ ID NO: 148843 - DNA, 633 bp, Arabidopsis thaliana landsberg
actctctaacacaccatgcttctctaatgcacaactctcattcctccatttcacacaatcagaacccatggattcttcaaacccgacccgtttacgaaaacccttcaccaccatcacctccgctttaatccccgcttcaaaccgtcaagctccaccaaaacaacaactctatcaaccattccgtccaccaccatcaccaatccctccaaagttccgatcactcgacaccgccggaaaaatcgaagtcctcgctgatcgtctcggtctctggttcgaatacgctccactcatttcctccttatacactgaaggattcactcctccatcaatcgaagaactcaccggaatctccggtgtcgaacagaacagtctcatcgtcggcgcgcaagttcgagactctttagttcaatccggtgccaaaccggagcttatagctgcgtttgacacaaatggagccgagcttctctacgagattcgtcttttaaacacaactcaacgtgtagctgctgctgaatacattgttgatcacggtttcgatacgaaaggagctggagatcttgcgagagcgattaaagatttaccgcatcgtcgtggcgacgttggtttgggagactttattataactacctgaga

SEQ ID NO: 148844 - DNA, 141 bp, Arabidopsis thaliana landsberg
gcaacacaaagatcacatttataagacaagcatgttttcttcaataacaattgcatctgatggaatcatcttatgtacaaacacaacaaatacaagatccaataaacacttatgactatttgtctctgactttctagatac

SEQ ID NO: 148845 - DNA, 338 bp, Arabidopsis thaliana landsberg
accaactaaaacatatggcaaggctctaatctcccactagagcatactatctaacagaattattatcactataagctaacaatcacttaccggcgatcacagagaacaaggtctccaccgtcgaagcaaataaagcaaacatcttcttccttgtcttccttcttcggcggcggtgggggtggacgaatatgcaacggcgtattagcctgtgcccttggaggcctcccccgttttcgttttattggggcagcttcatcaataactttaacctcttgctcattggacataggcacagcaaccgccccagcaaccgtggaggcaggtacagagagagcagg

SEQ ID NO: 148846 - DNA, 163 bp, Arabidopsis thaliana landsberg
ctctttccaaatttagaccaggggagatcttatcttcttctttttttggttaatgtgaatgttaatgttgtatgttaccactaccatagtgattgataatgtacctttgtttatttgttttcctattttaggaaagaaagagcattataaagtagattgaatt

SEQ ID NO: 148847 - DNA, 367 bp, Arabidopsis thaliana landsberg
aatgaaccgagtcgtttcatttctcagctttgagatggtttttctacaacaacaatggaacaaacactctcaaagtcacaggttacaatgtagaagtggaactctctctaaagatacagaagcataaagtaccgttatcttcttcgtgtcttggacaactatttactctattgaaagtgcggtgaggatcatccgatcattcaggtacgcattggtgcaatctgaaccaatcgtttgatagtaactcaacaattcgtctctcgagcctatcggaaccagaaccgggccgaaggatacccgagtcaccccagacggaacacgagctacggtttttactagaatctcctaaacaccaaccaccaggcac

SEQ ID NO: 148848 - DNA, 340 bp, Arabidopsis thaliana landsberg
gaatcagcaaaaaagtttgagattcaactgtatatataaagttgtatcaagaaacaagtacatgaatccattaaagagtcttgtgaaactttcttgagtgcaaattgcaaactagcttgcaatttttccaaaacatctttagaaagataaagaatctgacactttctctggtttttattttaagaagtgtgtatcttctctctgttcagttattgaaatataggaagatcaggcttagctggctcgggaccagcacttgtttctccaacagatacaatagtcttactactgcttgaagaagctccttgctcaatctctttcgtcatctttatgaaataac

SEQ ID NO: 148849 - DNA, 192 bp, Arabidopsis thaliana landsberg
ctctctttcaaggataataaccaaaagcttttctttttatcttctcctgcaattcttgaagaaatggatgagtttgttaacctcaaggaaacagagctgaggctgggattaccgggaacagataaagtaaatgaagcaaaagagagagtttcttgctgtaataacaacaataagagagtactatcaactgac

SEQ ID NO: 148850 - DNA, 342 bp, Arabidopsis thaliana landsberg
caaaaccatttttttaattttcctctctcttacacacacacatgataaaaagtgtttagagacagctcttctcttcttgttctcagtttgagagaaacaaaaccttccaatacaaccagagagtcgacgaagaagaaagaaaccatgtcccaacatcttcttcttctcattctcctctcgctacttcttcttcataaacccatttccgccactccaattattcaaaaattcaaagaagccccacagttttacaattctgcagattgccccttaatcgatgactccgagtccgacgatgacgtggtcgccaaaccaatcttctgctcacgtcgagctgtccac

SEQ ID NO: 148851 - DNA, 414 bp, Arabidopsis thaliana landsberg
cttttgaacatgagaatgaaaaatgtataagcatgcaaagatagtttgtacctgagacacaggacagcagtagagatgtctgaactccttgtgatgtttctcaatgtaactttctaatttaggaatatcttctctacggaaaatgtcccaaagagctccatcatcagtttcaacattttggacttgttgtctggaattttcaagaatctccatcatttcctccttgttagctactgagctatacagctccttgagatcttgttcggcatgcttctttttcagatttccaattccaggttgcatattgggcacttcagatatgtgcgtcaaaatattcacctgaaataaccaaagggtacagatattaagatactaaagaaaaaaggttaagataaaagggagttaaacttattt

SEQ ID NO: 148852 - DNA, 147 bp, Arabidopsis thaliana landsberg
gcaggagcaaacttgttttttcccatagtaacccggaggcacacagagacacttcctgcagcatttgttgcagaacgtaatgcaagccttgtggtactgtgtctttttacacctcctatcacattccgatgggcattctggttgttt

SEQ ID NO: 148853 - DNA, 458 bp, Arabidopsis thaliana landsberg
ctaagagccacaccaacaacaatggcgtctcttctcgcaaacggtatctccagcttctctccacaacccacttccgattcctcaaaatcaccaaaagggtttcacccaaaacccgaatccgtcaaattcccatctcccaaatccctaaatccaacgagaccgatcttcaaagtcagagccgatgttggaatcgattctcgtcccatcaaagcttctgaatcatcatcatcaggtacatcaaccgttagctcaactgataaacttcaacagtatttccaaaatctcgattacgataagaagtacggattcgttgaagatatcgattccttcacaatccctaaaggtttatctgaagagacgattcgtttgatttcgaaattgaaagaggaaccagattggatgcttgagtttaggttcaaagcttatgctaagtttctgaaattagaagaacctaaatg

SEQ ID NO: 148854 - DNA, 847 bp, Arabidopsis thaliana landsberg
ttctttagatctagcttatatggcgacgattttgttctttctcgcttctaatcaccgtagagatcctcccgatctgcaaatccgatccgaattctcaacgaatttgtagatctgatctgtattccatcgttgacgacggatcttcgcttacatcgttagatctgacgcagatctgcgttttctataggtaaagtctttcctccctgtaccgtgagcttttcttatggtcgttttccataaccttgttatgtaatcgcgaatattgttcttgattatcagatctagatctggatcgtccttcgcggcttcttcatacgcaagattctgtgaattgatcaagttgaggcatcatttctggattactaggagacgaatctgttgcagacggatgtgtgtgtgttggattgaattgagattagggtgtagaagatgttttgtggatagctaatagcttcctgattgcatctctgtcatccgacctttgccatgtcaggtgcgcttgcatggcaggtcaaaaaactgatcctcaataaaaaaaagattttgtgggttttggagaggaggtcgcacgggttattattttttcccgggatctcttctcctctgtgtgtgtcgtcttgcctctgctctatctctctccctgctctttcacatttcatatctttcttaaatgctcatatacactcaaaaaccgatcataagcagagtttgcgaccaatatggagcaatggggcgattacaaatcttctttgcccaacaacctcgagagttaaatcaggtactcatatccatattaaatcgaattcttaattagcatattagggtaaacaatctgcaagaagaattc

SEQ ID NO: 148855 - DNA, 178 bp, Arabidopsis thaliana landsberg
agtaaatcaacattattttttgcccacttcataacatcaaattacaaccaaccatctattccgcaataatgatcttttaaactcaaaaacttgtgcatttgataaagaagaaaaaggctatttgtaattaacgttacataatcgagctgctgcatcattctctcaagcaaaaaacatg

SEQ ID NO: 148856 - DNA, 444 bp, Arabidopsis thaliana landsberg
caatttttgcaggttaattggtattataaagccatggttcttgatgggcttgtatcttcaccgtcaaggagacaacaatgtctaaagaagcagtgggacgagttgggtagctggtcgactcttattcagaggcatcaatatctcttaacagctttggctcttttggctttcctctgtactgtttatctttactttgcagtcactttaggcgctaggcactcgtcctgctatggcttgaccgggaaagacaaggcaatgtgtcaattacaacttgttcaagctctctccaaagggaaacttaaattcttctagactgtttatctatcggtgaaagtttgaaacccccacatttattgttcttgtactaaaacattctttttcttctttattctataatgcaatttatgtgtattattacatggtgaaataaaaccagagattcat

SEQ ID NO: 148857 - DNA, 314 bp, Arabidopsis thaliana landsberg
tcaccggaaaagaatacatcactcaggtactgattctatttcgtttccggtgtgaatttagactccagaagaatcatcactgggtttcgcataaaattctggtatcatgatgtgagtaatgtgttaatggagtgaaaaattgctaactcttcttgttgcatgaggaatttaatcggaaaaaatgaagttaagttgtttgatcttgatttgtttcaggagcaattgaggaatgaaattactcgtgagatcagtaaattggaacgtgtctctgttattgatctggcagatacgattggggttgatttgtatcatgt

SEQ ID NO: 148858 - DNA, 71 bp, Arabidopsis thaliana landsberg
gcgataaacatgtacaacgtcaagaaggagaagaagaagtcaggaaggtcagacaagttgaaacctaagaa

SEQ ID NO: 148859 - DNA, 662 bp, Arabidopsis thaliana landsberg
tcttctccttctctcgacggattaagcttttacacagaagaggagagatatggatcagatactgaacaaagttggctcttactggttagggcaaaaggcaaacaaagagttcaattccgtcggtgacgatttcaatgtaatatttacatttttcctttcttttagttatcctcaagactttgctttgtgggttttagtttcctgtttgagaggaaaagcatcaatctttgattaagggtttttaattttgaaggctttttagtctttctaatgcttggtttgtgaacatgtttgtcttattgtctggagttacatggtctagtttaataaaccttgtcctgtttttaacagaaattttataacgttttaccttaattgaatccttcattgatctttagtggagggttcttgagcttgttatagaaagaaagagtggatagagatttgctattagtatggattccattttaactgtttatgctgcaatttgtattttatggtaacatatcatgaaaaagtttattgcttttgatctcctgagacaaaatgttcctgagtctgataatatttggattcaatttttgcagtcattgtctagcagtattgaaggaggtaccaagtggttagtcaacaaactcaaaggtctgtattatgtatttaaa

SEQ ID NO: 148860 - DNA, 148 bp, Arabidopsis thaliana landsberg
actcaaaagaacccagaagaaagaagattggaaggatcggctgtattcagaaattgcgttggatggaaagaatcagaaatctcttgaaggtataaggatcttgctggcagaggatacacccgttcttcaacgagtagccaccataatg

SEQ ID NO: 148861 - DNA, 124 bp, Arabidopsis thaliana landsberg
agtcaaaaattcctgatatttattgttcattacattttattttcttagtttattgcggcctgttgtggaagagaacaatcattataacattttatataatgagaaaagcttattgcaattttcc

SEQ ID NO: 148862 - DNA, 288 bp, Arabidopsis thaliana landsberg
gcggcgataaaaaatgcctcgagtcatccctccggagaatctcggttgcccaccattccgtgctttaacttttgactctctcggcttaataaaaggtgcccacttcgctctctctgtttttaatatagaagtttcgttttttctaatagattatttcaattttgatgtgcagtgactgaagctcgtggtcaagagagagggattccgactgtagtgaacacatggggagagatgaatgcatctagaagtgttcttgctgcttccattgatgaccggttaaggaatccg

SEQ ID NO: 148863 - DNA, 300 bp, Arabidopsis thaliana landsberg
cccgacgaaccctgtttcgcgtctctttcccaatcccaatccaatttcgattccttcatttcaggattcgtatagccgtaaatccgctattgggttcttccgattatccaccgatagatctcgatcgaacgtttttctccgattggatttttgggtgatttcgccggaattcataatcagacgggaggagtcgcttctcttctcttgagtaatttagtccctctttgtgttatggaatcaattgggtgatgaacaaatacaagtgtaaaacgatgccgggtttaacaacacacatgaatg

SEQ ID NO: 148864 - DNA, 552 bp, Arabidopsis thaliana landsberg
gaacgtccgtgaaagaaagaattcagtttccgcactaaccacttctgaatcctaaccaacaagcttctccatttcgtttttcgcgtctcgattccaaattccacttaagacggcggattttctcaccgggaaattggttttagatggataggactgaggaaatcgaagaatcccccgccggaccttcttccggatccgcgaaattgaagctcggaaacagagcagatcctttccttgttgtttgtagatgcttcagcctcgttacctctctcatcgccattctctgtgttgtcgttaacgttctcgctgccgttcgctccttccgtgacagccacgatgtataatctctctctctctctctctctctctctttttcctctctcgctgcgcaggcattagattacttgaagatttgatctctgtgtaaagcttttatcttttcctctccgagcagctcttcgatggaatattccggtgttatgctgtggtgattgcttgttttgttgttctcgttgagactgaatggggtttcattctcaaattttccaaggt

SEQ ID NO: 148865 - DNA, 346 bp, Arabidopsis thaliana landsberg
gagaaagatgaaccactactttctgtaattaaagttctttcttaattcctcagatgtgtacaagtgtttgcttttatgttgtagacatgaataaaccactcaataaaccatgtaattcgaagtcttcaaagacgtatgggatctatgagcagagttactatatactccttcagttttccttcactacaattgtatatatcatcggacttggtgtagaggagttccaataagcgtccaaaattaagtgcttgcttgagtactcgacctggtacgctggttgtcttcagtagctcctcatttatggtcttattgatgtccacgatcattctttgacactcgagaatag

SEQ ID NO: 148866 - DNA, 221 bp, Arabidopsis thaliana landsberg
tgtgaaataattggagaagaatggagacattaaaggcttggttcctcggaaacataagttttcaaactggacacacagttgtaagtttgtaactgttcacatatttaagtctgctccatagtcaaacttcaaagttcaaagaactcatcttcttttttttttgggtcaagacataaaataactcatcttaaacggcaagatttgggctgttagtgggctgg

SEQ ID NO: 148867 - DNA, 481 bp, Arabidopsis thaliana landsberg
ttcagcggagtaataaagagatggagtgatgctccatccaccatgattcccatcatacaaaagcttttgacgggtggcctccgtatctggatctataggtatctatatctttctttaactgttttaaaaattacgtgaaaaattcttatatattgtcaattagtttaatgttcactggttcaatgttggctatagtggagatacggatgggagagttccggtaacatctacacgttatagcataaaaaagatgggacttaaggtcgagtcaccgtggaggtcatggttccacaagagtcaagtagctggatgggttgagacttatgccggtggactaaattttgtcacggtgagaggagccggtcaccaggttccggccttggctccggcgcaatctctcacattattctctcacttcatttcttctgtccccttgccttcaaaacggttctgatatcagtaccgtcaagtcatgatggca

SEQ ID NO: 148868 - DNA, 243 bp, Arabidopsis thaliana landsberg
ccacaaaccccattaattaacaaaaaaaccaaaagaaggcggcgcaaacaaaagataatgcaaccagagacctcagatcagatgttgtactcgtttcttgccggaaacgaagtcggcggtggagggtactgcgtctccggcgactacatgacgactatgcagagcttatgtgggtcttcgtcgtcgacgtcatcgtattacccactggcgatctccggcatcggagaaacgatggctcaagac

SEQ ID NO: 148869 - DNA, 1125 bp, Arabidopsis thaliana landsberg
ggattacgagcagcagcaactcctcaacgagtattccaatgctctgagccgttctggtcggatgaaatcaatgcctccttcgaatcttgaagatcttttctcagcagaccgctcttcatctccccgtttcactgattccgctttaggcttgcgcggtgttctcgcctacacacaagtcagctgtcttcaaccagttccaacaacagcaacagcaacagcagcagcagagcatgttgtctccaatcaacacaagcttttcttcaccaaagagcgttgaccactcattgttttcaggtggaggaagaatgtctcctcggaatgttgttgaaccaatatcacccatgagtgctcgggtttccatgttggctcagtgcgtgaagcaacaacaacagcaacagcagcagcagcagcagcagcagcagcaacatcagttccgtagccttagctccagagagctcagaacaaactctagcccaatcgttggttcaccggtaaacaacaacacatggtcatcaaaagggggatcttcaaatggtcaaccggattggggaatgagctcagaagcccttggtaaggggagatctttcgtatcgtttgatggtgatgagcctgatgtgtcatgggtccagtcactggtaaggagactccagcagaagccaaagaaaaagcagcaacatcttcctcaggggaacacgtgatgaagcagccaaatccggttgaaccggtaatggatcatgctgggctaaaagcttggattgagcaaatacagctcgatcagcttgtggctcagcagaattgagagacctaaccaaagaatcacatgttcttgtctggtctctctatgtggtagataaaaacctcttttttacaggtggtggtggtagaagggtaacaagattaacaaagaagagaagagaagaaagaagatttctttgtttttggtcaattaattttcacaaaaaacagtttttttttttttatttagaaaaaaagaagggaccaatacaagaaaaaggcttatgggaagaaaggagatgaaacaaaaccttcttggttttctttctcccatttacaattaaatttttagggaatttctttctcccattatcattattattattgtta

SEQ ID NO: 148870 - DNA, 869 bp, Arabidopsis thaliana landsberg
taaaaaggtagtgttcatggtgaattagtggtggcaaaaaagttggtactactgggagaaaaaaaaaaaaaaaggttaggtgaagctttttagccatagccaataatactactcaattttgcagagacagtgaaatgctgaaattgataaaaagagaaaaaaagaagaagaaagaagccatgttttgaggaaggagacatgcatcatctcatccttttatgatttttttctacatcttcaccaaatccatagattctctctccctctgattttttggtaaatttggtcgctatatttgactacttgtactctgctttgagaagaaaaataaaaccatttttgggtgataggtgagaaaaaaatctaaatatattttgtttgtttcttcttttttagttatgttctgttttctcgcttgttgtttggatcaatactgttccaaggttggttttattttcccttctctagttagtggaattgcatgtttgtgctttctctgttttttttatatctaatttgtaatcaaaatccgttaattctcaaagtctgaatctttactttctattttagtatggtaataattggatctgctctatggtttctttctcttagatctgttgtttgttgctttttctttgtggatcaagaatggtttttgattccttccaagtgaataatgcaatatcgatatatcatgactggtttttttacttgattggaattacaggtgactgaataaacatctcttgtctcttgatggatctactatggtctggagattagttcgtttattgaactagtgttttagacaatgcaagagttccatagtagcaaagattcattgccttgccctgccacttcttgggata

SEQ ID NO: 148871 - DNA, 138 bp, Arabidopsis thaliana landsberg
tgatcagtgtccaaaaggctgatcacttggtaaaacaagaagacgagcttcaagttactatcaacttatgtttatttatcattgcatgaaaaaaatgttggatatttaggaagatagtttcgtttttgtgttaagatt

SEQ ID NO: 148872 - DNA, 488 bp, Arabidopsis thaliana landsberg
gtacttgttaaacttgaatcccgtgttcgcgactttgcgatagattctctcaaatccaattccaatggcggatccatcttctcaaaaccctaacctcgccactccccctcctccttcttctccttcaccaacccatcaaattcaatctggaacctcggaattatcgccaccgtctcgaccgccttgctctaccttgtcctttctcaagactgctaaccgaccaaaactccgtgtgacatctgaattcgacagcgatagtctccttttcttaaacaaagtgtcttgtaagctcttcgataaccttgccaagcttaaactctcgtttcagaacaattcccagcgcgagatttcacagcctcaggtctcttttacttccaaacacgtttctgttctctatgatgtcgaagagaagaatactttcattaagagcactctcgatgttcacccgcgtcttcagctccgagctcttcataatgttaaggtacata

SEQ ID NO: 148873 - DNA, 604 bp, Arabidopsis thaliana landsberg
ctttgtatacctttcttccaccacttgcctcttccttcccaacttattacccatcacaaagttttcttctactaaaccctattctcctattaccttgttaaaagcagagattctgtttcctaatctgacattaacacctaaaattcaatttgtttctacaatgaaacccactggagaaacaaataagcctaatttctaacctaaaggtacatactttaaattggaaacaacctccaccacataacctgcgcaaatggtaaattcaatataagaacacaattggggcaaaaccctaatttgagagagaaaaaccctaactttggaactaattcaattcggggctggttacataaaacaatatcaaaccctaattacgtaatttacgtatcgaagttgcaaaatattccacgaattgaaacagaagaaaccctacaagttctgataaaaaagtacggaaaaagaaggataaatcggagaagaaagaaacctgaaaacttcgagggcagaagaaaacaagagacgagagatcaaacaagggtttttgggtaaacgataagagacacgatcagaactttactctgtagagatagaaagagagagaaga

SEQ ID NO: 148874 - DNA, 661 bp, Arabidopsis thaliana landsberg
tttaagatttggttgaaccaagtcagcccaaaaaaaaagaaactgtttctttcataaataaatatcctagaaaaagcagagtgacgtggatttgattctgctgagcataagaattttaacaaaagggtactactacaatagggaaatttagtgcaggtccaagcaaagactgtagcagtgttgggccatgaaaaagacctgacctgtgaagattagccataaagagcacgccacggactttcttcttcttttgatgtctttgatgcgctccacttgattctgtctcttgagaaagacagtcctgtccaactagccacgagctcccctgtttcatggatcacctgtgatgacaacaacaacacaaactcgttattcagctgaaatcaaccagcgaaaaacaagcataaactgagacaaaattactaagtaaaattacctgaagctcttcgtctagagctttatgagttaggctattgcttctttggcctatgagaatagcggtaggcaggcgtttaacacgagctagatgaagcaagcatgacaaaggttcataatggatctgcatcgatagtggtggtttctcgatgcgagaagcaaataacctactggtctctgtttctgtagcaacttgaacgtaatgaagactagcttttctgttatt

SEQ ID NO: 148875 - DNA, 173 bp, Arabidopsis thaliana landsberg
tttgttgttaatatcagttacatcatattcaatgatttgggaaaggtaacccaaagagtgcggttttgtcgaatgttcttcaagattccgaggatgtagtatttgagaatagctgcgtcgatcctctccttgtctctagttgcaaatgattctaagagaactccgtttttgta

SEQ ID NO: 148876 - DNA, 514 bp, Arabidopsis thaliana landsberg; identical to SEQ ID NO: 70570

SEQ ID NO: 148877 - DNA, 519 bp, Arabidopsis thaliana landsberg
gctcctctcaccatttcttcttcttcttctctctaaaagaaaagagacttcaccgattcttttttattattccttcccagattttctcgggaaattaattcttttcctcctctttcttctcacttgttgttgttccttaacactctcttcctagatctactattaactgatttcatttcacgactaaaccatcgaagtcttcggcaagatatggatttgtttctgttctattaaacttgtttcaatcgagaagtaaaaaaggtgagatttgtcgaccatcggaggcctcttatggtttgatgatatcgtttggttttcgatcgtctcaagtttttatttttggttctttctgaatctaaagcttctccctttctttgttcgctcacttcgctgtagtctctatggattttttgagaaaaaaacgtcgtgaaataacatgcaacaaagatccatttgagtttcttctctatttgcctatttgactttgtttttatggaaaaaaaaagattcgatgaagtt

SEQ ID NO: 148878 - DNA, 373 bp, Arabidopsis thaliana landsberg
taattctgtctatgtcgcgctctatgtatgcttatatatagacttttctcattacgtatacttcaaagttgccattttatctttctgttaattgttttccaaaaatggccgataaaatgttcaaagcattgttgtgggcttttgccacggcggttgtgatggccgaggctgttcgtggacaactagtcccttgctatttcgttttcggagactctgtcttcgacaatggtaacaacaatgagttggataccctggccaaagtcaactattcaccttacggtattgattttgctagaggtcctaccgggaggttcagcaatggtcgtaatattcccgactttatcggttagtcccagttttggtttatctcttt

SEQ ID NO: 148879 - DNA, 397 bp, Arabidopsis thaliana landsberg
ttgtgttccagatttgtatgttgttgcaaaacattaagcattacatactatcgctctagtttctacaactaccattgatctggcgaactcctaattcagcaccagatatataaccagatgttctagagaactgtttttaacaactatcaccgagaagaactttgtacttttaaaagatttacatgaaaaataagatatatcttttgctggtctttctttataatcatgttgatggtcaagctccagattcatatgcccagaaggtatctggatctggacaaagaagagaaaagtctggtacttctagatttgcgacgtgccaatcaaggaaccgagcttgtattgacttgagtaacaagaggattgttggtaatacccaccatttatcatcatccct

SEQ ID NO: 148880 - DNA, 79 bp, Arabidopsis thaliana landsberg
gagtatgtttgggtattctgaatggaactgaatcggtctcgagggctacaatatcattggaggtacgtatatatatatt

SEQ ID NO: 148881 - DNA, 305 bp, Arabidopsis thaliana landsberg
cgttaccaatgataaaaggcatgactttccatcctctataaacgatttttctctgctcttcctcgaaagaatcgaccacatcggtgttagtcgtcgtagtagatggctcaacctcaagaggctttctctccatagtatcaacctgtgtgtaatgattggtgttgttgttgttatgattcttatctcttctgtctctatggttaagaatgactctgctcttcatgtcacccttccccgctcaattatatatagtggtggaataaaacgagtggattttgtcggaatctgggcaaagggggaacaat

SEQ ID NO: 148882 - DNA, 401 bp, Arabidopsis thaliana landsberg
  unsure (1)..(401): unsure at all n locations
ctcaatctctcaatctcncaacgaaatctcgatctcgtcgaggaacaagaagaacccagatcagaaatacccaccaataatgtcgtcgtctgcgaagaaacaaaccctgttcatatcgacactaatcatatcatggtactcttcaaacatcggtgttcttctcctcaacaagttccttctctcgaattacggattcaaattcccgatttttctcacaatgtgtcacatgtccgcttgcgctatccttagctacatctccattgttttcctcaagcttgttcctctccaacatctcaaatctcgttctcaattccttaaggttgctactctcagcatcgtcttttgtgcttccgtcgtcggtggtaacatctcccttcgttaccttcctgtctctttcaatc

SEQ ID NO: 148883 - DNA, 265 bp, Arabidopsis thaliana landsberg
caaaaataaagaaagtgaaaaagataaaaacttttttcttttctcttcttcagtttcttcttctttttgttttccttcctcgttctttcatgtcttccttgtgccattgatgagtccgtcaagaccaaatcgagagtagtgcaagacttttttctcacactgtttctaaaaccgagtgagaaatcttcttcctcctcagatctctaccttttcccttaaattttcccgcattttctctgtctcttccaagcttctctaagcgtac

SEQ ID NO: 148884 - DNA, 263 bp, Arabidopsis thaliana landsberg
tcgtggattccgtacaagggacaaacatcaaatgcaaagctatcagagaaaggtatttaggattccttgaactgaattagtatatgttagtattgaagattaatgctttacctttgttcttagtttctatatcttttctagacaggagtctttataccatcaccgcggttccgtttactgaagtgaggtccattaggagacacactcctgctctcggatggcagtatgtaattgttgtcctgtcttctggtaagcaaaacttt

SEQ ID NO: 148885 - DNA, 960 bp, Arabidopsis thaliana landsberg
ttctaagaaaagtagtaaccataaaaccaaagcatacaacttatacaacataagttgtctaagtcatgacaaatacaaagggacaaaacataaacaaaccattaacagagagaccagtgactagtgttacttaacaagtagaagtaacctttgccagtgtcctcttaccttattcaagacgcacactgaaccagacagaaagacacacacaagacgcagaccaaattttgaaccacacaaagaaaaagaaacacagcatcactcttcctcggactcagactcagcattctggagccactcgatgaacggagtcacgttcttcaaaaccggggagcttttgacacctttattgtaccattcaacaatcacatcctcatccaaaatgtcttcatcgtaaagacctttgataacaagagcaacttctttggcagcctctgcgcttgccttcatgcaaaaggattcaattccattaagcacacccatctgcgcaggagctcctgcttcttcttgcatcatcatcaaggccaagagatatttcttcttcttgatcacctcttttgcgattcccttttctgtgcctccaaagagggcagagaataaggcgtccattttctcctgggggtttgctgagtttgaagctagggctgttttgagttgggtaggagatgaaccactgctcagaagctcctttatctcattcacaagcttttcatgagcattttcagggatcttgctattgccattctcatgcacttgttctggtgccttcttcacctcagctactggctttttttcttcaactgtagacagcatcaccatttcagctgttaccgcgctgagctgttctttcatacgtttctcagcagcctccctggaagtatctgtttgccactggacatcgtcatcatcttcttcactgtctgcttgggcattttcattagacaggctttgaagtgggag

SEQ ID NO: 148886 - DNA, 294 bp, Arabidopsis thaliana landsberg
  unsure (1)..(294): unsure at all n locations
aggttacttgaaaaagagcaccgggcttttgccttgttggctagagggtgcatgtcttcacctattgaaagctgtatagctgatgccattagagcttccagtactgataattacccagtagaaagcatcttaaacacactcgagaagagagatcggatttggtcgaaccccttcttattggtccgagtactgggcaacacaaaactacggtgcccgaatcacttctttacaagttgattggtgattttgggtctcattactgaagtcagcatccatcctttncaaggtaccaat

SEQ ID NO: 148887 - DNA, 150 bp, Arabidopsis thaliana landsberg
  unsure (1)..(150): unsure at all n locations
caaaaccaaaaaaaaaaaaaaaaatcaaaacagaagcgagcgaagaggacggagggagaggatcttcttccctctttctcttatctactttctcttctaaatctctaatcttttgaaaccctaaatcaaagtttntgttttttttatcaa

SEQ ID NO: 148888 - DNA, 1382 bp, Arabidopsis thaliana landsberg
atcgaagctggaagcctggaactagccactgcgatcggagaagaaaaagctcgagagacgccatggaaatttcccaagctcgttcaagcttcgtttgtcttcttcttctgttactctccatgtttttcgttccctgcgtcttttccaaatctcctcgtcctatctccgtaagtttcccatatatctctgtgagctccgttgggaatatgctttactgattcttccggagaaatcgaatttgtaggatgtggagatcaggcagaagaagagcgaatgctacggtgatatagagaggtgagtccactgggaaatttctatacagcatctgcaatttctgttaatgtacttgcgatttggttcgagtagtctctcttggtgatttgatttcaaccattagggtatagacgtcagacacgatcaccggaattggttttatttgatatacttgtattgagaatttttcattattggttttgatccttacaaattgggaaagttttgtagcttggaagatattgtgaatcattgtaggattagttggctaaacttgttatggttagcaaattattggctctatcttcttctttactcacttttgtgtgttatgtgttgtggtaaattaaacagtgggttatggggttggcaatgcaaatcttctgcaatagcgaaagagaattgtgcgctgcgatgcctttctccggtttgctatcaactcatttatgagagtgatccggtgagggtttgtaaaaagatggttatgatgattgagttttctgtaaatttctgtctcttcttttttatgaatggcttgttttgtttgttgagcagcttgaagaaggtgaaaaagatttgattaggagccaagagtacaagtattgtatgtacaagtaaggttttaaatgataaatttctctcttaggttttactacctgtttttggaactttacaatcattgtagttctcagtagctgaggacaatatgaagggctggtgatgtgcaaagttcgcttagtcaatatgaatcatctatatatctatctattcttttcaggtcatcactcggggaaagctcagagggtgttcgaggcattttttgatggtatcaaataagactttctcagtgaagacatttgccaaaatctgagctaagctcttgaatttctgatcagtagtattctgctctgtcgcgtttgaagccatgtaaggcttcttttattataaacctcaatttttgggttaatgggtgtttatatgaaacgtttacgtttatgattggcaaatccactgaatcttgaaaccattgcacaaatcagtcttaatacgcacagattggtcccagttctcttgtcatgtatcggaagtccatattattgctggagtct

SEQ ID NO: 148889 - DNA, 294 bp, Arabidopsis thaliana landsberg
ctggtatggtttgcttaataatctttcagtaacccaaaaaaaaatacacggggttttatcttgtaaaggtcacaggcgattaatgtatagatttaagcaacataaacagtaaaacaatcgtctacgtgtcagggcagttatgtcttcacagaggcatgagtcttctacgtttgtagaaccagaggaatgccaaaaatacaacaaggccacacactccagtaatggctaaaacccatttgaaagcaccaggcttttcaaagaagtctatctcaaaattcatcccaaagatcccgg

SEQ ID NO: 148890 - DNA, 247 bp, Arabidopsis thaliana landsberg
atgatggtttcggtcttaattgatattttattgaagcataagatagaaacgagacacacacgagtagagtagtctgttgctcttaggaaatgtcaataccgataaaagacgaaagtcacaagaacacatagattaaagcagagaggacccatatagtcatttgctggtatcgaggacacaacgaaggcaagtaccttcgtgcaatagatcgaaagccttattgatttctcccaaggtcaagttgtgt

SEQ ID NO: 148891 - DNA, 568 bp, Arabidopsis thaliana landsberg
ttgagctgtcctctctaaaaccctagactctctcgtcttcaatcgttttaaaaaggtccgtttagttttagcatgaaattttctctaaagataagttttttttttcgtcttttgttagcgatgttttatagtttatcgaattcgtagtgtttgattgcgattgctctgtttacaagcttactttgatcggatgatttaggtttcatatttggagaaaaccatataagcaaagtttgattttgaggagaaagactgaatttgtggtttctttgataaaaataattcttttgcaaactgtagaaatggaaggaaattgctcgcaaggacgctttgattctcaagtttcttctatgagagatcttcgtccaaatgctataaatcagaatcagaaacaacaccatccaaattctcgacaagactcaggctttaacaatactatggatacacgtcacaacaatgtcgacagaggaaagaaatcaatgagtgaagatgatgaactatgtttgttaagtagtgatggtcaaaacaagtccaaggaaaactctccttggcaacgtgtgaaatggat

SEQ ID NO: 148892 - DNA, 133 bp, Arabidopsis thaliana landsberg
gagggttcgtggacgtggaggatgaagcaataacatgtaatagttgaatcttgcaaatattttgatcatattgtcaaatttctccatcgtataaaactttcgtgaagattaacatatcgaatattttgatcat

SEQ ID NO: 148893 - DNA, 540 bp, Arabidopsis thaliana landsberg
ttagttttttcatctttttttttgttgttgttccttttcggtatatacataaaatacacacctaattccacccacacacacacatacatataaaatattacaagttgtattcacattggggaatttaatcatgacattaaaaaccctaggtggggaacattcctatacattatacacacaaaagttcaacaaataatttttcttattaaagaaagcaaattaagtggtaactagttaatggagatttgatggggtgaaattaataatagtttaattgagaatcttggcaaaatcaagggacttcttgccttggagcttgttggagacatagtgataactatagtcaccatgattgtagcttctatacttgcatgggttggtctcatcatcaaccaactcactcattggttctatttcaacctcatagtttggtgcatagaatgtcactattgtaagcctctccttttccctgtttgttactgccctatgctctacactcttgtatttcccattacttagcacctacatatatatatataa

SEQ ID NO: 148894 - DNA, 133 bp, Arabidopsis thaliana landsberg
tcctctttttcttaagtctttagattttctactgcaggttaaaaaaaaaaaaaagcctaaacggctgtatcagaactttttgttttggattgtaataaaacatctgaataaagagattggctttaccgtttta

SEQ ID NO: 148895 - DNA, 283 bp, Arabidopsis thaliana landsberg
cgagcagctttcgccggagccaaaaagaactcgaggctgagatccgtcgggaccgccgattcgacgccgctactaaaatcgtccatacccatgattccgaagcagcagctgctgagcctaaaacgtcaccgtttagatcaagaggcactccttcacttccctctgctcgttcgattccgggtcgaagatccaaatacttcaaacccgattcaggacccattagacccaagaacaaacctagagtttccgattcgccgtcgcaactagacgctaagcctgtggt

SEQ ID NO: 148896 - DNA, 299 bp, Arabidopsis thaliana landsberg
gtttagagaaagctgaagatccgattttgacttgttgtggtcatttgttctgttggggttgcttctatcagttgcctttaatttacttaaacataaaggaatgtccggtttgcgatggggaagtgactgacgccgaggtgattccgatatatggtaatggagatgattgtgatggtactaaaccaaagttagaagattgtggtattagtctaccttcaaggcctaatgctaaaagagtggaaagtgttcgtcaaaagatcataaaccgagggaacccttcttccctgggcacgaaaacg

SEQ ID NO: 148897 - DNA, 707 bp, Arabidopsis thaliana landsberg
ttgtgggaggagaataatccggacacgcttctgattgatacacaatggctcgaagatatcatcatgggcgatgcgaataagaaacatgaacctaatgatagtgaagaagccaacaacgttgatgcttctctgctttctgaagagcttcttgcttttgagaaccagaccgaatatttctcgcagatgccttttacggagggaaactgtgattcctcaacgtctctgagtagtctctttgatggaggcaatgacatgggtctatggtcctgaacggttctattgtacaaatgacatgagtgttttaaatgagttcttcttcgacttgtctgtttgctatttattcttcaaaccttagccagtgtcaaacaaaaacggccactacgactattgttttgaagattgcgatattttaagttgtaagaatgtagagaataatgtttgggaagaacaaagctcgattcatatttgtgataaacgcaaaatatagattcgattcaaacaaaaaggtgcaaaacatctaagggtcttaagagaaacaagtgagaagaaaaaacagttacggttcgataactcttcaatcccaaaagtaacaaaaaagcatgtctataaccattaaaccattgagtaaaggctatcaactttactcccaaccagcagctggtgcccctgagggtggcgcggcagcttcccatccaccatctgccggt

SEQ ID NO: 148898 - DNA, 281 bp, Arabidopsis thaliana landsberg
gtggccgagtggatcctccattggcaaaccatggaatttgttcccttgaatcatcgagatgagaccactcttaatctcgaagttgttattctggatagcaggaggtgcgattcccttcctctgacggtgatcacgtggtgcatctccagcaccgatgttggcatggccattttgttgattctgttcttcagccatagcgagtggttgctgaggtacagggttgactgtggttcttttttttctgatttcgcgggctgtgcggttgatgttgtcgttgaaaa

SEQ ID NO: 148899 - DNA, 283 bp, Arabidopsis thaliana landsberg
gaataatttaattaatgatccactaaagcttcattcttaacaaatcagtttatagaggacaagaaagccttataattactccaccttcttttgtctttttgtttgtgaaagagaaatatctgatggtaaaaaagcccaagaagacctcctctctacacctttgaaagtttatgcaaatttagaaacaaacaaaacgaaccactatagctaattatcttatatagataagatatgtagaaggagggatatacatatgtataataacaatcttgatatataactt

SEQ ID NO: 148900 - DNA, 399 bp, Arabidopsis thaliana landsberg
aagtagcaaaacgtgcggcagaggctgctcagctgcacaagagacccaatggaaagagagaagaagcttctgcgcaaagaacgaagtcggctcagagttctctccgcccctgttctgtcccagcgtctgcttggcatatctgatgaacatgtggaagatctatgcatgtcacttaactccgagcagttgcggaaactgtgtgacatgatggaaaacaaggaagggatggctttggcaaaggtgatcaggaatgggagcaacattgatgatgataaaatagagattgaagaagaagaagttcaagtagctgttaagcagaatggtcatatagaagccaatggtcatgtagaagccaatggtcatgtagaagccaaagtggatactgctactcatgagaag

SEQ ID NO: 148901 - DNA, 932 bp, Arabidopsis thaliana landsberg
cgagtcgacctgtatcttcctggaaagcagcaagagcttgtgactcgagttgctatggcagcaagaggaccggtggtgctagttatcatgtccggtggaggatttgacattacattcgccaagaatgataaaaagatcacaagcataatgtgggtcggataccctggtgaagccggtggtctcgccattgctgacgttatcttcggacgtcataatccgagtaatactctgttctacagattcaaccggttttaatctcccggttcggttttaaaattgcaatttctctaaccggtaagtttttttctggtaggtggaaatttgccgatgacgtggtatcctcaatcgtacgtggaaaaagttccgatgtcaaatatgaacatgagacccgacaaatcaaaggggtatccgggtcggagttacaggttttacaccggagaaaccgtatacgccttcgcagacgcgcttacctacactaaattcgaccatcagctaatcaaagcgccaagactcgtctctctcagtctcgacgagaaccacccttgccgatcatcggagtgccaatctttggacgcgatcggaccgcactgcgagaacgccgttgagggaggatcggatttcgaggttcatttgaatgtaaagaacaccggagacagagcgggaagccacacggtgtttctgttcacgacgtcgccgcaagtacacggatctccgattaagcaactactaggatctgagaagattcgtctgggaaagagtgaagaagcggtggttaggtttaacgtcaatgtgtgtaaggatctgagtgtggttgatgagaccgggaagaggaaaatcgcgttaggtcatcatcttctccatgtaggaagcttgaaacactctttgaacattagtgtttgattcgacggctcgttttgtttttaacttaagat

SEQ ID NO: 148902 - DNA, 138 bp, Arabidopsis thaliana landsberg
tgtgatgcaaacagatgagatgtgatcagaagtcactaagtcaagccaagcaataacagttttggggtttcttacagtcctaagcgaacatgcagaaaacagaaacaataacagaatcactaaaatcactcaaccaca

SEQ ID NO: 148903 - DNA, 1086 bp, Arabidopsis thaliana landsberg
actgtactcttccaccaaatccattaatcatcatcttttcttcacagagaggaaaaaaaaaaaatggcgacagattctcaaccaaaccaaaagctaacgcttccgttaaaaacaagaatcgctctcaccgttatctccaccatgaccgataacgctcaacgtcctgacggaactatcaaccgccgtttcctccgcctcttcgatttccgtgctcctcccaatcctaaacccgtcaacatcgtctccacctccgatttcgtcgtggatcaatcccgtgatctctggttccgattgtacactccacatgtctccggcgataaaatccccgtcgttgttttcttccacggcggtggtttcgctttcctcagtcctaatgcgtatccttacgataatgtatgccggagattcgctaggaaattacctgcttatgtcatctccgttaactaccgtctcgctccggagcatcgttatcctgctcaatacgacgacggtttcgatgctttgaagtacatcgaggagaatcacggttcgattcttccggcgaacgctgatctctcgagatgcttcttcgccggagacagtgcaggtggaaacattgctcacaacgtcgcgattcgaatttgtcgcgagccgcggtcatctttcaccgccgtgaaactcatcggacttatctcgattcaacctttcttcggcggagaagagagaacagaggcggagaaacaactcgtaggtgctcctttggtttcaccggaccgaacagattggtgttggaaagcgatgggattaaaccgggatcatgaagcggttaacgtcggcggaccaaacgcggttgatatatcgggtctggattatccggagacgatggtggtagtagctgggtttgatccgttaaaagattggcagagaagttactacgagtggttaaagttatgcggtaaaaaagcaacgttaatcgaatatccaaacatgtttcatgcgttttacattttccctgaattgcctgaggcgggtcagttaattatgcggattaaggatttagttgataagcgcgtggcttcactctccgcttaatcaccttcgcgaatg

SEQ ID NO: 148904 - DNA, 1919 bp, Arabidopsis thaliana landsberg
  unsure (1)..(1919): unsure at all n locations
atgaatcccgaggaatcaagaaggagagcctctgctcgagccgtggcaagagggtttgagatgattaatgagaagaatcagtcaaagaatcaggaagctgcgagtcctggttttactcggatgacaggccgagtacaatggccgagtatggnnnnnattcttctatgggtcgttttgcggctgctcaagagaaaatagcaagaggcaagagggtctgggagtccgagccagttgcagaagaagaagtgcctgagatagagaaggaagcatctgaggaagatgcgcaagttgatgaagaggtcccgatagttcctacaaggagaagaaggaacaccatgaggagaaagaaagaacctaccattgaagagcactaccaatatctcatggagctgagttttgaggggacaagatatccccatagacctaccatgcaagctttggggatatgtagggatgttgactacctcatggagatggccaagctggagacctttttctcctacaagtgtgaagggtacaaaactgagagctgccaattcctagccactttgaagcttcatttctatgctgaaaaaagggagagagagctgcataagggagttggctatatcacattcatggtgtttggaattcaatactcggttcccattaggcagttggatgttgttttcaagttccccaccaagtatggaatccgccaaaacttcagcaaggacgagctccttgatctatggttgacaatcgccggtccactcccctacaagtcatctaggggcaagagttcgttgataaggagcccgatgcttaggtatctccacctttgcattgcaagtgccttcttctcgaagaagacaaccggccatgttaatgagggagagctgaagttgcttgatctcaccttatgcttcattttgggacgcacaaggaatgggatagagatggaaggggatagggctgatacgtccctttcggtggtgttgattgatcacttgattggttttagggagtatgcagccggaatccaccaatccggctatggaggaagcttatgtgctggaggagtgatcacgcccatcctaatagccgctggagttcctcttcatacccccactcacacagcaacctacatcgatatggagtatttgaagaggaagtgctacttggacaggtctgctccagcggatcaactctacttcaagttcaagcactccacgctaggtctctctaggctagcactcccttgcaagaagttcaccaccattaggattgggaacaacattgactttgatcctcctcaatcgatcttagtcaatgtccttgcgcctctacaagcagagccgagcataggaagtgagtctcaagaagaaggagcagagtggaatgaagaagaagctgagcaggaagcttatactcggccgagtaactttcagcaggccgagtatggccaggacgagtttgaacaagctgagttcagtcaagctgaacagtttgataaacaagaagattcgtgcgaagctgcagcggagcagtttttctttgaggattatgctgagtccgatccagagagagatcccggtcaagttcacaagaagttgggaatgctcaaaggtctgggcaagcttcagaggaagttgttcagtgggttgaagaagaaggtgagaaagatgaagagagcaacggatggcatggcggtnnnnnnnnnnnnnnnnnnnnnnnnnnnnnnntcaccaccacctcgacccgagttcaggagaagtaactcaacaagtgtggcgccgcgaagggacgctcgtttcgacccgccaagagcctcaaactacgagctcgggaggagctccaccttttcagatcgccgtttcaacagccgcccacccggtccagtgaaccagttggttctgaacgctgacccaagccgagag

SEQ ID NO: 148905 - DNA, 464 bp, Arabidopsis thaliana landsberg
aaaacaggtggtacaagcgtgcacagatatatatgagaacacactggtagatggtaatcctccaaagacagtatttgtattcccgagagtcaagtgcttaactgcttccaaaggatctatgtggcgaaaactcacttaatctgtaaaacagcgttcagcgtttgcgtccgtaactgcttttctagttgagatgatgttctttctccaaattatggcgtttgcgtccatgtcttctttttctttgcatggtatctttcctctgtaaattctgtgttttctcttgttttgttctttttcttacctttattcctggatttgaaagttgaaacgctcggtggccacttgcactaggatattatcccgttgtatttaggaggcgtatttttttgtcgcaaattttaattctactgtttcatttaattttgataaaatcttcttcaagttcgtttctctttcataacaag

SEQ ID NO: 148906 - DNA, 279 bp, Arabidopsis thaliana landsberg
aggaggagaagaatcttcagctgcttcaactgttgcgttaaagcttaaaggtgtttacttttatttatgataataacaacaaggggtgatatttgaagacagaaatgagaaatggtagtgccaccttgttttccacgtgtttcttcggctgcatcacaattaaaatttgtctgttgttgtttactgtgtatctaactatgtttgctaaatgtcaagtgtagtaatatatattttttgtaatttttgtttggtttatttagacactgataattttcatta

SEQ ID NO: 148907 - DNA, 725 bp, Arabidopsis thaliana landsberg
ctgatttgctttgttgttttctttctgctacaagtagataaaaaatggcatggcgcagtgcagcacgctctttcgtctccgctacagctagagctccgtctctccgatctccgccgccaacgcttccccgcctccgtccttcccaatcctctttgccccgccgccgatttgcctctttcactaatcccaggtttcaccatttctaaaattgaaatccctaattcccgttgataagaattgaaaaatgtttgattttatcatattgagattatgatagcattggccagaaagaaacatgttttgtaatcgtgtacaggaatttgggagagctaggatgcacagagtcattcttgcctctgtacaatgttgtggctgcagcgagactcacatctcaccttaatgttaatctgcgagctttctgcgaactctctaacggtaccttcccacgcacttgtcaagatcgctaattactctccatttgtgagtgttactgctcttaggatttcatttggagtggccaagtttttaaagttttgaagtatttagaacaaatgttttcgtgttgaagtagaatgaaaatggatttggtcgtttccttgctgctctctgtaaatcaagtttggtgttaaagaacaatgggcttgggattattgatagggaatggaaaagatgggtgatggaagtggattttcagtcgctggcaagagaggtgctactgctttgta

SEQ ID NO: 148908 - DNA, 604 bp, Arabidopsis thaliana landsberg
aagaaaagcatattattaaatagaaggaaaaattcaacattggacaagcaacgttatctttacaaacattttcttcacagtttcgttttcgttcagatccaataaacagccgaatccaaatttgatatcctcaagagatcatccaattacaaataacaataataatagtaataagaatattaaaaaaaaaagatcaggaaaagcttttgcttgttgttaacttcaacatcctgcaaacacatttccctgatgaacccaaacacatctattttcctcctcctttgattgtttgattgattgctctgcaaataacaaagcttcttcacatcaccatttgtttttttccccattattactctctcactacccttttcttcttttctttctttcgatctgacaaacacatacagaccaacaaactcccagtctcttctattcctggtctttgtctgtctaacctcttctttagccatctatgcacatcaatcattcattgtatttatcagaacaagatcatacattgtcgcagaaagtgagcaaatataactggaattgattgagatcataagagggtaaaacctggcaaaagatctggttccaaatc

SEQ ID NO: 148909 - DNA, 256 bp, Arabidopsis thaliana landsberg
gatcctctgattaatcactctttaatcgtctctttatttctctctctctctcttcttcttcttcttcttcttcttcttcttcctccagagagcaccttatgctgattcctctccttttcttcctcaactcataaacgcgatcggccgattccttcacaattacgcttaaaattttcgattttgattattgggtttctctctgatcatggcggttgttgagactggagcagcagctactgctgctgatgcaggagga

SEQ ID NO: 148910 - DNA, 535 bp, Arabidopsis thaliana landsberg
attgtgaaaacaaatgacatgaatcacttgattcgatagcaaacacaaaagcaggactaatctctctcacacacacaatgtctcaacttaaacagagaaaactagtcaatgtcccaaaatgaaaatatagtagagtactagctaaaagagaggtagagagatcattcattcaatagggtttcttttgttgttgatggtggtcatgtcgtcaggaggtatgacagcaatcctgagaacaccaaattctgcatcccaagcgatggtgttgttcgaaattaaagcgggaaaaggactttggacgcttccgaggtaggttcgaccgctctcatcgtgttcatacacgtccttgatctcagctttgaatctgatttcctttccatcagcatacacttccacatcatccggactaacacctggcatgtccactgcaaagtgagcccctcctcccgcttttgtcaccccaattagtgctcccttgcgaccagacaccagacacggatgatcctccaagcgtattccggattgaccttaataa

SEQ ID NO: 148911 - DNA, 449 bp, Arabidopsis thaliana landsberg
tatttggatgcctcattttacttaggacatcaacctgcaatgccgcaagaataagtcaaagctcctccacagcgaacactataaaatcaaaactacagtagaactgtgtttcaaagtcccctttttcgtagaggcagcagtttgtgcacaataaaccagtaaacaatgatgatgaaactaaacaagaaatttcactaataatatgtcaagaaaatacctcctgttgatattctacagggccttgcgaactgttaggattcaacatttttatagccacctgagtatgacgcagtaaaccaacgtagatgctttcatatccaccttccccaatctttagggtcgaatcaaagtgattagttgctttctcaatctcggaaaatgagaaattcgtgaagtactgaggcaactgtagggttgaggtttttgcgtgactccttaactcctcaagc

SEQ ID NO: 148912 - DNA, 259 bp, Arabidopsis thaliana landsberg
caaagttgtgtctctctgaagtcagaaccaaaaatataagacgagaaggagatcaatggaggaagaatacataagaataataagcataacaacaataggagtaatctcatggggtctcattttcatccttgtaagacgaatcttctcaagctactcgttcgacttcagcacccgtatagtctcaacgcttcacgcaacaatcgctgtcactttagcaacactctcgattcaagattggtcttgtcctgtttgtcccatt

SEQ ID NO: 148913 - DNA, 327 bp, Arabidopsis thaliana landsberg
aaactttgaagcttcttactttctttacttcacgatccttcttttgcctaatttctcggtttcattttcaaaattctcttttgattctttcttactctttagctagagaagatttagactgggttttgagtatttctcggaaaatttcgttttttttttttctgggagagtttccgagatctcggtggagtactttttttgacgacgaaccagtatggtttggtactcaagctgtagaatttcgtttctgggtctgcttattttgctagcttcgagctgggttttggatagatgccaaggatttggtgaatttgggtttgaatttca

SEQ ID NO: 148914 - DNA, 443 bp, Arabidopsis thaliana landsberg
acgcctgagttccaaagcgctgatactccaatggaggaagcaattatcaaaaacagaaaaccaagaaacttcaacaaaccggcctcaggagtgacatccttcacgtagtaacgtctcacaagcaatgctactgccacgagcatgaaaatgaagagggtagcaaaggagaaaacgcttgatagaacctctaagctggtgaagaaggatattattgcactgagtatggttacaaggagagtagcataaataggggttcctgtttttggatgaaccaaagcaaaccatggaggaatcatatgagaccgagcaatctgagtggtgtaccgagcttggcctagagagccaacaagcaggcttgtggtcatgccctttaaagcgcatataccaaccaagtacttagcccatttcatcccaatctgagcaaaagcaacagaataagctgc

SEQ ID NO: 148915 - DNA, 121 bp, Arabidopsis thaliana landsberg
atccaattagcttcattcgtgttggagaaatttgattttatatccgactgagtaggtacgtatatgcaatacgttatgtcctattagccttatgggactcacgggtacttatgcaggagat

SEQ ID NO: 148916 - DNA, 394 bp, Arabidopsis thaliana landsberg
  unsure (1)..(394): unsure at all n locations
aacaaaaagagagagaagagaacgagagaatcattgagaaactaaacaacaatggccgtctcatcattccagtgccctaccatcttctcctcctcctcaatctccggctttcaatgccgttctgatccagatctcgtcggttctcccgtcggtggatcatctcgccgtcgtgtccatgcctccgccgggatttcttcctcattcaccggggacgctggattatcctccaggatcttaagatttcctcctaatttcgtccgtcagctgagcattaaagcccgtagaaactgtagcaacatcggtgttgcacagatcgtggcggctaagtggtccaacaacccatcctccgcgttaccttcggcggcggaggttgntgctgcctggtctgcatcgc

SEQ ID NO: 148917 - DNA, 329 bp, Arabidopsis thaliana landsberg
gtctgtgaaaatgcccgccaaataatgttatagagattcttgacagccggttttagagtatcagagatccagattcaacttctcagacgaattccacggtcactggattagaacggtaaggatcttaactggtaagcctttggaacgttttatacctaaaagtgtttcaaacaaagaagagcagaagaagagagatgtgtctccaccattgttcatacaattcaggtagctcaacgtctctgtgtcaaacaattttctttatgaagcatagatttgaatcttgtttcaaaatttgtaacaaaatctaagagaagtgatgagattccact

SEQ ID NO: 148918 - DNA, 208 bp, Arabidopsis thaliana landsberg
tcaacgtcgtccacggttgcttccggcgtcggaatattcgccagcttctccgcaaagaaacctttggctttgtccaacaagcttgaaatcaccgaagccttctcttccaccaccttttcatccgctgatgccattcttttttttttttttttggtgttgtgtcttcaaaggatcagatctctctttgtctctctctctcttttctaaa

SEQ ID NO: 148919 - DNA, 270 bp, Arabidopsis thaliana landsberg
atatttctaagattctttttcaggaatccttattctctaccaaattggcgataattaaaatatatataagtagagagactagagacaaaggaaggggtcctcgagtttcgaagacgacccattctcttcttattttgtactaaagatttttaaaatcaaactggttattaaaatactgagataacaagttataaacctacattacattctttctttctctttcaatctaaatttgttgatggaagaaggaacaggtttttctctaggacg

SEQ ID NO: 148920 - DNA, 452 bp, Arabidopsis thaliana landsberg
ggaggatcctgcgaagaccaaccagtctgttaattttgtataaacaatgaaacgaagaagatcttccgagaatattctctccttctcacgcataccctagaatattgtttcgtctctcttccttctacgtttgcttatttgccccaactcgacgcgaatcatcagcttttataaattctgtcaactcaaagattgtttctgaattggaatcttacaggtatggcttcaattttttttttttttttttttttgatgtaatcgaaaatcgcttgaatcgtgtgaaaagattgtttgaatttgcagaaaaattaagaatttgtagtcgaatgttatccttattgggaagatgcaataatcagatcaaactcaattacaagaatctattggtttagtctttttgtttgataatttgtagaggtttagcttgagatgatatgacgaatcagcaggag

SEQ ID NO: 148921 - DNA, 307 bp, Arabidopsis thaliana landsberg
aaatgaaccttccaactcctacaatgaggtctagactgggtcctacaatgccaccaccacctatcaatgtgaggaatacgatagaccgggcagactggagtaatcgccaaccaactacaacacctggaagaacaccgaccagtgcaacaccttctggaaggacacctgctctgaagaagccaaaggcaaacgaaccaaataaaagagatatgacgtatgaggagaagcagaagcttagtggccatttgcagaacttgcctccagataaactagatgcaattgtaccaatcgttaacaagaggaatac

SEQ ID NO: 148922 - DNA, 398 bp, Arabidopsis thaliana landsberg
cgcaaacgcaatatgtcaaatgattaagaaacatttaggctgatttcacttccatccctttgcactgagtattaggaatcgattagtcacaagaacatgttagagtgagttgaaaaggtacacaatctgatctctatatcttactgtgattactgatttcgatattttcgttttcttggaaaccctcttaatggattttgctgagcgttgatgtgctttggttttgaacaggatctgtctggtagcaagagaccaattgttggaggaaagtttgtgtcttgaaatagccagaacataacacgttccttgtctgatatataatagctcagtggtttgtttttcttctatttctaagaccttgtgatctcccttatgaatgaagcatatctacttttgtt

SEQ ID NO: 148923 - DNA, 105 bp, Arabidopsis thaliana landsberg
tttacatggagatttcctgtcggtatagcgtcctcatttctccatcgcttccacttttttcctatactaatttgatctaattaattcatatgtcaaaacattaag

SEQ ID NO: 148924 - DNA, 343 bp, Arabidopsis thaliana landsberg
ggtgctgccgcaattgaaacggattggccaataacagcaacccatggaatgtcagttgtttttggaggtccttgatttgaaagaagagcctgaacagctgcaagggctttcgagttctctgctgcctggtcaatttttccaataatgcctattgtcctagtacctataagtagggaggagtgatgttagctaatgagtattttaagcaaactgaagtgataataggtaggtaaatcaacagttcttatcaggtatacaaataataaacaatattaagataagacagatcggaaatacagatgtactcactctctggatcatactcctttgcaatcttcagggc

SEQ ID NO: 148925 - DNA, 1176 bp, Arabidopsis thaliana landsberg
tttctttcctttttcaggataagatggtaaggaaaccggtcgacccggaagaggaattacggtggatgtcccaagaagtacggggttatgttgaagctgttctcaacagtctagctgccaatgttccaaaggtggactagtcaattttcttgtgaattcttaatttcccatgcccatatcgcttttcattactcgatcacattactaaaactgtgacttcaacaggctgttgttctttgtcaagtggagaaatccaaggaagacatgctgaatcagctatacagctctatcaggtttcttaatatccttcctcaacgtattcttgtaacctcaatacagctttttgcgttgtacttatatatatctcgcttggattgatctgcagcgcaattggtaatgagaggattgaatcattgattcaagaggatcagaacgtcaaaagacgaagagaccgttaccagaaacagtcctctcttctctcaaagctcactaggcagcttagcattcacgataaccgagcagctgctgcttcaagctggtctgacaatagtggcactggtatatatactcacacactcatctaccctttcaaatgtgctaatatataaccataaaatgcatgggatttgattcgttttttcgtgtgtcatctttgtttgttcttatttgcagaaagcagcccgagaaccaatggagggtcatcaggagaggactggatgaatgcgtttaacgcagctgctagtggacctgactcattgaagagatatggatctggcggccatagccgtcgttacagtgatccagcacagaatggtgaggattcttctggatctggtggcagctcccgtcgcaccacaccaaaccggctcccaccacgtccgccacagtctggatcatcttacaggtattagaaacctgtttggtttccaggattgttattgaacgaaccataaaacacattcttttctttctttttctgccctttcggattggtccctgtttctgggactatttttcttatgtctcactagtttaaaaaaaaaaaaaaacagaatgataatatgatgatgatgtacttgcgtgtgtttgtagatagatatttgttagagagacacatatatatgagtttggtcttcatattggtcatatgctttatattaaagaaaatgttacttt

SEQ ID NO: 148926 - DNA, 215 bp, Arabidopsis thaliana landsberg
atatggccatgaatgtgttgtgtcgagtgttcacttcgtcaagagtcttatcatcaaacgttacgttctcgttttctcaaattccaaacaataccaagaaacctctacttgaaaagagaagattatcgccgcgtgtgtgcctaagagcgatggcgtctgagaaacaaaaacaacatgcacaacctggcaaagaacatgtcatgggatcaagccca

SEQ ID NO: 148927 - DNA, 300 bp, Arabidopsis thaliana landsberg
aaatcacattgttcacatcataaaataactttgaaagaaaccaacaagttacattctaaacatttcgtcctttgaaaactcttaaaaacacattattaattaagcatcacagattaatcatacagtcactttacctcacaattttagcaacaaactcatcaatattcttatcagaatttcctccatcagacaaagcttcccttgcaaactccatcaatctccgagcgttttttctaatctccttccctttctccgacaaaaattccataacttcttccaccacattcacaattttcttcc

SEQ ID NO: 148928 - DNA, 446 bp, Arabidopsis thaliana landsberg
ctcacaactaaatcttaagtagaaagagtgaaacatggctaatcacaaaaatctcttctttctatgtttcttaataggtttagggttatgttctgctagacgagcactactctcctcctctgaatccaaggctgaagtcgctgcctatggcgtgaatagtggtttaagtgctggtcttggtgttggtattggtggtggtcctggaggaggatctggttacggaggtggaagcggtgaaggcggtggagctggtgggcatggcgagggacatattggtgggggcggaggtggtggacatggtggtggtgctggcggaggaggaggtggtggccctggaggaggctacggaggtggaagcggtgaaggtggtggagctggatacggaggcggagaagctggtgggcatggcggaggtggaggaggcggagcaggcggcggtggaggtg

SEQ ID NO: 148929 - DNA, 183 bp, Arabidopsis thaliana landsberg
caaaagttacaaaaggagagtatgtcaaaggtttcatatgcaccgttgctgcgtctgctggttatggtctagtcttatccctacaacagctagccttccttaaagtcctaaagaagcaaaataactcagaagttatggatatgataatctacgtgagtctagtggccagttgtgttagtgtgg

SEQ ID NO: 148930 - DNA, 404 bp, Arabidopsis thaliana landsberg
  unsure (1)..(404): unsure at all n locations
aagagatcagaaacttnttttattggaagaagaagacgacttcttgaaaagtatacntgctgaagatgtgacgattcgatctgggaactgggcagacttcagtggagaaatgtcaggattggtgctggatgttgagaggcttgtcttcaaggatctggttaatgaaatcgtgcatgcagagacaagccgtctgcaagcaaagtcaggaaggcgacgaacgctttttgctgaccagtagctaagtctgttgaagaagacaaaatatatacacaagtggtttctctaactctttaactgtgttatgtttcactctggtcctttttttcgtctttgctgattcttatggtcgttcttgggtcttccgtattctacagcagaattataatcatatggtgtgttatgta

SEQ ID NO: 148931 - DNA, 374 bp, Arabidopsis thaliana landsberg
ataataacatacacatcaagtttttcattacttttaaaaaagcattatacaatctaattgtagacagtagaaaccaaacacatgatctggtaagagtaaacaagagaaaaatgtcatagtggtgaattaaacactctacaacatatttcaaagtcttcaaagaccgatacgatcgacaaacagagaagtcatatactccttgatctttccttggggataggtaaatccttcatatccattgtaggtgatgaagatcatacgtgcaagatcaaaggttgctttaagaacgcaatgtcgcacacccaccgttgtcaggaactcttcattaatatcttctcagcctctacgatgaatttgtaagctccctaaaagct

SEQ ID NO: 148932 - DNA, 3379 bp, Arabidopsis thaliana landsberg
  unsure (1)..(3379): unsure at all n locations
ctggtaatttactttgcgaacctttaatgactattgtgtatcgatgagaatcgatgtagagcatccaatctctcatgttcatnnnnnnnnnnnnnnnnnnnnnnnattaattaaaaggttgcaactcattgcaagaccaataatattgacaacaaaactcccaatttatatacgggatcatgctatattgcatgctgcaactttggttcagattagaccaagcgcatataatgtatattcccctttacaaatgacttatggtcaaataccaaatttatcccatctccgccttttttgatgtgcggtatatgtgcctatagcaccgccacaaagaacaaaaatggggccctaaaggagattgagaatatacgtcggttatgtatcaccgagtataataaggtatcttgaaccacaaactggtgatttgtttacgggacgttttgccgattgctattataatgaagatgaattcccagctttagggggaggaattcataaaatgcatgtgcataaagatatagaatggtgcgcaccatctttaaaatattttgatctccccacaaagcaacgtgagttggaagtagaaaagattgtgcatttacaaaatatggcaaatcaattaccagattcgttcaccgatacaagaaaggtgacaaagtcatatatccccgctgcaaatgccccatcaagaattgaaattcctagtgagctggaattagatgggagcaaaattaatgaacctaaggttcaattaaagcgtgggacgcctattggctcaaaagataaaaattcctaaaagaaaaagtaatggggagaagaaaatgaaaaagttcttcaagaagaaccaagtcctcgggacgatacaaaaaaatatgagatttcaattaattatgtccataatggtatcatatgggatagaaatgatattgatgatgaaaatagaaatgtgtttggacatattgtcactgcatctgataatgtaaaacatgagtacaagtgggtatttatgcgaaaaaaatgagaaagatgagatcaaacgatataaagtgcgacttgttgcacaaggtttctctcaaagacccaagagttgattatgaagaaacatattctgaggtcataaatgcaattacattcaagtatataatgagcctttcggcatccaataatttatatatgtaccttattgatgtagtgataacttattaatatggatctcttgataatgatatatgaaaatccttgaaagattaaaagttcctgaggcattagactcatcaaagtctaaagatatatatttgtcaaattacagcgatcactttacagattgaaacaatccaaatgcatgtggtataattgtttaatagattatctacttaagaaagggtatgtgaataatgaaatctgcccttgcgtcttcattaagaaatcccctttgagatttgtgatcattgctgtttatgttgatgacctaaatataattggaactccataggagattgatggtgcacgaactcatatgaaagaaaagttcgaaacaaaagatcttggaaagataaaattttgtcttgggctccaaattgagtgataagtgtgtattttgcatgttttgagcatccatttgtcatcactttagcatcatatcatcactgttttataccatttcacatcatttgtcatcactttgcatgtttagcacagtctcgcatgcatgttgcatatttgtgttgaaatcaaatgatttggagttgtcgacgagctaactggaagaagcggacctgatcatgtcaaaccactcgaccccgaggtcgggtagaagcttcaaggcctcaacagaccactcgaccctctggtcgagtaggggacttctcgatttcatctcatcactcgacccctgaccgagtaccaccacgagagatactcgatcacttcactcgaccccaaagtcgagtgtcttcacctccaccaccttaccaccactcgatcacaccactctacctggaagtcgagtattaccatcaccaccactcgactacctactcgatggcgagcttcagagtcttcttcattccgcactcaaccagacactcgagcacaaggaagaaaagaagaccccagttattcactcaacctctcactcgaccacctgggtcgagtacagttcttaattcgtcccaatactgcgtcgttttgagtattagggtttcggaatattttgctataagtaacatgtactttacattttcgaaaacaagtttttagcttggttttatttcgcagacactgtgttctagacctttttgtaatctggatttctctttatctattcagtattcagtattcagtatttgttcttgatttcgtttactgttgttcatcctgttatcattctgctattacattgttgttatcatgttttcatcctgttcaacatttatgttctctacaatgatgtctgagtagtgaataggtttctaaggatgggttagagtagtgtagaattctcagtatgctaggtggttgagtttgattgatagatcccttctgaattagttgttcttaatgcctattgctttcttatcaactggaatttgagcccagacatttccgcgcccaaaaggtgttcgatgaaatgtctgaaccactaattccagagattcgtgaccctgtaccaaggtattggttgtagggagcgttttggctttaacttgttgatttgtaatgcctgttatgttagctctcgtcaatggtgattgagtctgggactaggttagcttgagagtctctgttgcggtggcacttagatttggttgatgaacttgttgtctagggttaatttattgagcatgtcaatcacctgtaaactgaggaaacgaaattactcaattatcccatccttaggaattctttgtctgattgattttattgtttactctactgctgtttactgcatcctgtcatatgttgcttagtttctgcaattctttactgttactcgacctgatactcgaccacccagttgtctggcaacagactgtgcagtcgagtatccctgtttcattttctgtctgttactcgacctgtcactcgacctcacccagtgctctgcaaagagctgtgttggtcgagtgttttactgtttctgtttgattttctgttttctgcatgttcacttaggactgctagaacacaccaaaacctgttatgcttggcttgacttagtgacttctgatcacatcttgattgttagcatcacacccatttggattgacaacctaaaatactacaacgatatgattggtgttttaggataattgacttaaaaacctattatcaatttggcgccgttgccaattgggtgtttgtttgttacctttaagat

SEQ ID NO: 148933 - DNA, 965 bp, Arabidopsis thaliana landsberg
ctcactctctctcccactgatcttcttcctcggctacatctcccgacgcctctctctcgttccggtgagtcctcctctctctgctccgatctgtatttcttctctttcagtttcatgctctctgaggtaaaattaatgatctttcttaatcaagttataaaacttcaaaactagttctaaagatcgatgcttgagaaatcaattttacttacgatttgtatttcatatatatagatatagcatcatctaactatcaacttaatcaattccttaagattcttctttgactaatttaccgagagtttgataaataattagggttttcaatttctgggttaaagtcaacttcagagcttgtttctgggtttaagtctaattcaaagcttggattcatgttgtgatggtgatattatgatttatgagggttttctctgaatttcagattttggtttaatatttgatgggaacatcatctggttcgaatcatcctcaccaaatgttaccaccacgtcaacaacaacgaagtggaggaggacttgaaacagctctttcactagtctcttcagatcaagagccgcgtcgcgagtctccagcggagagtgcgagttctcaagaatcatggccactaggagacactgttgctgggaagaagtcaatgagtcaaaagacagagcctgattctatggaacaaactgtgaatgtgatgcaccatgtttcgaatgcggacaaggtatcggtacgggatatcgctagggaaagagttgagttagttgcagagagaatgcatcgattaccggatgagtttcttgacgagttaaagaacggtcttaagtctatccttgaagggaatgtagcgcagagtgttgatgagttcatgttcttgcagaaggttgttcagagtagcactgatttgagctctgttacacttgttagagctcaccgggtgcagcttgagatacttgtag

SEQ ID NO: 148934 - DNA, 386 bp, Arabidopsis thaliana landsberg
cattttttacgtgcacatctctcagaagaattttaaaaggctaattaattgcggtactaacaaaaattggattgaaatgagttttacttggtgtacaacacatcttcccatgggtgacgatacagtggctgcttcaatctcttctgatcaaacgtgtgcccgatcaaaccgatggagcgagcaagaacaaacagaccgttgagataaccgatctgaacaatctcgtcaatctcttgtttagtgaacatcccacttccagctagaaggtccaagaagagagatccaatggctccatcaacgttgagtacgaggttgtttgcctttgagagcgtgtatgtctccactgtcactgcgtactccatgtacttcactgatgggaagttgga

SEQ ID NO: 148935 - DNA, 369 bp, Arabidopsis thaliana landsberg
cggaagaaagatcattggagctaccaacccagcagcttctgagcctggaactatccgtggggactttgctattgacattggaaggaatgtgatccacggtagtgactctgtcgagagtgccagaaaggagattgctttgtggttccctgatggacctgtcaactggcagagcagcgttcacccttgggtctatgaaacttgatgatctgttgctttttcagtaggtgtgttttctacattgcttgcttttgaacaagactgaaatattttaagttgaatttgattatccttctctactttgcttgcttgctacatatgaatacaacagctaccaactggtgatataaaatatatcagttattgcagata

SEQ ID NO: 148936 - DNA, 301 bp, Arabidopsis thaliana landsberg
aaccaaatcaaagttttgttaatgcaccaaagtgagagagtttagaccaatcacagaagttatggccattacaacaaaaacacataatgtgagaagatagcaaggcaaaaaaacgctcacagaaaccaaaaagtttatatgtttctttaatggtaaaatcaaagacaaaaacataattcttcgcttctgttttgtggtcgaatcaatgaaggttttctttttctaatgtcaaatggcaatctccaaggaaaaacttctattggtaagtaagtaaggttaggttcttaacctgacctcttga

SEQ ID NO: 148937 - DNA, 404 bp, Arabidopsis thaliana landsberg
aaaacataattaaaaattattatgaagaagaacggcgagacgaaacggcggaggaacgtggcggaggaggcagagcagggagaggatccggcgatgtgggagaatcttgaccggaatttcagacaagtgcaatcagttttagacagaaacagatcactgattcaacaagtcaacgacaatcaccaatcgagaatggctgataacatgtcgaagaacgttgctttgattcaagaactcaacggaaacattttcaaggttgttaacatgtattctgatctcaatactagtttcttgtccggctttcacgatgggaagaacggcacgatggtggtggtgctgcccgaactagagcttaatgaaccggaattcaaattgttccttcttagttggacccgcccggtttg

SEQ ID NO: 148938 - DNA, 272 bp, Arabidopsis thaliana landsberg
tagtcacttggcataagcaaaccaagctatccagccaaataattagtgttgggctagtggtgaacgtcatgcgaatagtctggataccctagtttgagtttaagttgagagggtttctaaacgatttttggaaatacattaactttggttcagactttctcgattaattaccattaaaaacaaaaggtcaatgttgtcgaaaatgtaaaagtataggcttcaaatagtacaatggtacaatcaatgcccaacgaaacgaacgaagcatatga

SEQ ID NO: 148939 - DNA, 402 bp, Arabidopsis thaliana landsberg
cttcactgttaaccattttctgttgcaatatccttgtaaagcttttatttaaacacatggagatttaacatagtattagtttctgtaagaagttcttctgaaaataactaaacccaaaagaaaaaaaggttgtttataaactaatcaaagtaatcatcatcatcatcataataacctttacctcaaaaagattgaacctttatacttcatttcttaaccttcctttgctgcagttgctgcttcttaggtccaggaacctctaatctcccaaccgaacacccacatttagcccgaaaaacaagcacggctcgcccattaggtggagccatcttcttcaactccgcctctaactcacggtgatgatcacgaggcaactcaaacaaacccttcttactaacactc

SEQ ID NO: 148940 - DNA, 169 bp, Arabidopsis thaliana landsberg
ctgtttttacattatatgaaaattgcttcaaaccatttttcattacaaatcaattatcatgtaagcataaaatctatacttatcgaaattgagagggattgaaatattataccaaaaaaaatggcgtagaagtggggaccaaagcaccgcctaaaacatgagaatgatg

SEQ ID NO: 148941 - DNA, 291 bp, Arabidopsis thaliana landsberg
atatccaaaagatgggtaacataccctgaatcaatcaatagtcatgaaagtaaacaagacctcaagtcaaattcggattcattcataaaattaaagaaaattaaagaaacaaacccaaaacgtggacacacataaccagaagaagagatctaaaatgtatatcaaacacgtctttttaacatgtttgacaaaattgaatagcatcctcaagacggtcaacggcaaatatcagctcatcttccgatcaaaagcaagcttccaagagaacgcaacagcagagcatagccaaac

SEQ ID NO: 148942 - DNA, 293 bp, Arabidopsis thaliana landsberg
gaccaaagagaaatacaagagcaggcggatcttaaatcctcacaataacaaccaagaaaacatgtaaactcaatagagatagtcaccaatttgctaactttaacaccaaactcaaaggacaatgccttgcaattctcaaatcagtaagaaacattaataatctctatgcatttaccagaaaataaattcatctcaaatctcatatgtgtcactgttatccaactgagttcactaagaaactcaaaataaacaaaatttgacaaagattacaatttctgtacttattctggaga

SEQ ID NO: 148943 - DNA, 403 bp, Arabidopsis thaliana landsberg
ggaacaatcgttacgaatcttactttcaaattaaggtggtgtctctctctctgtgtcttgttcttcttcttcttccttctctcgtctcgccaacaagaatgtgtttcaagatcctagtacgaccttgttaatttctcttataaagggcatgtaaagactaaaaagaggcatatgtcctacactaagtaggactctcttttttttcctacaaaagtaaatttgcattatttttactttttagccttccaaatagtgcaattctttcctaatctttgatttttttttattgataaaaactaaaacaacctaacaaaattgaaatgagaattaatgtgccaattcagcttataaagactaacataaaaactaaactagcttcaatttattgaaaaattaaaagtta

SEQ ID NO: 148944 - DNA, 341 bp, Arabidopsis thaliana landsberg
gcgaaattctctgatctctcttcattttattttccctctacatctctcccaacgatttccaaatctcacttcactttggctcctccacctgaatccatggatattgcttcgtcatctctctcacaagctcacaaagtcgttctcacgcgtcaaccttcttcccgggtcaacacctgctcccttggctcggtctccgctatcggattctctcttccgcagattagctctccagctttaggtaaatgtcgccggaaacaaagctcttctgggttcgtgaaagcttgtgttgctgttgaacagaaaacccgaactgctatcatcagaattggcacaaggggaag

SEQ ID NO: 148945 - DNA, 324 bp, Arabidopsis thaliana landsberg
ggccaaagagcttcttggttgggaaccaaaggtggctctacgccaaggactcccacttatggtcaaagatttccgtcaacgtgtctttggcgaccaaaagcaggattcttccaccacttcatcatctacagagtaactgtcgctggagattctcgtttctcttcgttttcatttttaattttgatatttctattcctgtcaatgtagtgatattgaaacctcaccgattttaaagttttattttttttaatgcaatcaccgtagttttgagcttggacatgcgagctgaacaaacaacaaacaaggaacatgtctttaaaagat

SEQ ID NO: 148946 - DNA, 425 bp, Arabidopsis thaliana landsberg
agaaaaaaggattcatttgaaacgaagaggacgaaaactctctttacacaaatgttttttgctttccatctttatataataaacattacaatgcaatgccactccttaatcccaaacctcagtgtccgtttgatggcctgaagtccctatagccgttgattccagacaaattcgggtttgatgaatctaaatcaaagtaagagtaagtagctgttgctgatgctgatacatcgtcttggttcctcatagccggtaaagagaagtccatatttgccatctgccattgcgattgtgtttgcccattaccatatggcgaggaagaagcagaatgtggcatgtattcaccgtaagactggtgaaatccatcatcactgtaactcctagacctgccagagatcccgagatccgcaccgccatgatatgag

SEQ ID NO: 148947 - DNA, 600 bp, Arabidopsis thaliana landsberg
caaaaccccaaactctctttctacgaaggcggaggcacgcttctctgtctccctccactctcgagtctcgtcccctcttggtcagttttatgctcaccatttgaccgattcattcttttttttacttccgatctcaaattatcgagtattggttgatctcatcccccttataggctcacatgttttgatagtaatgaattgaattatcaattatgggtttgggagagaattttttggtttttttggtaaagcacaacactttattttagattatgcatctgcttccattgatgttagctgatgtgtttgtccaaatttcactctttttttttttctgtaatgaattgagaattatggttctgagctaggatccatcctttctttgtagaggagtatactttatcttagattctgcattgatttcagctggttggtttgtccaagtttcgttctttttctgatggaagtatcttttcagtttcactcaggtttacttatctcacagtggcttattttgttttgttttttttgcagtgtgtgattatctactttggtgttgttgatgctggagatctcttattcagattgatcacgcctgca

SEQ ID NO: 148948 - DNA, 773 bp, Arabidopsis thaliana landsberg
tggcaaaagtagtaaataaggaagaaacaggaggggcgttttcgggagaagaaggaggaatatgagtgcgatttgctgtcgtaggaatctgggcaagacaataaaaaaggcaataccttcacatcatttgcatctgagaagtcttggtgggagtctctatcgtcgtcgtatccaaagctcttcaatggagaccgatctcaagtcaacctttctcaacgtttattctgttctcaagtctgaccttcttcatgacccttccttcgaattcaccaatgaatctcgtctctgggttgatcgggtatctctctctcatcagtcagatcccacatatatatccttcgaatgctggctgattcttctctttctttgcagatgctggactacaatgtacgtgaaggtcagacttgtctacaacagcctctttctctctctctctctcgcttttcatcgatctcctttttttttctcacacttacttcttcttctccagggaaactcaatcggggtctctctgttgttgacagtttcaaacttttgaagcaaggcaatgatttgactgagcaagaggtcttcctctcttgtgctctcggttggtgcattgaatgggtataccaatgataaagacttctcctttcaatctctattagtaatagatactctcctctctctctctctctttatgtcgctatcactcctcatattcattatctttgcagctccaagcttataacaatgtgcttgatgacattatggataactctgtcacccgccgt

SEQ ID NO: 148949 - DNA, 728 bp, Arabidopsis thaliana landsberg
aaaactttggaatattcttggatcagctcctacatctaatcttgttacattgatataaattgtttatttcatgttttactgtttcatacaaatatattgtttgaactgagatcgtgaatggtcttattctatatcattactaaaacattttcatttctgttctttcagaaacatagattcggttattatcgtaagaaatctaatacaactgtgaactactacataaactgaattgttcaaaagaaaacatcgaaataatatacagaacaaaaagggaaaacaacaagagctgtgaaccacaaaggaattaaaccgggttttgactctccttattggaaccggaactaaaccgggatttcaatcctccttatcagaaccgtaatacctcttaaacgctctgggtagataaaccggaatcaaaacaccaaagagattaaacgaccaaatccctaaattagccgccgccaaaactttcccggcatacatccgccgcgcagaaaccgtccccgtcacatcctccctcgagaactcactcataatccactccacaagagtcaaaaccctcctggcgttgtaaacaatcggaacaagaatcctcgccggagcagagaagccaaacatggtcgctaatccttccataaaaatctgactcgctaaaagaaacacgtgcggtgcagctgcgctaacaccgttcttatcatcctcaacgattccttcgaagatgtaac

SEQ ID NO: 148950 - DNA, 448 bp, Arabidopsis thaliana landsberg
gtgtaaaagaaagcttcatttgaagttcgcatttggcactgatacttacacatagttcttatatcagatggattacatactccacatttcacatttgacttcgactaaagatctgaatcagatttaaaggaaaaaagagtggtattgaataggcacaagagttccgactagtgaaatctcataaaatcaaatctaacaatgttcccatatggaggtgatataaaacacctgaggtttaaattacatacgggagatcagaagagggacagaagcaggagcttcctcttccatctcatgttcgagctctccatagcgctcaagcacacgcatcctgcagtcttcagctgccagcactccggttgaataagcaccgtgaactgatcccgggtagctcgagctagtggcttcccccgcaaagaatagattatccaatggcactctcagtctc

SEQ ID NO: 148951 - DNA, 143 bp, Arabidopsis thaliana landsberg
aaaaaacttggctagtttttctccacaaggttttttctgcaaacatgtctcaacttgcattgtcatctcaagaagagtctccaagtagtaataagattggtttatcttctcttcttctctctgactttcaggtcttttgctca

SEQ ID NO: 148952 - DNA, 657 bp, Arabidopsis thaliana landsberg
agagatcgatgaaggattaaagacgatcaataacggagatagagatcgattacaataatggatgaagagtatgatgtgattgtccttgggactggtcttaaggagtgtatccttagtggcctcctctctgtcgatggcctcaaggttttctccttgattcataattttcttttaccattaaattgtttttgtgcatcacatccagataaagctttaggtttatgtttagttttcgcttttgttttattatagttatgaatatagtatgcaaaattgttgcatagtatgtcatcaatatagagttatgaaatataataatccaatttataacatttgatcttttgaatgagtttttgttgttgcaaaacaaaaagcgaaattttgtttcatagatcataggtaatttaaatgtggcataggaaacatatacaagttagtagatttattttcaaatatgtgcaatcattaacgaaatatagttttttaaatttaatcttgggatctaaataggtactacatatggatagaaacgactactatggaggagaatcatcctctcttaacctcactcagctatggaagcgttttaggggaagtgacactcctgaagaaaatcttggagcaagcagagaatacaatgtcgatatgatcccaaag

SEQ ID NO: 148953 - DNA, 120 bp, Arabidopsis thaliana landsberg
ggcgtcagagtacccagaggagtatgatggtggctacgttcagatgagattatcttacagcccggcggcccatctctttctcttccttcttcagtggactgattgtcatttcgctggcgc

SEQ ID NO: 148954 - DNA, 172 bp, Arabidopsis thaliana landsberg
gcggcggagaaaattgaaatggagctcagcttgagcacttcctccgcttctcctgcggttttgaagagacaagcttctcctctgcttcacaagcagcaagtgctcggcgtcagctttgcttccgcgctcaaacctggaagaggagctcttcgattccttcccgccgtccgct

SEQ ID NO: 148955 - DNA, 782 bp, Arabidopsis thaliana landsberg
caccttcacaactctctcataatctctctccctcactctaacaccaaaagaagaagaagcattttccaaagagaaagagagagaaatgggttccaagattgtccaagttttcttgatgttggctctattcgccacttcagcactcgctcaagcccctgctcctactcccaccgccactcctcctcccgcaactccccctccagtcgcaactcctcctccagtggctaccccaccacctgctgcaacccctgccccagccacgccaccacctgctgcaaccccagctcctgccactactccaccgtcagttgctccttctcctgctgatgttcccaccgcctctccaccagcaccggaaggtcccaccgtgagcccaagcagtgctcccggaccttcagatgcatcccctgccccaagcgccgcattctccaacaaggctttcttcgccggaaccgccttcgccgctattatgtacgccgccgttttggcttgagaactttttttatataattttttttttatccctcgaattatttcaaatctttggtgttaatgtgagaatttgatttattttggtatttcgctatttgatcgttaattttttttatcatgatttcgtgtgtcggaatggggaaagtaatcattatcttggttgcagctaatggaatgttgacacgtgtaatttaccattggaagggcttcatatggttgtgtagaggaggtggaattaatctgtttatgtaaatccaatgataataaatcaatttcattactctttcact

SEQ ID NO: 148956 - DNA, 1203 bp, Arabidopsis thaliana landsberg
caattttggcctctcgatttagttttttgaaaccctaagctcgattttgatcctccggcgtactcgatttcgccgccgaatctctgcttgtagcgagtgttactgttcaatcggcaagaatgtcgatgtcgaagagttcaaagatgcttcagttcatcaactacaggatgcgagtgacgatccaagacggaagacagctcgttgggaagttcatggcgttcgaccgtcacatgaacctcgttctcggcgattgcgaggagtttcgtaagcttccaccagcgaaagggaagaagatcaacgaggaacgtgaagatcgccgtacgcttggcttagtgttgctaagaggtgaagaagtgatctcaatgactgtcgaaggaccacctcctcctgaagaatctcgtgctaaagctggctctgcagctgctgttgctggtccaggaattggtcgtgccgctgggcgtggagttcctactggtccgttagttcaagctcagcctggattatctggtccggttcgtggtgttggtggacctgctcctggaatgatgcagcctcagatctctcgtccacctcagctttcagctcctccgattattcgacctccgggacagatgttgccaccgcctccttttggtggtcaaggtcctcctatgggacgaggtcctccaccgccttatggtatgaggccaccaccacagcagttttctggaccaccaccgcctcagtatgggcaaaggccaatgatacctcctcctggtggtatgatgagaggacctcctcctccacctcatggaatgcaaggaccgcctccgcctcgccctggaatgcctcctgctcctggtggttttgctccaccgcgtcctggcatgccaccacataatcagcagcagtgattaggttagcagtgaatgaacaggactcttgtctcggctttttactgtttttgtcgctattttcttgagattgtgaaggctttttaagttgtttgattgaacttcctcaggtttacagtatcgtgctatcatgttacctttcattgactttagccgcaatctctcatctatcttagctttcaaagtttgtagatttgttgacgagtgagttgtctttgccttatcttcttgtgttttctttgaagaacgaatccattaaactttgttatgtcttcttaaggtgaacatctatctttaggattgatttaca

SEQ ID NO: 148957 - DNA, 272 bp, Arabidopsis thaliana landsberg
  unsure (1)..(272): unsure at all n locations
ggtgcaggttccaattgaccagcaaatcggagcaattgattggcttcaagcccagaatgagattcagcctcgctgtttcttctctcgtcgcagtgacgttggtcgtcccgatcttcttctcgatctagctaacgagaacggaaacggaaacggaaacggaacagtgtcatctgatcgtaatctggttagcgttgcttgtatcggctctgcagttttcttccgngaccttgatcctttctctcatgacgattggagatccatcagaagggttt

SEQ ID NO: 148958 - DNA, 739 bp, Arabidopsis thaliana landsberg
gttacacgaaatcgatcttccgcaattcaattttggtctccgttaattcgcactctcgttctcgtcttcgtcgccggaggtcgtatcaagtcagcctcaacgatccgatttgttttttcaggtgatctatctttatattctgctagaaattccaaaagttgtgaaaatttcgttcctcggatcggattatgaaactctctgcgtttgtttagtgattaatcgagctcttactcttgttccttttgattcttatgctttctggtgtatatatacgagattttagttgccaattttatagttgactgattgatcatttgagattactgtagagatccgccctggagaaattgcgtcggagttcttttacttattgcatgattttgtctcgaatttctattgctgctgtggatttcttcattttcgagattgtgcatatcggattcgagtacctttatctactcgttgtgttcattagatcatctttgattcctaaattcgatttttggggcatattgaaatggagtgtaatagtgagattatagaagataatgcattagctcactttgagaagtaattattagaggtatctctgttcaattttagcctgatctatttttatctcttatgctttattattgcagacaaaggttgattctctgggtatgagttttcttctatgagacagacatgttgtatttggtgcttaatgactaggtaatgaaggctatatgtgatagat

SEQ ID NO: 148959 - DNA, 648 bp, Arabidopsis thaliana landsberg
ataaaatattatattttttctgaatatgatgtaattcaatttttttaaaacggacatattttattcaacctatgaagaaataatatgtgtataatgtctcacatcgcttagaaaaattggacaatggttcagacccatattataaaaggaccaaaatgattctgattacgaatgagcaggaagcttgatttatcaggcgtccaaaattaaaatagttatccgattttactcggattttttattttaaagaattgaaactttaaaatgtttcaaaaaattataaatattataactttatcaaaagttaaatattataattttaaatttttttataaagtttatctttaaaaaatgctttaaatatttataattttaaaacttataaagttttaagaattataaattgaattttacaagaaatttaacattataaatatataaaaaatttattaatacgagacgatatattacagaaaaaatcttaaatataacaatcaaaattcaatgatgaattttgggtcgatattgtatttttataagttccaaattttataatattgaaatttataagaaaatgacaaaattatgtttaatttcacgggactgggttatatggtaggacgggtttgggtggataataattacgat

SEQ ID NO: 148960 - DNA, 477 bp, Arabidopsis thaliana landsberg
cccactctaatcatcaactctattgattccacgcgatgacgacgttttcaacgagctttcttttccttttgttggttttctgcttgatcgattcactagctgccgatgatctccaacataaatccggtcgtgacgtctgctccggtggttctgatcttagaacccccgatattcgtcttaaccggccgacagactctgtcgtcggaaactgcccgacggaggcgagtcctttagttatggctgacgacgagaagtacggtaacaaaatggttatcagtctcactcctcgcctttatgactatgtcctcaacaacgttcgtgagcatgaggtgtttaactcttcctctgctttgctttttttcgtcttccacttaatcagatttacagtgatcttacttgtgccttcatttatcttttagattttgaagcaacttcgagaagaaactgccattagtcaaattcaggttcttttactgt

SEQ ID NO: 148961 - DNA, 99 bp, Arabidopsis thaliana landsberg
aggatcattgatcaccctcttgagaacatctcgagctttcccagatctatctgagctcctgggtttataaatcgcttccttcacatatcgatggggtgc

SEQ ID NO: 148962 - DNA, 383 bp, Arabidopsis thaliana landsberg
atcaaggttactcatagtccagggctgtgaaattgagcttgtgatgtcgcatagtatgtcccatttcagtcatagcaatcagtgtgcatgaaaaattaagctactgttttgatacgattgccaacgtgagagtgagaaactaagatgtgtgtctacattaaaacaaaacaaaaaaaaacgggtctacgcacgtccaaagtatcattaacctatcttcatttggttccccatgatatccacatctcagattaggacattaccactttgtgttgcaactttgctttgatgcatactcacatgcatgttttatttgatttttcagtcatctgctgcaaccccttgtggattgtactctgacacttggaagaatactcgagaaaaag

SEQ ID NO: 148963 - DNA, 363 bp, Arabidopsis thaliana landsberg
tacagaatgtggagggagatcaaactactggctgaaacaaaacccgtcattgcgtcaatgtcagatgtggcagcaagtggaggctactacatggcaatggctgcaaacgccattgttgctgaaaatttgacattaactggctcaattggagttgtcactggtgatctttctttttctacttaccaaagagaaagttttgtgctctgaatctttgtacaactatctctttcacccagtcgccatgcttgattgcttctgtttgttcttcttgttgcagcaagatttaccttggccaaactatatgaaaagattggcttcaacaaggaaactatatctagaggaaaatatgctgaaattctgggg

SEQ ID NO: 148964 - DNA, 427 bp, Arabidopsis thaliana landsberg
gtaatcgcttcttctgcgcgcgtggaggcaaatgcttcacatgttttcttgagctattaacagaggcccatggtaagaaaacaccagtaccaccaccggttcccatcacattgggacttggtaatatcattggttgaaccggtggtggtgccatcatgaccattggaggacgtaggactccaagttttggcatcatgtcaattgaatgatcataaccattgaggaatggagttggtgtcatttggtagggttgccacattgtcatgacaccgtcgttgcgaggactgttgggttgtgaatggttatgatatgtgtcaggtcgaatacgaaagaatgtgatgcttactcttttgttttgtgatggacacattacatgtcttgccatgtctgcactgttccctctcatcaccaacaaagatctataaag

SEQ ID NO: 148965 - DNA, 1574 bp, Arabidopsis thaliana landsberg
caagtgatacgccggcaacgacaactgttcgccgttgatttccaccgaatacctgactatctgcgctgcgacggcaagaaattgaaaattatggcttacggttagtcaaattttcaatttttatgttggggattttcatgagtaaagatagattcataaaggtctagtctttttgggatctgatagaattcaaagtgagaagtcgtttggtagactagtgtaggcaaattcggtgaatgtgatataagcttgttacaggaaaaatgggaacttgctatatttagaacatttgaaatttaggtttttgtatgacataggatccaacaatagattaacgaatgataactgttggaaagagccagccttgatctattgttaagagaattatgacccttgaacttatcttccaaccagcttccttgtgatttgagagagaaaccaaatctgattttcatgaaatccaaaacagagctccaatgtcggagctgcttcctcctcctcctcctcctcctcctaggagggattcaggatttggagatcctgcattggtattccctgagtttgctgccaaacaatgcggtctcgaaaaagttatagaggaagaaggagaaggggaagatagtagctatggcaaaggttcttttgatctgagttcaagattctcaagcccttccatttctcgaaacaggtttgatgatgttgaaaacccgaaaaaggctttgtcttttaagcggcctccttctgcgtcgagactgtctggctttcgagaggaagaagaggccgatcggagtagaaaatcgggttcctttgtggatcatatcggtcaggaggacaagagaatatgcgcctctggatgtttcagaaaatgctgcgcttgtacctgcatgtttgtttctgttgtccttataatcgtcttgttggtaggattgtctgcaaactcttcaatcaaatctatactacctcaggtgcttgttacaaacctcaagttctcgagattggatatctctaaatcatcgacagatcttctgatgaatgcgaacttgaacacggtgcttcagctctctaataataatgacaagacggtgctatattacagtcctatgaaagctgatatatcttctgagaacataaacctcggaaagaaaacactttctggattcaagcaggacccgggaaatgttacctccttgaagatcctcacaagactcagaaaatccaaagtgtatgatgttgatgctacattgctgacaaacaaagagaagacgcttgaagctgtggttgatgtgttcttgagagggaaactgagtgttgattggttgggatttaaggttcatataccaattgttattgcgtgcgagagtgtgaagcagagtgatgtgataaatggtctcaaaccagcgtgcgatgttcgaatcttttccgaatgaaaacaatgagagctattgatacacaaagaccctctgatctttgttttgttctgttcctttttgttgttgctaatttactcgttgtagattgatgaatacatagaaagagagaagtgactcaactttgtttctctaaacttaacatca

SEQ ID NO: 148966 - DNA, 519 bp, Arabidopsis thaliana landsberg
aaagaaagagaaaaaaaagctttcgtagtgtctattgaaaccagagaaaagccaaaggggatgcaaccaacatccgtcggtagtagcggcggtggtgacgaccgaggaggcagaggaggaggaggagggctaagtagaagtggactatctcggatccgttcagctccagcgacttggcttgaagctttacttgaggaagatgaagaagagtctttgaaacctaatcttggtctcaccgatttgcttaccgggaactcgaacgatttaccgacaagtcgcggctcgttcgagttcccgattcctgttgagcaagggttgtatcaacaaggtgggtttcaccgacagaatagtactccggcggattttcttagtggttctgatggatttatccaaagctttgggattcaggcgaattacgattacttatcggggaatatcgatgtttctccgggaagtaagcggtctagagaaatggaagcactcttctcttctcctgagtttacttctcaaatggtaaac

SEQ ID NO: 148967 - DNA, 650 bp, Arabidopsis thaliana landsberg
ataaaatattatacttttttctgaatatgatgtaattcaaattttttaaaacggacatatattattcaacctatgaagaaataatatgtgtacaatgtcccacatcgcttagaaaaattggacaatggttcagacccatattataaaaggaccaaaatgattctgattacgaatgagcaggaaccttgatttatcaggcatccaaaattaaaatagttatccgattttactcggattttttattttaaagaattgaaactttaaaatgtttcaagaaattataaatattataactttatcaaaagttaaatattataattttaaatttttttataaagtttatctttaaaaaatgctttaaatatttataattttaaaacttataaagttttaaaaattataaattgaattttacaagaaatttaacattataaatatataaaaaatatattaatacgaaacgatatattacagaaaaaatcttaaatataacaatcaaaattcaatgatgaattttgggtcgatattgtatttttttaagtttcaaattttataatattgaaattgataagaaaatgacaaaaattatgtttaatttcacgggactgggttatatggtaggacgggtttggatggataataattacgat

SEQ ID NO: 148968 - DNA, 457 bp, Arabidopsis thaliana landsberg
gagatctggttctgagtctcctccttctgctccgattgtggtgaacggaaggaggtacttagatctgaacgattctgatgatgaggaagtcggatctgaagatgaaggtgtggttagaatcaggagaaaactctctgatgattttgatagagtcgctgaagaaagcaagactaaacatgttgaagctaacaagaaatacgattaaatctgagtttgtggagaagaagagattgattgagaagaagaagatcgtaaaagttaacaagacaagttcaacgaggtcatctccaagactggctaagcgtagctctaattagttttcatatttagtctcttcaataatttctcttagggtttagaattgttgagtacttagtttgtttttttgtatttgtgcttataaatatggatttatctatgaactctgaccaatgaacttgaatgcatcaagatattt

SEQ ID NO: 148969 - DNA, 542 bp, Arabidopsis thaliana landsberg
aagcatatatatgcgatgtgtggaagattggattaggacttgaaagagacgcacgaggagtggttctgaggttagaggttaagaagaagatcgatgagatcatgagagacggtggagagtatgaagaacgagctatgaaggttaaagagattgtgatgaaaagtgttgcaaaagatggaatatcttgtgagaatcttaataaatttgtcaactggatcaaatcacaagtgaattgatagagtttcacaagaagaaatgaaatgtatccaattcaagttttcaacccaacatcaaacaacttcttagtgtgtgtgtatgggaaaattatgaagagaacaacaaaaaaaaaaaaacagaggatctctagcatttttccagtagaggacaaagagtaaatggtacacttattttaccagcgatgatggtaaattatggagatacagtaagaaaaacttaaaaataatgaatccatcatcaccttgttctgctctctccgcctacggaatctccccgtgggcgaaccttgcgattcagtgaccttt

SEQ ID NO: 148970 - DNA, 372 bp, Arabidopsis thaliana landsberg
aaacggtatgcactcgctcatactctatcaaataggacattatatattatatatatatatattgatatgcttacagagtttacagtaacaattgtgaggtcagttattgtaatgttccttttttaccaagaaagtgttggatacatttctatttattacaaggagaatgtatataaacaaagttttgaaactgagggagtcgctaagatcttacggttaaacgtgatataacctctaacatgttcttatctcggcgatggtgtaggcattccttttagttgttttatagagtttgtgatttatgtattgggtttggcgagaatatgaagaaaactcggaagaaagcatagttaactgtaagcaataaactag

SEQ ID NO: 148971 - DNA, 394 bp, Arabidopsis thaliana landsberg
gacggaactcgtatgtccagcgagacacaggtggctccaccagaagagatcagaagaaaacgatcatttaaccgcttgggtatacaacatggttaagaactcgggctctgtcgatttccggttcatgaccaggcattactgtggaaatgcaatcaagaagcttatgttcgggacgagaacgttctctaagaacactgcacctgacggtggacccaccgtagaagatgtagagcacatggaagcaatgtttgaagcattagggtttacgttcgctttttgcatctctgattatctgccgatgctcactggacttgatcttaacggtcacgagaagattatgagagaatcaagtgcgattatggacaagtatcatgacccaatcatcgacgagagg

SEQ ID NO: 148972 - DNA, 515 bp, Arabidopsis thaliana landsberg
accgagagtttgtttgaacggtcctcagaaattcggagcttgtagcttctcggtgcggtgccttcactttaatggcggcaatatcccctgttcaatgcttattctcttgcaattctcatcatcatcatcaacaacgcgagcaggtgaatctctctgttcttatttcttcataattagcgagaacaaccttcttcttgttatgacttcattcctccgtttttttcaagtagagtgggtcgctttggagattgggttctagggttttagtatcttcgagtctatggaagctttctctgttctctggactccatttgaaccgaaggtgattatgttctagttaacgatttcagtaggatttggcccttgaagctaggattctgtgtaatgcagttggatatgagataattgattgcaatcttttgggtctaataaaacaggagaactttgatctgtgcagtcaagggagatccagaagatgcctttaagaagactgtcgaaatcgatcggatgattga

SEQ ID NO: 148973 - DNA, 221 bp, Arabidopsis thaliana landsberg
attgcagaaaatgattcatattagctcagactgtatgaaacacaaacctcgtgatacaagactgattaagagaatcagcaacgcagaaatacttgataaatcccacaaaacacaaatggcgaacacacacgaagtaaatacgaaacccgaggaactatatcgacacacacaaagagaaacggttgttaatagagaagaagagttaccattttcttacaaat

SEQ ID NO: 148974 - DNA, 467 bp, Arabidopsis thaliana landsberg
gataaaaataccgttgaacagcggaattattccacgagtcaacaattatcgtcaacatggaaacaacaagaagatgactcttgaacttaaataaacacacatttattatcagagtggttttctaaggccatccccagaaagccaatgattcaccgtgatgatcgtgcgacggtgaagtggtgggcacaaagacgtcggcgaaacagctccggtcattgtcatgatcactggcgttgctgttgtcttggatgggtacgatgcttgggaagtaagagtcacagctgtctagtagttgaggtgcgtcgtcgtctagtaccgcgctcccaacgctccctgaacttaaccggtcctcggttttgattgctgccgcattaatgtaaaccggatcaagttggtttggttcgggcacttgaccaggtggttcattagctgtctcttgtttgccctgaagcttttcggtcagggaa

SEQ ID NO: 148975 - DNA, 130 bp, Arabidopsis thaliana landsberg
ctctttctcattcaattcaatttttaatgtaatttcttgtttgatttttctattttcttcgagaaaacaaaattctcctgtaaaattaatattataaaagtggtttctttttcatttatgtttatataat

SEQ ID NO: 148976 - DNA, 102 bp, Arabidopsis thaliana landsberg
actacaaacatgagtttggtcgctcagtttgcaactcatcctcccgcacggccgagaagcaccaagttgttgtgctcattgcaaagcccaacacaagaacaa

SEQ ID NO: 148977 - DNA, 439 bp, Arabidopsis thaliana landsberg
aagcaaaccattaaaatttgtttttaatataatattgagttctgaaaactcagaactctgcatcacactaatctgttcaatacttcatacaacacaagcaatgtctcaaattttccgaaaacaaaccaaaactaaaaccatccttgattcactccaatagacaaaaaccatgagattagaaaacaacaatgtagctcaacaaaaacaagagtgcagaagctaaaagggtaaaggtgaagatgaatggaacttcaattggtaaatttaagagcctcagtaccggcggaatccacggtcagcgactcgagcagacggacactcgtacgccctgtgtcctcggccaccacaattgtgacatattatcatagcactaacgccttctctgtctctgctcattctgctcaaaccacctctttgcataccaccatctcgaaccctg

SEQ ID NO: 148978 - DNA, 430 bp, Arabidopsis thaliana landsberg
gatcatattaaaattatcgtaattaacaaactaaacaggaatcgcatatctgcaatagtaactatttcacagattggttttatcttttctatgtcttgtccttttttgtccaatttaagaccataaaaggagaaaatcgtgtgaaagacaagacagatagacagacacgaatattcaaaaaaaaaaatttcttttctctttctaacaccacagatttcgcaatcgtgttttgatctgattcttccaggattctcccggtggcggagagaagaaacaaaggaaacccagaaagcatttttctcaatggcgtcgactacacgagaaaagtttgtatctttcataaacaacagatggctcgtcttcgtggctgccatgtggatacagtcttgtgctggcatcggttatttgttcggaagcatttctccggtta

SEQ ID NO: 148979 - DNA, 540 bp, Arabidopsis thaliana landsberg
  unsure (1)..(540): unsure at all n locations
tgagaaacagaacattaaaagcttttttatttatcagttttattcatggcaagcttagggacagggcataactaagatgaaagcggagaagaagcacaagtgcgaaaaagaaaccaaattgaaagtgttattaaaagtattcagagagaccaattggcttcacttcctcgacgagggatactgttaacacgattgtacacatccaccttgaagttggcaccgcatagaactccttcactgtctaccctcggcatcgccttgatcttgttcattggatgctcaaagctcattaaccctccttcactatggaacatacaccctgccaaaattcatcaaacacttcactagttacatatctcattccatcaagtacatacaagtctttgtgttaccaagcatatcaagatnnnnnnnnnnnnnnnnnnnaatggagcaaaagatttagcacaaccctctttgataacatccaaatcatctgatataacaacagatccatcagcagctatgccccagtatagcttcacccctccatcagatccc

SEQ ID NO: 148980 - DNA, 1467 bp, Arabidopsis thaliana landsberg
  unsure (1)..(1467): unsure at all n locations
ctctctctgttatttcatctctagaaaagggcacaaaaaaccaaactttacgatttctcctctctggaatctcgattctgtatgatctcttcgatctaatcgagtcttctaaacgttccgtgtagaatttcaaatctagggtttgctaaagcttgaacctttcttacccttttctctcgaagaggttttgattcctgggcatgaatttttccctaatcttgttaccttcgaagcataacaacaacgaaagatgtcagattcaatccaggaaagatacttagttggatacgcactcgcagccaagaaacagcatagtttcatccaaccttctttgatcgaacactcaaggcaacgaggcattgatctggtcaagcttgatccgacgaaatcgttgttggagcaagggaagcttgattgcataatccacaagctttacgatgtgtattggaaggagaatcttcatgagtttcgcgagaaatgtcctggtgttcctgtaatcgatttgcctgaggctatcgagcgattgcacaatagggtttcgatgcttgaggtgataactcaattgaggtttcctgtttcagatagcgagagatttggtgtcccggagcaagttgttgttatggattcgagcgtcttgagcggtggaggagctttaggggagcttaagtttccggtgattgctaagccgttggatgctgatgggagtgctaaatctcataagatgtttttgatttatgatcaagaagggatgaagattttgaaagctcctattgtgttgcaggagtttgtgaatcatggtggtgtgatctttaaggtctatgtggttggagatcatgtcaaatgtgtaaagagaagatctttacctgatatctctgaagagaagattgggacgtcgaaagggtctcttccgttttcgcagatatcgaatctgactgctcaagaggacaagaacattgagtatggtgaggataggagcttagagaaagtggaaatgcctccgttaagtttcttgacagatctagcaaaggccatgagggaatcaatgggactcaatctctttaacttcgacgtgattagggatgccaaagatgctaataggtaccttataattgatattaactactttcctggatatgctaagatgccctcttacgagcctgtgttgactgagttcttctgggacatggtcactaagaagaatcatgtctgagaaataatctgttggggagttagcaggaacattgttggggaggatttgtaccattgcaatgtgttgcaactgccattgcaattctggcctatggtgactagctgctttgctaattttcatttggattcttgaacttgtgctttttatatttttttagttgtttctcttttgtttacttcnnnnnnnnnnnnnnnnnnnnnnaaatgcataactgttgctactcttgaaaagcattgaatctctaaattcttggcaat

SEQ ID NO: 148981 - DNA, 745 bp, Arabidopsis thaliana landsberg
ccttgaggatcctcaagagacaacaaagtcggaaaataatgttcttcagggtaacaagattcaacatcaaggcatggtaatttgaatttcctccatagctttctctctttgatcaccattagagcatgacgtttcgctaatacgaagaactgagatccaacacggaagtcttggtactggatctcaggaagcatcgcgtcgtctcctcttgcgttgtatcgtttcagaaggaacggttcatcggagaggatctcgatgaagctttgttgatgatgatcggagaagaggtggttgtggatgtaagagaaggaatggagagggatacagtgttgtgagattaaagcgaaatagagattgttaggatcgtcgaggattgcgtttgctagtaatcgtcgttcggcggagattaacgtcggagaagctcgtgcggttcttctcgccgggatgaacttagcgttgattgatgaagaatcgagaagaggagagacggaggaggttggatctgcgtggatgtaaacgttgtagagatcttggtgaccttggaagaagctttcccagagaggtaagaaggttagatcggagtttgttaggaagaggaaagcgatctttgggggtggatttggagagagggagatgagacgacggttgttgttggtggaggaagagacgacggcgcggtggaagagagagaggtcgtctaggtcatcggcggtggaaatgagggtagaggaagagagaaggatgt

SEQ ID NO: 148982 - DNA, 191 bp, Arabidopsis thaliana landsberg
tgccgctttcttcttcttcatcatctctctctcaaaatcaccccttttaaagttgtttcctttatacgcaaaagtgaacgcagatcttaatgcagctactgtgatttcgattcttagggtaaatatattcttttactcattggattggcactcctcagcatctgggtttttgcaaaggtacaatttttatt

SEQ ID NO: 148983 - DNA, 161 bp, Arabidopsis thaliana landsberg
gtacttacttcttagggtgattcaggacttgataattataggcaaaaaatggttttgggtttaaactcaaagaacagaagatgctcatcggttcaagttgattacctgatccacattcatgacatcaagccttggcctccttctcagtcccttcgatctct

SEQ ID NO: 148984 - DNA, 274 bp, Arabidopsis thaliana landsberg
  unsure (1)..(274): unsure at all n locations
agataaccgaacatcagaggtagataaaccggagatanccgattaaatggcggacatagcgattttggtggcggaggagtacgaaaggaggatgaagcatacgacggtgggttcgagatcatcgccggtggaatttgattggtggaagataattccggcgaagatgactatagcttttgacaagatgaagattgagagtttgaagaagaattttgaagctaaatctgagtttgctttagccatctctcatggcttcttctctgcttgattccat

SEQ ID NO: 148985 - DNA, 417 bp, Arabidopsis thaliana landsberg
aagaatgtataaaattacaagatccctttttatggaccgaaattattacacaatgtaatcaatgttgaaaaaacaaagatagaacctaaaaatttggttagggacgaatctcatcccagttggagtcatttacagatgccaaagcaagaaaaaaaaaagtgtatgtaggagaaaaaaaaaaacgagaaataaagacaattaaactttgcagaaattgagttgtccatttattgtgttgtttgcttctgtacacccacccaccaatgcgtacctccttttttacactgaaacacctgattcaaaagctccacctctgttcatgtctggatctttggacgctcctctcgcctgatgttttccttggtgctgcgaccaatacccgtatgccctcaagactctgtctagcagttcttgtgg

SEQ ID NO: 148986 - DNA, 286 bp, Arabidopsis thaliana landsberg
aattcatggcattaacaagcctggacagataactttgttgggttgagttggtatgaagtggtttgcatatttactgtcaggagatggaactgtcgttgtgggaaatggttggaaaggtttttgtgaggcgaatggtgtgatgttaggagagacttttgttttggaattcattcccaaagatgatacaaatcatgtatttaagttctacaccaagtagggagaccaaatacgtaaatgttagttagtactttttcaagatttctcaaatgttttctccggatatcac

SEQ ID NO: 148987 - DNA, 101 bp, Arabidopsis thaliana landsberg
  unsure (1)..(101): unsure at all n locations
aaatcgataagtaataataatattatctcttcttctctgcttccattntgggtatcgataaaccaccacatccttccctgataccctaaccacaacaatcg

SEQ ID NO: 148988 - DNA, 1400 bp, Arabidopsis thaliana landsberg
agcaaatctctaagacttgttctcattttgtttgttcaaaatcccattaaaaaaaaacacaatgcaaccttaaattatttccgtttagtctctctcttcacagtcctgacctctctcaactctcacaacattaccaaatacatcccataaaaaacaattctttaaaaaaaatatattttgatataaacagaaaaaacaattaatggaggctgcaaaagtttacacacaagatggcaccgtcgacctccaaggccgtcccgtcctcgcctccaagaccggtcgttggagagcttgctctttcctcctcggtatatgttttcgcaaacctcagataactattttcatctatagataacttgaaaaatataaaaacataaatctttatgtagtcttttgtgtctttatgtgtgtgtgtgtgtgtgtgcgagaagggtatgaagcgtttgagaggatggcgttttatggaatagcgtcgaacttagtgaattatttgactaaaagacttcacgaagatacgatctcttcggttagaaatgtgaataattggtccggtgcggtttggatcactcccatagccggagcttacatcgctgactcatacatcggtcgcttctggacttttactgcctcctctctcatctacgtcctggtattaattctacagtctcttttatttcttatggttaaaaatacgaattaaactcaactaaaccagacttttacaactttttgaagaaatcgaacttagaaatgaaccaaacaaaatatattaatttaaaaatagttcaaaaatctgaactggtgaaatataattatacgaaaatgatatcagtaattaataagagcagagtctacattatgtatgacctatttttttttcttaagcttattaaagttttaatggactcgtcaatttctacttttatcttctcttaaatattctatgtttcagatttttcatatcaatgaatatatatttactcaaaaaattttgggttggtcatgataaagaagtatagatgtgtgtgtttgtcgcgttttggacgtacgatcagatagggtccgtgagcatttatcccaagaagatccactgccacaaaaactatttgcatttttctccactggttataatacttgaggacaactgtgtggtttctgttaaagtggatttatattatagtatgagaatattatcttgaaggatcagaaatttccatatatgtaggggaaaaattggtatgaatgctaagcagactgtttttccttcttatatagcagaggattttttacatcaccttgacggctgtttgacagcactgatgtgacatctaagtagaaatatataggccttgtttagttgtttttataggccatgtttctataagtcagagtcattaatt

SEQ ID NO: 148989 - DNA, 415 bp, Arabidopsis thaliana landsberg
ggtagagatggctagagtttgtgtaatgatgatggctatggctatagctatggctatgaacatagctatgggtgatccaatagcaccatgttacttcatattcggtgactctttggttgatagtggaaacaacaatcggcttacctctctagcaagagctaattacttcccttacggtatcgacttccagtacggtccaaccggtcgcttctccaacggaaaaaccaccgtcgatgtcatcagtaatcttttaaccaacacccttcttttgtttacattctgttctttggtctaaaacatgtaatcaagaaaaagaactaactttatctgttttagctgagcttcttggtttcgatgactacattacaccgtattccgaagcaaggggagaagatatacttagaggagtaaacta

SEQ ID NO: 148990 - DNA, 876 bp, Arabidopsis thaliana landsberg
cagctcccagaggaaaataggaagttgaacgaggaagatattatgaacttgtgctcggagtttctcacggtcgggactgacacgacggccacggcgctgcaatggatcatggccaacctagtgaaatatccagaaatccaggagagattacacgaggagatcaagagcgtggttggggaagaagcaaaggaggtggaggaagaagatgtggagaagatgccgtatctaaaggcagtggtgttagagggactccggagacaccctccaggacactttttactcccacacagtgtcacggaggacactgtgttaggaggatacaaagtaccgaagaacgggacgatcaacttcatggtggcggagatagggagggatccagaggagtgggaagaaccaatggcgtttaagccagagaggtttatgggagaagaagaagcggtggacctcaccggaagtagagggataaagatgatgccgttcggagcaggaagaaggatatgtccgggcataggtctagcaatgttgcatctggagtactacgtcgccaacatggtcagagagttccaatggaaagaggtggaaggtcatgaagttgacttgacggagaagctcgaattcactgtcgtcatgaagcatccgcttaaggctcttgctgttcctaggagatgtcactagtctacttcttcctcttttcttgggtttaatattcaaaatgtgtgaacttagtttggtggaattctcaataaactatgggataagtcataaaaaagagttattatgctgaccgtttgtactttgtattcaagtgtatgctggacaccttaaaataaaacagatatttatatagttcagatttatttatatgtttttaattaa

SEQ ID NO: 148991 - DNA, 81 bp, Arabidopsis thaliana landsberg
gaccaggcaacagcttttgacattgaagcctaatcaccgaatgaactggattggctttgcagtctctcagcatttaaacgc

SEQ ID NO: 148992 - DNA, 275 bp, Arabidopsis thaliana landsberg
cccgacttctgatgcttcggatagaatctgggatgtgcgactgaacggccggagattcgccggccgctcggatgatttctccgccgcacactgtcttcgagacgacgacgttttggttttccgactcgacgtgaagatggttttccacgtcacaccttccggacgcagtttctcacagatacgtacatcttctagctccggcgactacgacagtgatgatgatgatgatgaagcaggggacgatgattcagattcgaagaacatttcgttgaaga

SEQ ID NO: 148993 - DNA, 353 bp, Arabidopsis thaliana landsberg
agcagtaaaaactcagatagtgtcttttgacctcattaagaacatcttttaataaacgtatccaagaaaaaacaacactcgatgtctcttttgttttgttaacttcacgttagatactttttttcaaatatagttcacccgtatctggataaaattaggattgtaaaattacgattaacaagaaagaggtatatttttagattaaacttggatagtatgagtatttaccagccaaaaaccattaaagaaaaagatgacaaattgattatccaaacaaaagcagactctataattagccaaattaattaactaaagtttccacggtcacaacaaaatccactttttcaataatt

SEQ ID NO: 148994 - DNA, 375 bp, Arabidopsis thaliana landsberg
tagtttcaaaagtatatatatagatcattctagaaggaaataaacagtaatgaaattttttcggattacagtgttttagaattcaacagagagagaatgttgtaaatctcccaagaacaagacatgactccccagaggaatcactctcttcccgacatcattcgctacgcttagctgcttgcaaggatcgattacgaacactgtttccatcatttcattggaacgaacatgaacacgatcataaccaatcagctgcttctccggaacaccagataaaaccggtggcattttcgaaaacagcatcacaacatgactaccgtcgatttctccggtattgctcacatgaacacgaacgttaaaccgcagagattcgca

SEQ ID NO: 148995 - DNA, 544 bp, Arabidopsis thaliana landsberg
catgaagtgttccattccacttgctaaggccaccggagctaccctcctatgaagtagttttcttgttgtgcaagggccaaggggttgtagttcgaaagagaagataaagaacctctacttaggattcataaccatcttaggaatcgccactgtgcttgtttctctcctcccggttttccaaagcccggagtttcgggtggtgggggcgtctctgttctttggaatgggattctctggcttagctccgattcttcacaagctgataatcttttgggaccaacctgaagcccttcacacgacaggttatgagattttgatgggtttgctttatgggttaggagctctggtttatgcaactaggatcccagagagatggatgccgggtaaattcgatatagcaggacatagccatcagttgtttcatgttctggttgttgctggtgcggtcacgcactatagagctgggctagtgtatcttaagtggagagatagtgaaggatgttgaagatgaagactgaagattagatggattctgtgatgttta

SEQ ID NO: 148996 - DNA, 351 bp, Arabidopsis thaliana landsberg
acattaccagaccatcaaagagtgtattaaaatgttctttgatctaccaatctttattcaaggctggggaggaaatgattcggaaggcggatcattgcgtggaacgttaggttcaggagacactaccgggatatccaagctgaatcttctgtcccgttcagtctctgcagatatttctcttacatcagaaactcttgcctctgttgcctgaatatcattccattcgttttctcccaccggaggctgagcgtttactacctgctcttcactcatatggactacattctctcccggtatagaggctgttcttgaaatgctcagacatgctttatccacattcttttctgtttc

SEQ ID NO: 148997 - DNA, 331 bp, Arabidopsis thaliana landsberg
atcagaacacaaagatccttctcctcctcttttgttttcccttgccgtcgattttaaggttttatcttctccgtactgaaaccgactgataattttctccacggaatctacgaggaggatttgttgtttctccgtcgttttagagtttaacgatttctccgtcgtttgatttcttaattctatcctgttgagggaaacgagaatttggttttcgttttcgaatttagggttagagaagcggtttcgcattgggttcgttgactattgagccaatttgcgagaggaatttaaacgttacgagtttcttctttttccttccggaggtccgaag

SEQ ID NO: 148998 - DNA, 333 bp, Arabidopsis thaliana landsberg
aaagcatctaggactgtaatcagccatcatcttttagttgatgaagaacgaaaaagatggaaacacataatatatggcgtctatcatctttctcttcgtcccactcgattcttcatgaaatgattaaggagcatcaccaaattaggttatctagccacaaggtttgtagattcaacacacactcacaaaaatggaatgagttaaagactgtcagaggacagtagtaatgtcagtaccttcataaagagggttgtagatttagttaccaagttaagattagttacctcagcaagtggaggtccataaccagttagtgatagctctcataaacac

SEQ ID NO: 148999 - DNA, 176 bp, Arabidopsis thaliana landsberg
tcatctgcagatcttccgttgcagtctgatccttgttgtcgttggtcggttgggaaagtatcctccatatccgtactgtccaaagtttacagctgcatggtgacctgaggtgacccatgcaatcgtagttaccacaccaatcaagtcatcttgtgttttgaggacaggccaccaag

SEQ ID NO: 149000 - DNA, 283 bp, Arabidopsis thaliana landsberg
tgataagatcctctgaaacgtttagacaaaataattttgagccatcagtatgattctaacacacacacacggaacacactcacactatatagttaaacctactatactacagctctttcctcaaaaaatgttttatcaagagagactctgtgtctgattcagaaggattcagtccaaccccatgcattcgccgaatgttgctgaaacccgcctctgcttctccctctcccattcctccatcgacaatcctccactcgttctcctccatgtcgcccttctcctc

SEQ ID NO: 149001 - DNA, 479 bp, Arabidopsis thaliana landsberg
atgacgcaattttcccacagatgccaagaactcaagccagcctaaattattgacaccccttaaacccagctatgacggcaccttcttatacagagtggcctagtgccactatgacttatgcacaaacattgaatgcgtcagacgtacatcatttcaggttaacttcactcttagaaaccttcttcatgttctctgttaaacgctcaagtctctcaagtctcttacattgacaattgtgctgtctttttcttttgggttgcaggcacccgaatccttgaccttttggtcgtattcagcacaatgtcttgtatccaaacaggttttattgatgtagctttagattttcagttcttgttgcaaacattggcctcttttatcgtaagacatctctaagctttttgtacaatatattattattatcaagcttctccacgaaatccaaaatctgcaaaaaaaattgttgtacaatgggccggcct

SEQ ID NO: 149002 - DNA, 432 bp, Arabidopsis thaliana landsberg
tttgattataacaaaaaaaatttgtatattatttaatccaatgaagagtgacatttttatacaccccaagagaacccactccaaaaatagacaaaacaaccttatttgaaagccacacaacttattaagtttagttaacttaatgcatatgactcaagggatctaacttattaaactgattccaacactttctcataaccagatcttctactttgagagctaaaacattccgtggcaaaattcattgctttatatatacaaagcccactcgaacgcagcagaaatgtcgtctctctttttaaaggccaatgatcggaagctacgacaaaatttctggaatgtcaaaaactcagcttcgtagacaagctgtataccataagaaatcaacaactgcttatcttttgtagggatgataacaacactccccggacc

SEQ ID NO: 149003 - DNA, 486 bp, Arabidopsis thaliana landsberg
gtactctcgaaaacaacatttgatatacgtgacagagatcttcaacttgcttgattgggaaaagaaaaaacgactcttcaagctcgcttacattatcctcactctctttctcaccattttctggtaactagacctttcactgtctttactcaatcctaaactcgtaccaaaacattgaaaacttatgttgcaacttcgttacaggttaatctattcaacacttgatgattacgaggactgaatcacgcttgaagatacacccctgtgacaggcgacaacaaacggtttgatcaaacccctctcttagtacttgacaccgcgcttgatacaatggcatgagaaggaaggcttttaggttatgtaagttaattaatgtggcattagagagctgtgtaaaccagattttatagtcattagaatttcattgtggatctttgtggtgaagccaagcagtgaattgttaaccatgattggaaccctctaact

SEQ ID NO: 149004 - DNA, 2219 bp, Arabidopsis thaliana landsberg
aaaaaacctaaatttgaaaagacaaaaaaaaaaaaaagagaaagaagaagaagcttgggacaggggagtcccagaaagaaaaaaagttttttttttccggtgacagtgtcggttctctgacgctcccatttttgttcaatctttcttccaaatttccctgaatgccttcactcgtattctggtaatttcggtaatttcatatcaactgcgtcgaatagtctaagatttttccagatttgatgccttgttcttcaagcaattgctcttaattcttagggtttactgattgttttgtgtgaatgtttatgacaatattgttttgaatttgcagaaacttgcggctatttacaattgcaggagtgtgaatgattataaggtctcccattcgtgttccataggcttacacacatgttttgatcaacaatttcttgtgttcatgaactagatattgcaggtagtaatggattcaaagaacaccatcttatctccgagtatcatcaatccgctttgcttgctgtcctggaggtgatttgtcttttagatgattgacgaattcatcgaagaagagttgccaccattaatctgatcagccaaaaaaaaggtttggcatgaactgtatggccgtcgctctcgatccactaaccgaccggttttcgcagtttagccgatcttcacagagatgtagactccaatctttaaccaacctcgacttcaactttctcggattcaacactaaacaaaccaatctctctgcttcctcacactccttgaacaaccgaagcgtttctactccatgcttctccatatccggtagtaatctagatggctctgctactccgcacattgagattctcggtggtcaaagagtccccactgtacgttcccttgtagctgaagtaaccatagctatcgtttctggagctcagcctctgcttttaccaagtggtttaggaggtgcatatctcttgcattccgaaaaaggtaacaacattgcggttgcaaaaccagtcgatgaagagcctttagctttcaacaatcctaaaggatctggcggtttaacactcgggcaaccaggcatgaaacggtctatccgcgttggtgaaagcggaatccgtgaattggctgcttaccttttagaccaccaaggcttttccagtgttccaccaaccgcattggtcagaatctctcatgttccgttccatgacagaggtagtgatcacgccgcctataaagttgcctctttgcaacgatttgtgggtcatgattttgatgcaggagagcttggaccaggaagcttcacggttgtatcggtccataggattggtatacttgatgtgagagtcttgaaccttgacagacacgccggaaacatgttggtgaagaagatacatgaccaagatgagactacttgttctaacggagttggagctgcagagcttgtgcctatagatcatggtctttgcctacctgaatgcctcgatgatccttatttcgaatggcttaactggcctcaagcttcggtgccattcaccgacattgagcttcagtatatatcaaacttggaccctttcaaagacgcacagcttttgagaacagaactaggctctatacaggaatcttccctacgggttcttatcgtctgcacgatattcttgaaagaagctgctgctgcagggcttattcttgcagagataggagagaagatgacctcgggcacatatgcacaggggaagagagttctagtgtgttggagattatttgcaacaaagcaaaagcaagcgcgggtagaggaagtgacgactgatgatgattatggtgcggaatggaatgaagtagaagcagagctagagtgtggaatttttcagtttgacgatgaagttgaatgcaaagagcttccagatatgttacaagtgcctatattcacaagagttccatccattgctgccaatctatctgctctcatgcggtgtccaccaaaccagtggattagtacatatgacactaacatagaagaggaaaggagagatcggagtatcgtgaggagcaagagtcacccgatatgtgtgaattatgatgagaaagaaggtgtttattttggggacatgagtggagatgaatgggagatgttcttgcatagtttccagatgcttttgccagaagcacttgaaggctcaacaagcaagggaccaaaaccaagatttggatcttcttgtaaattc

SEQ ID NO: 149005 - DNA, 415 bp, Arabidopsis thaliana landsberg
ttttccaaatttaaaagcccatctcggaatccatcttgaagaggccaatagtaaaactgtagttaaaccaaacaaacattgtagtgcataaatactcatgtgaacttattttacggttgatagaaccttttcggtgtttcctaatcaaactcaaattgttagtgctaaagaaagatataatggatgaaaatgaactacatacttatagtgaaaaaattcaggatcaaaactctcttggtgaaggggattgtgactcatgagcggatggttactgaatgatcaaacaccgtctagtctaggaagtgcgatcactctgttctgtagcacgttttcttcaattgtaatgtggtcgacaatcagatgccagaccgtgttgtgtcagataaactttcgttctcggattatgactcgaact

SEQ ID NO: 149006 - DNA, 633 bp, Arabidopsis thaliana landsberg
aaccaacaagaagtagtcaaagcacaatacagcagtagtagtagcaccatggctcctctcaagaactcctttgtaacatctctggtcattgcactaacattcacaagcttcttcaccagcctatccgctcatcgtcaccttctccaatcaacaccagtgactcagcctccagctttgacattcccacctctgcccaaaaccactatgccaccggttccttctctaccaactccaggacaacaaacgttgccacagccacaaccaactctgccacagcccactgggttgccaccgatgccgagcacacagataccatcattgcccaaccaggtgcagcccacaatccctaacattccacagatcaacttccctagcaactttcccttcaactttcctttcaacattcctttccttactccaccaccttcaaagtaagagaagtgaaagctagctcattagctgtcacagatcattatccttctttcctgagacagctttggatcacacactctgctttgtgtcagtttgtatacacatatatgtattcttttgctgttgtttggtgtcatcgtcctctttgttgttgcttccataagtcaagttccttttgtaatatacattctaaagagtgat

SEQ ID NO: 149007 - DNA, 365 bp, Arabidopsis thaliana landsberg
ggcaagtcctaaaagaaaagagattgtagagaaaagcaagagtgtaagagagaaggagattaaacaaaactcaaatttctttgccaaacacttaaagaggatttacccaatcacgcttcaacgaagcacttcttcttcattttcactctcttctatatctctatcactctctcagaactcgaccgattctgtttccacggattcaaattcgacgttggaacaaaagatctctctggcactcggtttaatctcatctccccacagaagagaaatatttgttccaaaaagtatcccacaacaactatgtcaggatttcaatagtagtgatgaaccaaagaggtgcaactggatcaccaagaaaagtg

SEQ ID NO: 149008 - DNA, 189 bp, Arabidopsis thaliana landsberg
  unsure (1)..(189): unsure at all n locations
ctctatctctctcttaatcgatcgatgatgatcaggtgcgacgtctgcgataaagaagaagcgtcggtgttttgcacggccgacgaagcatctctctgcggcggctgcgaccaccaagtccaccacgctaacaaactcgcctctaaacatctcncgttctctctcctttatccttcttcttccaacacc

SEQ ID NO: 149009 - DNA, 179 bp, Arabidopsis thaliana landsberg
gatgagaagagccttccatagtctcttggtaaacagtaattttgtatttgaaacctttcagaatgatatattatcactcagcgaggctgaagaatacaaatataaatgtaactacttgctcatagttgaagataagtagaagttccaaaacacagaacccatggacatgaacgctactc

SEQ ID NO: 149010 - DNA, 288 bp, Arabidopsis thaliana landsberg
accaaaaagtagagagaagaagaagcaaggatggtgaagaatctgtcccaataagaatcggcaaaaggagcagagaagagaggcaacatgaaagtgaagccactccaagtgttcacagtcgtggctgctcttgaattgctcatcttcaccacatcagttagatatgttactaagtttgatgcaactcctttaaatgcatatctctctatcccggcaatcactatgagaagagcacaagatttactaagtcctcttcttttctctcctccagccatcaaaagagagtat

SEQ ID NO: 149011 - DNA, 300 bp, Arabidopsis thaliana landsberg
attcaaaccagtttccatcgacgcaacgaccaatctccacgattcctctcttctctctaacttccaggtacgttttttcgagaacccaatgaagcaatcaaagtccttggaattcatttgattttactttcaggtctttggatttctatagaaagaaagatctgtttattatttgattggaacatgataagctgctccgtttctcatatccacttttgttcaatttatttcaatttgatcgataattggaaaagtactggatctggtgtatcggaagttaccggtcaagctatgtatgaa

SEQ ID NO: 149012 - DNA, 138 bp, Arabidopsis thaliana landsberg
gttttgctcttctctgtatcgtcttcttcacagactgggcttgattttgagttcttctagttttcggattcttagcaatctaagtttttttttttttttacttttcgaaaagccgatccagattttttgatatttttg

SEQ ID NO: 149013 - DNA, 376 bp, Arabidopsis thaliana landsberg
atgagtcttttgacatgttgtcttcagtttactctctgatgctgtcttcacaaactaagtagggtttaagtaaatagttcttaaaagtttcttttatcatttgcagtttgttgttggattttgcatttcaatttcagcaccgaacaaggaaatattagctttatttgttagacattcgcttgtgcaagctcagcagtttctcctcttgtttgttgcaacttgtcgtctcacactgcccacatatgctttcaaaggtccatcgagaacaatcaaattttataaggtctcctcatttagtgaatactaggattcaacccgcggttcaccgcgggcatcagttttatgcggttttatgttaagtatttaatattgtttt

SEQ ID NO: 149014 - DNA, 200 bp, Arabidopsis thaliana landsberg
taaagaagtaccttactattattacaaatcaaactttaagatgaagttggtgtattgtgtacaaagaaggagagagagatctgccttccattacatagcaaagttggtctggactttacttacgagatgctctccatacacagctcttttgaaaacttggcatcctcctctccctcccgggtacttcctgtttacatata

SEQ ID NO: 149015 - DNA, 136 bp, Arabidopsis thaliana landsberg
ctcaaagaatccgttccaactatcaatggctcgggtcaatcgaacagtcttaggtcttcccataagaaacctaatgtaatcccttgcaagcttgaccaattcctccccagtgataatgtatgtgtactgcaaaaac

SEQ ID NO: 149016 - DNA, 203 bp, Arabidopsis thaliana landsberg
cttgaaataagatttgcgtccatatcgaaactcgaattaacagtagctacacacacaaaataatggacgaagtttttttcagataaaccggttaagaaactcatcaacactagtgtacttgacttcagggtaaagctcggaagcctcaactccaaaagaaggatgtatagtgaagaaggtaaagtcactcttcacaaggattg

SEQ ID NO: 149017 - DNA, 92 bp, Arabidopsis thaliana landsberg
ggaagagaaggggcctttaggggcggatagagagatctacacgtctttctactagatctcggattcattcccagaatcctctttcctcaccg

SEQ ID NO: 149018 - DNA, 911 bp, Arabidopsis thaliana landsberg; identical to SEQ ID NO: 53995

SEQ ID NO: 149019 - DNA, 272 bp, Arabidopsis thaliana landsberg
agctatatctcataatatatgatgtagaagtaaacagacgatacccataataagataaatttggtggccggaaacggatgattaatagctctcagattaagtaatgcggatttaataattaagcaagctcctaatgatggctgcttcggcgctgttgtcgtccgtcgaagccaagagttccgacaaacggtcactgaggtcatcaacctctctgtgtaagttcctgatgtagttgcaagtctcttgtagtaccttagatgctgacacctgtc

SEQ ID NO: 149020 - DNA, 765 bp, Arabidopsis thaliana landsberg
tttatatccataattttttttttttaatctccccttggttgatcggtgaacacaaaataaaaaatctaaaataatcgcaaaatacatttgaagaagctacacgatcaacaacagcaaaggatttcgattgttgaaaaagttgactcttcttaatttgattcgttgtcttggtttctgggttttcttcttcttcttctgcggcgctctccaattttacaccttgcgaccagcgagaaaagaaacaaatttcacccccattgaagaaggtttgtttcccctaattgcttgattttattctgagattaatcccaggcgccaattatatgcttctgttcttctgataaatctttgcccttttacgatttttctttgattttaccctagttttatggtataatctgggtgagtttctttcctttaattcatgtatgattaagcttggattggtcgattctgatgagtcaaaatcttgaaacctatataaattgatgatttttcgtggttgttttaggtcatttgagggtttaagctttctttgtggatttgcaggacctttggttaagctccatggtgtggtatgcgcagagtggacaatacctagatgggtgtttctcttctgaaacaacaacatcgtattacaaatcaagctgatactttttctagattcatggaaagatcaccagagaataatctaagccgaaatgagcacatcatcattgactttgcagaaatgccgcattgcatcatcatcatcttctcatgata

SEQ ID NO: 149021 - DNA, 81 bp, Arabidopsis thaliana landsberg
aacttcagtaatatagctgaaaatggattcaaaacttacaatttcaagaatctatagagagagacaaacagtttggatcga

SEQ ID NO: 149022 - DNA, 233 bp, Arabidopsis thaliana landsberg
gccttatatcgatcaagctttgagtgatcagacggaggctgtcattgtcaatgcattggagtgcttatccacattatgcaagagtagtttcttgcggaagagagctctcctccaaatgatagagtgtgtttatcctttgttgtgctatccatctcaatgggtaaggagggcagttgtcactttcattgccgcaagtagtgaatgcttaggtgcagtcgactcttatgctttta

SEQ ID NO: 149023 - DNA, 1053 bp, Arabidopsis thaliana landsberg
aattcccccaaatttctctctatcacccttctcttagtcaatagagattcttcttctccttcaacgataagacagagaagatctccggtggaagaaacaagccggagttctcattttcagcttctgttttctgaaatttctccgatttggatctgtctccaactggttagtttgttcttcttctttaagttggaaagtagaatcaattatcaaaacttgtaatcaggaaggcgaatctgtatctgtctatctgattctcatagtttctaaaaaaggaaactttctgattttacttgccttttatagattcttgatattacaattttactacttgatgtgttcactgtttggttgctggaaaatgtgggaagatgaaaaaagcttattgattaacttggatgagtaagaaaaactttgattagctgaaatgaaaaaatggttatttcttgtaatcgcttttatgtgtttatgttaatattaataagaaagcaactgaatttggatgacctgttctggtctggttgtctgaattggtcagctatagtgttctgcttcagtgtcagctttataaaacattttaggctctatagatttgttgcattgatctgtgtttgatgttttgttaccaactttttccttactttattagcttaattaggttttggattgcttgttttgttctaaatctgctactgagttcttaggagttaggccaagcttaaaaagatttgattttgtgggttttgatgcaatggtttaaatagtcagatctatcttttactgttgttttgtcaggcaagggtgacaatggctagctccaagggatcacagagtgttagaaacttgatgtacccgggaaagcatgctttgctcccaccaaaaataccgtttcctagtgtatcagcatcgtattccgagtatattcctactggtttgattggttcaagacatggtcagaagcttagtaatgagaaaacacatcaccagcgaacttcctccgagagccatttggtagaagagcttcccttttggcttgatgatcttctcaatgag

SEQ ID NO: 149024 - DNA, 311 bp, Arabidopsis thaliana landsberg
tccgcattcgatggtctttgcgagacaggtggcgaattgtgtcttgtgacaaccatttctcttgaataaccagaatggtcaggcgagctcatcctctccactttgtaacctgagggtgatcttcgactgagaaaagtctgtatgcccactgaactcttcctgtgatctattcctgaaagacgaggatgaaccatctgatctttctcttgatctaactggagatcgtgaacgaaatccaggaaaatctcgttaggggttgtttacaaactttgttcgtcctcgagcaaaaccactccgacctcgatatggac

SEQ ID NO: 149025 - DNA, 705 bp, Arabidopsis thaliana landsberg
ttcttcttctagatcgagagggacatgggtcttaccagccgccgttgacgactacgacgaccattctcttcctcttcatcttctctccttctgcttttctctatttcctattctctgcaaattcaccatttccttcaccactcagagatctccctttcttattagctatgtcttcttctaacacgccatcttctagcgccgccgctgccggatcgatagattcttccgccgcccggagaaattccaagagacccaagtgtatttctcctttccctcttcctcttcctttcgattctcgttggttagattcaatcaatattcgctgtgtctttgaattttgacttcaagttctttagtcaaaaatgattattagggttcttattttttcatcgaaagaattgatttttagctggaagtcttagctaggaatcgagaatgctatagctaaaagttgattgatctgcagattcgaaatttactcagcaggagcttcctgcttgcaaaccaattcttacgcctggttgggtaagcttctcttcgtattactcatgtttgagtctcccaagttttgtctttgaatcgctatcaaatttatcctttttccttatctctttttctgcaggtgatttcaacgtttttgatcattagtgttatcttcattccccttggtgttatttctctctttgcttctcaggatgtaagtga

SEQ ID NO: 149026 - DNA, 387 bp, Arabidopsis thaliana landsberg
gggactgctctgcctctagcagaaccctctgcttctctttgtccaggtgcaccttcaacgttcctcctctgcttgaagcctaaacgcattccaataataaccaaatctttcttcaggtaactttatacgaatcacttcagaatttgtcttttaagtgtctgcgtggagagaaagagagagagaacctggtaggcgaagaaatcacacttgttcatcctgaggctccagtaatgagctaaagcacaatgagcacttccagtaacagggtcctgaagagccacacagtaaaaagaaagcagaagaggtcacgtttttgctgttttgaccactcgctcttaatcttctaagagcaaaagactaaatgataacctcattgattccgaatct

SEQ ID NO: 149027 - DNA, 327 bp, Arabidopsis thaliana landsberg
gagacagattcttgaaacctgcagatttaatgaaaaccaacttcaacattcttttcttgacaaatggatggatttcgttgaaactgtaaggtttgaagaactcaacggtttctccgatcaccggaaaccccattgaacctggaggtagtttgccggagcagttagggttagcccatctatagagccagagactgatcttgacgaccactaaagctataacaaaactcagtgcaacaccccacatttctttcataatatctaaactaatgattgttcatatgtataaatagctacatattttgaggaagcaatatgcaagaaaaccaa

SEQ ID NO: 149028 - DNA, 210 bp, Arabidopsis thaliana landsberg
cttgtcgttggaggattacttgtaattgcctttgtagttcccatggcacaatactttgcttatgtctccaggaagtaagtaagtaaactcggttcactctcgtaaaccaaaccgatcaggtcagaactttgatttacctcggttatttggttatggattcttggtaaattggtttatttgaacaatataagtaaataataacagaaaact

SEQ ID NO: 149029 - DNA, 209 bp, Arabidopsis thaliana landsberg
cacgaactttcactagacgacgacgacgatccaaagtccgagtcaactcactcacaaagacgactcctttattaaattattcccaactcctttcatcatcatcatcattatcatcattcattaaccacttaaccacagatgcgattttcttctccttcttcattgggctcttcaacacttatgaacaagaacaccaccaccacgacaac

SEQ ID NO: 149030 - DNA, 1390 bp, Arabidopsis thaliana landsberg
gcttcaatcttgaccacagcaaagagaaacaaacaatggcggcttctctgcaatcagcaaaccctacattgtcacgaaccctagcttctccgaacaaaccttcctccttcgccaccttccgatctccatttctcagattcaattcaacatccgtcgcttccaatttcaaacccctagtttctcgagaagcatcctcatcgttcgtcactcgctccgccgccgagccacaagaaagaaaaaccttccatggactgtgctatgtcgtcggcgacaacatcgacactgaccaaatcattcccgcggagtttctcactctcgtcccttcgaatccagaggaatacgagaaactcggttcttacgctttagttggtcttccagcttcttacaaggaacgattcgttcagccaggtgagatgaagacgaagtactcaatcatcattggcggtgaaaactttggatgtggatcgtcacgtgaacatgctccggtttgtttaggagcagcgggagctaaagcagtggtggctcagtcttatgctagaatctttttcaggaactctgttgctactggtgaggtttatcctttggattctgaagttagggtttgtgatgagtgtacaactggtgatgttgcgactgttgagttgagggaaggagatagtattttgatcaatcatacgactgggaaagagtacaagcttaagccgattggtgatgctggaccagtgattgatgctggtggtatatttgcttatgctaggaaagctggaatgattccatctgctgctgcttgattttgacttcaggtatgattctgtaacttgatgatgatgatgatgaggattggtaataggttaggattgagatcgaatttgtggaatagtctaggaagcttgacattgaattgaacgatgcaaaacatagttttcaatggttctagttagagaaagagaacacagtagttgggattctagttttgtgttgtttaaaatgtgttggtttagtttttgtgtgagattgataatgacttgttattctttctcttcgcttaagacttactttatctttccattggttcaatttctagattgtacatctcttgattgtagttgttgggagggtaaaagttatgatgttggctgatcttttccatgctcatatccattaagacttgagtgtccgatagtagaacaatacttcactcttattttgtctctaagactcctttttttttttcctttttttgttctatttgttttgcaggtgtcaatggaagtgcatgagagtcacttcaaggatcttgatccaataataagaatatgtaatgtttccaaaagcttatgaacctaatctatgttttatgaatatatatgactatcggctttagtcttca

SEQ ID NO: 149031 - DNA, 261 bp, Arabidopsis thaliana landsberg
aagccaacttttcgggaacacctccgatccccggaaaactaactatgttcctccctcaggttgtgcttgttgatgataatatcaatgctttatatatatgtatggattgatccatgcttgtgattcaaattaaagatctagggtttgtagttttcttggttattttatggattgttcttgaggttcatgtgtgtgtgaatgtgaggaggaggaatatttgatattttctatcgtttgcttaattttttttgcttttgtttt

SEQ ID NO: 149032 - DNA, 574 bp, Arabidopsis thaliana landsberg
gacggttaaacgatgtctcacaggtgtggaaaggtgtaggctcaaggaaatggaaactcggaccaaatgatggaatctttgttcagtttgaatctccctctcttcggaaagtttggttcatatctagctcgaaagaaaagggacaaactttgtgcaggttctttctctaaaccacttattatgtttagttttgcaatgtgctttaagaatttgatgaagtacccttgacttcacacaagctgttgaattttcttgggtgtattaaagaatcaaacttttgcatctaactcaagattaaaagagttggagttttgatttcagggaaccgcaagctctggatatcggcgcacatgagattctccctcgcattttcaaggagaaatcgaaaagctcgtagggcattgttttgttgcagtatgattctctatatccagtttttgatcaagactaaaaagataaaaaagagttcttgcgagtgtgtgctacttagaaaatccacctttttgttgtttcttatctaatgatcaaacaaaactttgaacttttgagtcaaaaggctatcttcgaatcaaaa

SEQ ID NO: 149033 - DNA, 278 bp, Arabidopsis thaliana landsberg
aggagaagcagcaatagagttttttggttggagataagaaagatggaaacatcgagagatatcgaagagcattttttgtttcaacttttgtagtgttttggaggagaagaagaagagtcaattttttctcacatttagttgctagatttaatctcatactcgtcttcgtgtattatatctgtgtaatgccacagtttcagaagctatgttatcctttcgaaattcgaaccttctttgtgtaagtagacagagggtttaactaatctctctttctcctt

SEQ ID NO: 149034 - DNA, 299 bp, Arabidopsis thaliana landsberg
caaactgggctacaagacctcactgctccatttaatcatcaaactgggctacaagaccacactgctccatttaatcctcaaactgggctacaagaccacactgctccatttaatcatcaaactgggctacaagacctcactgctccatttaatcctcaaactgggctacaagacctcactgctccatttaatcctcaaactgggctacatgacctcacttctccatttaatcctcaaactgggctacaagacctcactgctccattaaatgctcaaactgggaatcgcaatgacccgag

SEQ ID NO: 149035 - DNA, 370 bp, Arabidopsis thaliana landsberg
gatgtcaacaacataaaaagactttattacaaaatgcgttagcaaaaagccaagtgagtggagaagttttatttggtgtaaggaagagaagcaagaaaggcgagagtaaaaggagaagtggatttgccaaacattgtgcaaaatggaggaagtctttcgagaatcctttggacttgtggagtgcgacggttcaagtcagttctgagtttcaagagaggtctttgcttcttcttatcatcagatacttcttcctccttgtaaagtttgagaacaaagctagttggtgcctttttcccacctgcgaattgaatttgatgccatccttcttcattgctgcttttctcgcctcgttctatcatcaactcttctt

SEQ ID NO: 149036 - DNA, 667 bp, Arabidopsis thaliana landsberg
cttggtccttattctctctttcttgctactggaatctgcaatgagttctttgctttcgaagttgccgcaacctaaacaggtttttccttcttctttcttcttattaactacgaccttgtcctttgcctatgtaaaattactaggttttcatcagttacactgattaagttcgttatagtggaagataaaatgccctcaaagcattttgcaggatatctttgatttttcaaagatatggaactgtagagtttgatagtgttcttgaatgtggttgcatgaagtttttttggtctgcatgttattttttcctcgaaatatgttttgattccaacaagtgattcacttgggattcacaaagttgttttctcaatatgtatcagtttttttctatggagaaaaatcatagggaccgttggttttggcttctttaattttgagctcagattaaacccattttacccggtgttcttggcagaattgaaaacagtacgtattaccatgagtcaaacaatggaggaatatcagtctaatgagagtgaagataaaagaagttggatttggagtaaggcggttagtgttgggaagaaagttctgacagctggtgttgtagtatcttcagctgcacttcttgttccttcactttttgtcgccttgacacttgccttcc

SEQ ID NO: 149037 - DNA, 380 bp, Arabidopsis thaliana landsberg
ggcttcctgtttaagcttagcacattatttattttcgcattctagaggtaagcttgtttccttaggtgcccttttaagtttcagcacttgcaaatgttttcgatctcacctcattaccgttgttacaggtattaagtagtcttgctcactgaagaagtcaaaaaagggggaaaggagaatggaagtttcagggtttgtgcttctgttatctttaaccctctcatcctatgtatatagcccacaacaagcttgatggcataaactatatgaatagtttcaccccggaaacaagggttttcgcggtaaactggtaggaataagtttggtgtacaaagaaagttcatatatatataaacacatacataaatgcatatagaatg

SEQ ID NO: 149038 - DNA, 766 bp, Arabidopsis thaliana landsberg
agcgcgttgggacaatggttgggatggctaatggccgccatttacatgggcggtcgcattcctcagatttggctcaacgtaagccatctttagcaaatcttgatttacttcttcttggcttcttgtttatgatattggatactaatcttttttttttttttctctacaactagatcaaaagaggaagcgtcgaggtaaaaaaaaactaaaactacaagtcaaccaacagatattcccttatgtatactttaaatgttattgtggtatgcgatctaacaaacagtatgttttgatatttggcagggtttgaatccactgatgttcatcttcgcgctagtagccaatgcaacatatgttggtagtattcttgtccgaacaactgaatgggacaacatcaaatcaaaccttccttggttgcttgatgctattgtctgcgtcgtactagatctatttgtatccttttctaaccatttgcacagtctcaacgtggaaaacaagttatcttattgccattaggttgagctttgctaccttaattcgaaaaatcaaaacagataatactgcagtatatctactacaagtattgcaggataaagagcttggaaagcagagaagaagacgcctatggagactatgtggaagcaagcaaaacttttgtttcgtgaatcactatttatgttacaaggataatttgattttcttttgatcttaagtattattgatttcatagtgtatgcatataaaacctaattattatatgttcact

SEQ ID NO: 149039 - DNA, 119 bp, Arabidopsis thaliana landsberg
aacactaaacatataatctcttcgtgctttctcaagaaccacctagagataacccaatggaggcaatgaagatgagactctttgtggcggttttggtggcagcgatggctttctctcgg

SEQ ID NO: 149040 - DNA, 811 bp, Arabidopsis thaliana landsberg
tcaagctggggagattagcttcacttactgcggccatgggggtttctcttcgtcacatgtctccttcctctatctgggtttcgcgtcgtcctcgtgtttattctacaattctttcgtttcttgtccctcgccgtcgaatcctttgcaccaggttcacagcttttctcatcttatctgttcccttttctcatttttgttcatcgagaattagatttactcattcattagtcaattgctctgttttgtaaagttggttgatagttttatatagtgatgatgattcacgttttgaggttgttgaacaagcaggttaaaaatgtgtgtttgctcaattgctctgtttcgtaagtttgttgttagttatatagtgatgattcgcgttttaagtttgttgaagaagcaggttaaaaatgtgttttgctgcaatttggtttcagtttctcacttagtctaaattgttcctgtgttaaagttatttaggagtctgcttttgattaagcagaagaatgtattttagttgaggtttggttattattctgagtttgaaggtgtttttctttgtgttgatatcattttttggtggttatgatttgcaggaaagtagcaatcataaagggaaatgcgggatattcgactgctactgattgtggtggttctcatgcgtttcatcattcaggtcatcaaaggtcatcctctgttgagtttagtggagagtggaaacttaatttgggatctaagacggcgagaatggtttcgccaactgtgaaacaagcttgagctgtaagtgcttggagggaggaagtcaattata

SEQ ID NO: 149041 - DNA, 84 bp, Arabidopsis thaliana landsberg
ttaaatcttatctactttctatttctttttaatcaaaattaccgttcttaactatggcgaagtggtttttcactatcttcaagg

SEQ ID NO: 149042 - DNA, 67 bp, Arabidopsis thaliana landsberg
atatgtcaatatttaacctatattcctagatgatattttgggtatatgatttaaaatatttaaggtt

SEQ ID NO: 149043 - DNA, 82 bp, Arabidopsis thaliana landsberg
tttctcttgttgaccttctaattatgccatctccgattatcgatttttgtagagcaatcgtattttatcgaagcccatgttt

SEQ ID NO: 149044 - DNA, 1950 bp, Arabidopsis thaliana landsberg
atcaatcaaaccaaaaagacttctcgtattcatgcctctccctcctaagaaaagaaccctaatttttattatctgcagaaatcatcatcatgaacgagattcatcaaccgctggcgaggagagtatggagaagcaacgtcgatgaagagatggctcgtatggccgaatgtctcaagcgattcccactcatcgctttcgatacagagtaccctggcattattttccgcacttatttcgattcctctagcgacgaatgttacagagccatgaaaggtaatgtcgagaacaccaagctgatccagtgtggtttcactcttttcaacgccaagggagagatcggtggtgtttgggagattaacttctccaatttcggcgacccatcagacacacgcaatgagctttccatcgaattcttgaggaggcatggtttggatttgcagaagattagagacgaaggagttgatatgttcggctacgggtttttccctaagcttatgactgtgtttcgttctcagaaacacgttgagttcgtcactttccaaggagcttacgatttcgcttacttcttgagtatcctcaatcatggcaagctaccagagactcacggcgagtttgcaacagaggttgtcaaagtgttcggtcaagtttacgacaccaaggtcatggctggattctgtgaaggactaggtgaacacctcgggttaagcaaactagcccagctacttcagatcactcgtgtgggaagagcacatcacgctggttcagacagcttaatgactgcacttgtcttcatcaagcttaaacatgtctatgaagattccagatttgctagaggattgatctatggaattgggaaaagcaacctcgttgccgcccctgcccctgcccctgcgcctgtgccagagccgactcttcctttgatgtgccagcagaatgtagcttcatatcctgtgttccacaatggatatgtccagaactatgagcagcctcagcttgtctcctacgatccttcaggtgccccatgggcgttctgtaatgctaccggtacgtatgtgcagcttactcatctacctgcaagcacttttgcatacccgtctcagacgccatctgctactgttgattatcttggaccagttcctaattattacaacaataatgcttgctacgtagttgagtagattgagatttccccagctttaggatgattagatgcttctgagcttttttcttttttttttttttctttttcttttctggcttttggtagtagtaatgaagactttatttttatatatgtatggattgtttacatggcttcactttgagtaatgcctgtctgcaatctgtgatatataaaagaccaaactattttacataaaagaccaaactttcttcatgatttgatatttttcttttccacacaaactgctatatcacacacaatgtttaccgtatctatatatggtttcagaacgatgaaccctcaaagctttggaattactattctcagaatcccatccctgtttcaaacgcaataataaattggatgttagtgctctttataaaacttgctaaattctatctaaactaattcaagctaatgactgactggcactaagatgtaaaattggattctaaaacgactactttttaggtgtgcactactagctaaaacctacaggcagaatctatcattatgaactctaggattgaaagatttaaggagaatagttgtttgatcatacggttagattgttagtaagtatagcttctacttacataaattcagcggaaacattatccttgttcacattgctggggagtggccaggaaactttgaatggtccttgtagtatttcttgcttatgatatccaaggatcgaagctttggtgcctgcatcaactttttgacagatagatgtgcgtctacctgtcacagtcaagctgcag

SEQ ID NO: 149045 - DNA, 74 bp, Arabidopsis thaliana landsberg
gggaaatgacattctatttagagtagtgtccacattgtctgaaataaagaaagacgaatcatgttgtatacaat

SEQ ID NO: 149046 - DNA, 421 bp, Arabidopsis thaliana landsberg
ttttttaaacatttacttgttactaaattttgagatagtatcacatttctagagtgtaagtttgaagataaatttacagaaaaattataagtatcagaagtatacagattgattacttagacagcagctggtgttggtgctgatgctggagttgtcgttgttgaagaaggaactcggttttccggggggatctcagtaactcggaaagaattgccctgaattcgtcaccgccaatagtttttttctcgagaagcacttcaacgagcttatccatggcttcacgattgttctttatgtggcttagagctatctcatatgcactgtctgatagtctcttcaccgcagaatcaatgtcttctgcaagcttctcagacatggagtttcttgccatcattctcatgatgacatcgctctgtgccga

SEQ ID NO: 149047 - DNA, 671 bp, Arabidopsis thaliana landsberg
tcgatctctctttcatatacaccatataaaacgaaccagttaattatgggtttaatttccgggaaggtgtgtgtgtttatctttgtattcgctctagtcgctgaattttcgttcggaaatgttgaggttaacgacgacaaacactttttccacaaacctcgtccatttttacacaaacctcgtccattcctccacaagcatggcatttacaagaaaggtttcggtaagggtttgggcggtggaggcggtctaggcggcggaggtggtctacgaggcggtggtggcctaggaggcggtggaggtttaggcggtggtggaggtttacgcggcggtggtggtctagaagccggtaacggtttggaagaaggagggggtctaggaggcggtagcggtttggaagcaggagggggtctagaaggtggtggtggtggtggtttaggaggaggaggtggattgggtggtgaagctggaggaggatacggtggtggtgctggaggaggacttggaggcggaggtggaattggaggaggaggaggctttggcggtggagggggaggaggattcgggggcggagccggtggtggatttggtaaaggcattggtggtggaggaggtcttggaggaggttatgttggtggtggccatcactgatgagtggtgaggctcatgct

SEQ ID NO: 149048 - DNA, 306 bp, Arabidopsis thaliana landsberg
atagcagacaaagagagtgtggacacaccatttatttatcgtaatcgtcccaagcctatgaacataatacatcagaatagaaaacagagatgtgtttattcactgccaaatgcacaaattgttcaatctgtcttattttcacaggattattacaaatcagattttgttgtgctagaacattttcccaacaccatcttttcttggaacggattctgaaacattcatccgggaccaattacccatcagagatgccatttgatcaaccttatcatacaacccaagaagcccaccagtgtgtatgaacaa

SEQ ID NO: 149049 - DNA, 786 bp, Arabidopsis thaliana landsberg
ctgaagaatccgacgaaaatggctccgagatcagattcacaaaccctagccaccggctccgacgaaaatgaatcctcaatcgatccgatcttccacattctccgtatcatccctttctccttcctccgaccaccacgtcttcgtctcaagctcccttccttcactctcccatctccaatgactgtcttctcactgattctcctcacttacttcctcgtcgtctccggtttcgtctacgacgtgattgtcgagcctccaggtatcggatcgacacaggatccaatcaccgggtcagtaagacccgtcgtgtttatgtcgggtcgggtcaatggtcaatacatcattgaaggtctttcttccggattcatgttcgtactcggtgggattggaatcataatgttggatctggcattggataagaatcgagctaagagtgttaaagcatcttatgcaacagctggagtctcctccattgtgattgcttatgttatgagtatgctcttcattcgcattaagatccctggttatctccgttagagggttagatcacttttggcttcaattctgtaattggatctttagtataagatcgatcattagaaaaaatgtgactttttgttttgtttgtttgctaaagcttatgtgtttcttgtttgataatgagaatttagctttgaatgttagtatctgcacttgcattattgttgaattttgcgttgaagaagataatgggaaattttctgtaacagttatatgacaacacaaacaataaagtagagatttttg

SEQ ID NO: 149050 - DNA, 607 bp, Arabidopsis thaliana landsberg
ctcccccgctctgtggaacaatgcagtcaaagagctaacccgacagtactgcaacctactcggtgaatcatctgaaagcccgttgagtataacagtaacagcgggcacacaagcgttaccagtactattgaaatacatgaacgtggtgatggcgaataagaagcttgattggcagaccatggaacaacttcctgttgatgcgcaactatccgaggagtttcagtttcattcggtgtttgtctgtccagtctctaaagaacagtcaagtgatgataaccctccgatgatgatgtcttgtggacatgtgctttgcaagcagacgatcaacaaaatgtcaaagaatggctctaagtcgtcgttcaagtgtccttattgcccaaccgatgtagacatctcaaggtgtaggcagttgcacttttgaaacgaaagctcgggaatttgtacgaccgatataaactggaactaagttctgaatcggtgaaatctgtgtcaaaattgtaaccttgtggtgttctctgtttctttttttcatgaagtttgttaagtgatggggctttggtgtacaaattgatcaggggaagtttttagatgattggacatcccataa

SEQ ID NO: 149051 - DNA, 179 bp, Arabidopsis thaliana landsberg
ggtggatctgtatcttacgagaatgttgatgaagctcgattctgtgttggggtgtacatgcatcttcagaaaactctgaagtcgttgggtgcgggtaaagtctctgtgggagtaataaccccgtacaaactgcacctgaaatgccttaagcacgacgcttggcaatgctaagggccaag

SEQ ID NO: 149052 - DNA, 381 bp, Arabidopsis thaliana landsberg
cagcaatgtcggggaggcagtgtacatgcaatatgtgatgtggatcgatggagtgattgtagatttgggtggggagattatagagtccacgacacgcatgatgataagaccaccaccatcatcatcaccattaccatcaccttccaaggatgatgatgttgccattacaagacctgagttttcacagaaggagatttcttttcttctcaagcttctctctcagttgatacaacattgatatctctgttttttcgttttcttttatcccaagtttctttttagggtttgattttcttattgatttaattattattctgggtgtattacccaatagttggaattgtaaataattataaatttatttctttttacaaggattaa

SEQ ID NO: 149053 - DNA, 397 bp, Arabidopsis thaliana landsberg
aacacacaaaccgatgctacaaattacatactgaaaaacatgaatgaagacattatacaaacgaccaaacacacctctctatgatacataaataccccaaaactaaaacaacctctaaaatcctcctcctactcactcatctgtttgtgtccctcaccaaaagtccaataccacatatataatcaatactaagaaaaaaaagcaaagtgaagaaaatcaaatatatgaataaaaatgagaaaaccccttttacaaaacaaatactcttcctcctcactactactacaaattctttaccctttcatcatctgacttgaatgaacttaacctgtgaaattcttcgataactcaaaaccctcattgatccatctcgttggtaaatagcaatcgataattg

SEQ ID NO: 149054 - DNA, 296 bp, Arabidopsis thaliana landsberg
gccttcttcgtacgcgtcgagctgcactaaatggatctctctcaccaaacaattaagctctacgcgaaccaaggaaaccatgaacaagctcttaatctctttcttcaaatgcattcttctttcgccttacctctcgatgcacacgtcttctcactcgctctcaaatcggtgcgctgcagctttccgtcctgttctcggtgattcagtccatgcacactccgtcaaatccaattttctgtcgaacccatttgttggatgcgcgttactcgatatgtatggtaaatgcttgtctgttt

SEQ ID NO: 149055 - DNA, 389 bp, Arabidopsis thaliana landsberg
  unsure (1)..(389): unsure at all n locations
ttgtgaatgaaacttcaatttattattgtcgtcaactcctacatattattcaaaaatatttattaaaaatgaagctgggaattcaatgggcacaattgctgcaaacaattcggatttgagtaaaattaataaggagagagagagatgtgtttagaggttgaagatggcagcaccacttgaaggcttggaggcaaagaggtaaagctccatatcttctttttttaccactcctttctctactctctttttgtagtacttctcctgtataaatccacaactccatttctttacacagaaaaaatatgtacaatancgttattgtgtatacaccaccataaggaagctactattacttgactgctggaatgaaatgagtacgcaaatccttg

SEQ ID NO: 149056 - DNA, 629 bp, Arabidopsis thaliana landsberg
cttgtacaatgtgttcttcatgcgacaatccatgtagtcctgtccaatcatctcctccgccaccttctcctccaccaccgtcaacccccacaaccgcatgtcctccccctccttctcctccaagctccggtggcggtagctcttactattaccctcctccttctcagtccggtggaggcagtaaataccctccaccatacggtggcggtggtcaaggttattactatcctccgccgtattcaggaaactatcctacgccgcctccgccgaatccgatcgtcccttatttcccgttttactatcatactccaccaccaggttctggctcagatcggtttatgagttcttactctattatttttgctctttttgctgtctttctctgtttagtgtgacggaaaatagtcggaaattcgccgggaaaatgacgaagaaaaagtcgaaataatgtggcagatccgtagatctataaatctttagatttctttgatcatggaaactaaatgatgttggatcttttactttcttcgatctgttttaactttttcttttgttgttgacaatttgtatttaattgttcttgattattaacatattaattactcgttattcagatttcaaaaataaag

SEQ ID NO: 149057 - DNA, 605 bp, Arabidopsis thaliana landsberg
gtaattttgtagttgtctgtccgattcttctcagcgatttttgtattcatcgtttcaattgttactgtgtgtttcattgattagatcttgtgaatatagtctttatagctttggttagagttttcttattggttaatgatgataaatccaaaggcttgtttctcaaacattcgcagtggccgcctaagagctttcgcctttcgccaggcttgagagttaatgctgttttatccttccttggatgtctgaaacttttgtatctaaacttgtattgttttgttttctattcgggttttggatttgggactaagttattcaatgtcccattagcagaattgatttctcttagtgcttaataggattgaacaaagtccctcaaatcttgatccatctgtcactttgtcagcagtcttaattggtttcttgctgatcattatatgatgggaaatacatagtatctcagttttgatttcttttgttgtattggtcgatgaggataagatgaaggcttgtttctcaaaacattcgcagtggccgcctaaggctttcgcctttcgccgggcttgagagcttatgatgtttttatccttccttggatgtctgag

SEQ ID NO: 149058 - DNA, 248 bp, Arabidopsis thaliana landsberg
gcaaaaaggtcggatataggacacagacagtggtgaattcgactgaagttgccgcgggtgaagctacttcaaggagtctctcaagaggcttctgtgtcactattatgattcttgtaacattttccatattgtaacccttttcgtgatttttatttttggcgagttaccaattttaggtcttgaaacattttattttgttataattttgtaatttgttgttgtggcaataaaattaaaagaaatgaagt

SEQ ID NO: 149059 - DNA, 546 bp, Arabidopsis thaliana landsberg
ctaagagattcttttccaccgtctgacaaatctttaagtaaattgcttggagattctccacatctgccgaaatcagttctgaagttgttggaatcgttttgctgtcctggaagtggtgaagttgaaaaggatttacaacatggagaccgtgttactcaaggtctcagtgctgtttggagcctgattttaatgagacctggaatccggaatgactgcctgaatatcgctttgcaggttccttctatctcacccctttcctgattcccttttctttggtgcagctttagtttcatcatattaacatttcaggatttttttttttttcccagcattgtgcttgtggttctttctccttccttttctggccttttttttcattttctcttatcagcatttgacagtttcatattgtcaaggctgtaatatttattttttttgtttatggggcactcactaaatttcctttttttttcttgtgaaagagtgctgtataatcaaaaggaagagattcgcatgaaaacaatccgcctggtatgtttctgtaaa

SEQ ID NO: 149060 - DNA, 327 bp, Arabidopsis thaliana landsberg
cacaaccatctcaacaaaagtagcagcttcctcaacaccatccctatttgttctgtgcttcgagacctaaacatgagctctgtatatctcaaaggaactctccctgatttctcacagatgaaatctttaagagtcatcgacatgtcttggaaccacttcaccggtagcttccctctctctatcttcaatctcactgacttagagtatctcaatttcaatgagaatccagagcttgatctatggactctaccggattctgtctctaagctgacaaagctcacacacatgctcttgatgacgtgtatgctccatggtaatatcccaaga

SEQ ID NO: 149061 - DNA, 603 bp, Arabidopsis thaliana landsberg; identical to SEQ ID NO: 68843
  unsure (1)..(603): unsure at all n locations

SEQ ID NO: 149062 - DNA, 1358 bp, Arabidopsis thaliana landsberg
gtttgatgtgtatttttcttgccacaaaaaaaagttctatgctttgtgaaaaaatattaaataacttgcttttttgtaaggagttttccccttttaattacttttaagatatagaagattactcatttaaaaaaaaaaaaactgagattgattaagagaaaaatcttagtaacattaatcttgttgatataaagccacgccagtggtaatcccctagtcagagaaagaggaccaaactttgagaaacgacaatggcgatgtccgatcttccaaatgatttggtggaggagatcatctctagggttccggtaaaatctataagagcagtaagctctacttgcaaaaactggaacactttatccaacgatcatagctttacgaggaagctctttggtaaaacaataacaacaaaggaaaatgagtgtttggtggtcatgatgatggattctaaggtttatttaatgagcgtcaatctccatagaattcacaaagaaaacgacgacaacaacattaaatcatctatcatgcataaagctaaactcattagcctaaacgatgatgacatactcaataatacatatataatttttcactgcaatggtttactgttattgttaggcttcaccgacgatggcatcaagcttgtggttacgaaccctcatttagggcaaacaaggtggatcaaacctagaaaagctaattaccagttttgtgacaagtacgctatcggatacgagaagaagaagaacaactctcttcgtaccaacaaaatgttgttatttcataaagaatccttctgcttccggatttattggtttgaaatctacaactttaactctgcttcatggaatgttttctatttcgctcgtgactgggaattcccgtattctcaaggcgtgtctctcaagggaaacactgactggtttgctagagagataaatataagaggagaaagaatagatgatcctcctgacttcttgatctgttttgactttccaacagagagatttggaccgactctgcctctaccgttccactctcgttgtggagatattgtggctctctctagtgttagagaagagaaacttgcagtgtcacttcaccgctgcaatatatcaaggatggagatatggattactaacaagattgagcccaacaatgtgtcgtggggaaagttgttcttaacagtggacatgaaaccactcattattgatgatggaattttcttcattgacgaggagaagaaagtagttgtggtttttgataaggacaaagagatgggaaaccgtatcacagcttacatcattggagagaatggatacttcagaaaagtggatctcggagattctgaaagtttt

SEQ ID NO: 149063 - DNA, 952 bp, Arabidopsis thaliana landsberg
ctggctcggttagctcgaaaaaacaatggagacgccacttcttgtgggactcgaactacgttgtcctcctcatctcttcaacactcactctcgtccctcttcatctctctccattcccgccttatccttacgaatcctcacgccgacggcggcaacgacatcttccgctgttattgaattaccggcgaacgtagcagaagctcctcgttccaaacgccattccaattcatacctggcgagaaaatccgccatttctgaagttcaacgctcctcggattttctctcttctctgcagaggtcttactatctatcacttatcacttatcttcaaattctgtgattcattttacttcagtcaacatttcaaaaatttgtctttaaaaacgtattttgttcttaacagaagtaacataaaatctctagaatgctcagttctgaagtagatgtagtagtgcctgctaatggaattggtctatactctatagaatgttaaattgattcaaattggggaaagttaattgaccacatcattactagagatacataagaattcttgtatccaagattcgattaatgagcatgccgtaatctttatactccgtcgtcaagagtgttcaggatctggatactgtagtttctcacgatgtaactgtcccctctgcagattagcaacagttttgaaggtacaagatttgaatgtaattttgcgtgattttggaatctctggaagatggcaggatcttatacaggtctgttgctttgaacatggtttcataaaaactattgtatgtttcattgtttcctgaggaacaagagttccaagatgtgcatagtcaatcaaagtgtttttctttttgtagctctttgaatggatgcaacaacatggaaagattagtgtttcaacttacagtagctgcataaagtttgttggggccaaaaatgtctccaaggc

SEQ ID NO: 149064 - DNA, 725 bp, Arabidopsis thaliana landsberg
caaaagctaacaagacaacatatagttagtcgttacttgatgtcaaagaaaaatgaagttagtcattttacttagagaatcgttcaaaacaacaaactttaggtcattttccatttttatgtctagaatcatttaataattttcgattatctctagcattgctttttatacattgattactacataaatgaagatggttggtttgagttgtgtggcaggagtcagagaaggtagcgttggcggaatcaacggggttagatcagaaacaaatcaacaattggttcataaaccaaagaaagcgtcactggaaaccatctgaagacatgcagttcatggtgatggatggtctgcagcacccgcaccacgcagctctgtacatggatggtcattacatgggtgatggaccttatcgtctcggtccataagacatccaaaagctttagccacataataacaacctcttgttgctttcttgttacaactcatgttttgaattcccctacatcagtttgctacttatagctttctttgttttcacgccttttgtaatgtcttatgtcgttcggggagtttgagacttcctagtcagaaatatcccttcattttattttctctttttttcggggtattttgtttttttgctttctcactaatgtttttatttaataatgtgtgaaaggaaaatgctattctgaaaaggtggtgctcccattttttattttata

SEQ ID NO: 149065 - DNA, 604 bp, Arabidopsis thaliana landsberg
gcttgcccgttctgtgcagaatcgtatgatatcatcgggttgtgctgtcacatagatgatgaacatactttagagtcgaagaacgcggtattgctctctactggtctttactatcaaatcaacttggaatcaaaaattatatagcaaatgtgtacattggatttttcaggtatgccctgtttgttctcttaaagtgggagttgatatcgtagcacacataacgcttcaccatgggagtttatttaagatatccttttttcaatttctacgtttataacttacagatattcttagtttctcaccatggaatcacattcctctgttgaattccttaatgagttttacttgcagcgaaagagaaagtcacgaaaaagcggtaccaattcgacactttcacttcttcggaaagaactaagagaaggagatctacaaaggttgttaggatttacttctcgtaatggttctgttgcgtcaagtgtaactcctgatcctctcctgtcgtcatttatctcacctacacgatcacagagttctcctgcgccacgccaaaccaaaaacgtatccgaggataaacagatagagcggtatagattctatattagct

SEQ ID NO: 149066 - DNA, 234 bp, Arabidopsis thaliana landsberg
tgaaaggtgcgtccgtgttcaaagcaatcatcatcattcgcaaggaagggacatctatgcaatgagagacatgttgctagacattgctctctagaagggttctttggtttctgtgttttatttgcttgtggcttaagtaaagttcttattttagttgatgatgacttgctgctaacttttggaatgtcacaagttgatgacttatgagagacttgtaaacttggttcaagaatg

SEQ ID NO: 149067 - DNA, 264 bp, Arabidopsis thaliana landsberg
atctatgtcttgaaaagtgaaaagctttagggcttttacaagtctgagaactccatcaataacctggtaatggtccgattgacatgtttgatgttttgcgaataatctagggtttcattttttttaaggaatttagggaatatctcgtttgagtctttcaaatagcttttattttacccaatttcatgtttttagtagtgaattcaggtgggaatttgtgaagataattgcgacaatggcatctggtgtcttcgaggatgaagc

SEQ ID NO: 149068 - DNA, 238 bp, Arabidopsis thaliana landsberg
agtctttgggacacttcccaccacaaaagcccccagaaaagagctttagtagtaaaaggcaaaaactaaaaagatgtttgtaatacatttaatttaatcttaagttattaatcatccttctgaattttgagatgtttaatctgaggtttcatttggatcactgtcttttgtagtttgtaaatcaatacttcacaatcctaatataatatttttctgcgaaagcaataaaaaatctact

SEQ ID NO: 149069 - DNA, 637 bp, Arabidopsis thaliana landsberg
cagcttgttttgtcgagatcatacttgttctctctagagagtaagtcttttctcgagtaatccactctgtagtttttgatatttagctagttttggtgttttctggcattggaggtttttggaaactttacttatttgttgtcttctagattgtgttacttacttggtcctcctttgtttgcaattgcttaattttgttgacttcttacctaattggcaatgattttgagattgagtgtagattgatggagttattgtcttaagaatttttttacttgacaatttttttggtgtatgtgtaatgtaatcgagtatataaactgtgtggtagctagcttctcttgtttattcctttatgtcatgtggaaatttgatacttgatactagatgcttatatcattgagcttttgaggtgtttgtcattgtacgtaatacttatattggagggggaattcatggcattatgtagcaattgtttagttggaatattaatttagagttttaagccttggaccgatcttttgatgattttgcagggcaaggatgataaactggaaggtggatcttttttgtttgatacttcttctggttttcatgttgccgtattaccattgctatttgatgcttcgtaatagtg

SEQ ID NO: 149070 - DNA, 267 bp, Arabidopsis thaliana landsberg
gcttctgtggctaacaaagagcaaacaaacacttagaagaaactaagaatactctcatcaaggcgatatagaaaaaaatggtttggataatctttttcttcttactcgtaaactattggttataagattcgggaactttggattgacgtacgtcggtgttttcaggagagcaaagggagttggacagtggctgatgccgtagactacaaaggacgacctgccgacaaatccaaaaccggtggttggatcactgccgctctcattctt

SEQ ID NO: 149071 - DNA, 173 bp, Arabidopsis thaliana landsberg
  unsure (1)..(173): unsure at all n locations
caaaagaaactgagacacanagttttaagcagaggggatgagagcaacattgttttcttcttcattttcggtgattgagagaggccagaacttggtcgaatattgttttcggaatagagattcagttttcgagtaaaactgtgaaattaaaatttctgtggattgctcatata

SEQ ID NO: 149072 - DNA, 86 bp, Arabidopsis thaliana landsberg
attcaaatggcgcttagaggagtttggcagctcaagaaactcgttgtgagctactgtaattggggtggtagcagtagaggcatcag

SEQ ID NO: 149073 - DNA, 323 bp, Arabidopsis thaliana landsberg
tttttttttttttttattttttaatttttttattattttatgttttttttttttttcttttttatatctttttgttttattttttttttttttttttttttttttatttgttttttaattttttttttttattttttttttatttcattttttttttttttattttttttttttatttatttatatttttttttatttttttttttttttttttggggttgtgtgttttttttcttttttttaaattttaaaccctttcccctttttttttttttttttttttttttttttataattttaaattttttttttttttttttttt

SEQ ID NO: 149074 - DNA, 219 bp, Arabidopsis thaliana landsberg
acaactttcacttcagccaccacaacatccaccgttaactccactgcttccaccacaatcacagttcttcctctccctaatccaacaaaccttcacttctccttccttgttcatcatcttcttcttcactacataacctaacttctccccaatcatcttcgccttatcctccacattcaacacccgaaaccttcgccgtgaatctcctccccttcttct

SEQ ID NO: 149075 - DNA, 575 bp, Arabidopsis thaliana landsberg
gggaacaaaagctctcacctttacaataaaataatagagaatcactctcaagataacaattataatgaagaaaaaggaccagagcattaacagcgaagggaaaaacacagaatctaatccattccaaagatcctgtacaagaagagaacaaggtcccaaacttttcagacttggcaaaaccgaaggatacatctcatcgtgaggcttccagtctcggacaggttaagcagacagagagcacctgaaagaatgttcaaaagaaatcggatgtttatataagagcttagcctgaagattcaatttctttcccatggtcttctgaaagattcctcttcaatcttctcaaccaaatatcgtaatctaatggataaggtgtcccacatagactgtcaacatagtcagagaatgctttcaaaacggttgagatatcgccgagcttctgctgaatcaatcttttggaccaagaggtctctctccattgaagagctccttcaactgaatccaattcagggaagtctccagaacagaaataaagcatgtatatcaagctctctgcatctgaggcagcacagagt

SEQ ID NO: 149076 - DNA, 462 bp, Arabidopsis thaliana landsberg
  unsure (1)..(462): unsure at all n locations
taaaaatcaaggatgtaaaagcgattcaanccaaccactgacagcctcccagatcgaatcacgaaggtacaggccattaatctgtttactgaattttacttgttcattcactagctctggagagtagaaaagggtgttcaatccaggtccaactcggtttgtcgttcctggaattgtagtcaccaaagtaaaacctaatcttatgttgcatcacctatgtatatttatataaggatttggtccaaataattgagcaggactggaaggagaagaattcgtcagatggggggagccccagaggattggagcttaacgatgaagaagcccctctgataacgtcgcggttgtcgcatattggccggactcagcttggaaaccacacggcagtctgagaatgaccgttatgttgtttcaaatcacaggtgaaaatgtcttttatctcttttggaacccaaacagttt

SEQ ID NO: 149077 - DNA, 166 bp, Arabidopsis thaliana landsberg
gttactttagaaaaccaattataaaaatctcctctttcttcatcaaattccacaaagcatcagtttcttctccttctccaagctctcgcatcactttcatcgatttttcctctctgcgtcgatccttcagacatcggcgtcggagtttccgacaggtaaatgtaaa

SEQ ID NO: 149078 - DNA, 409 bp, Arabidopsis thaliana landsberg
gagtgtcttcgtcttcgacgacggcaaattcgtggaagctgtttcatcgattccggcttcactgaagcggcgtcgctcgacgtttattattccgacgactaggcctttgaggcagtttctgattaacttcaggcgataatggcaaacagaacagatccgttggcaaagaatataagaggaacgaatccgcagaatctggtagagaagattgtgcgaacgaagatttatcagcacaccttttggaaggagcagtgctttggtctcacggcggagacattggtggacaaagctatggagctcgaccatctaggtggtacctttggtggtagccgcaagcctactccgttcctttgcctcatattgaagatgcttcaaatccagcctgagaaggcaattgtcgtggagttca

SEQ ID NO: 149079 - DNA, 531 bp, Arabidopsis thaliana landsberg
ctcagtctttgactcagactcccaccgcgtaattccgagctaggtttccatttctccggcgaatcggacctctctctcgctctctcttccaatttccccctttttcgtttcccaggtactgcttcttccgattctaacattttttgatcttttataaaatcggtcacattattcttgatcgtatctgcagcgatgatttgcaagtagcttccgctaataatcgcaactctctgacggatgctatggcaatgggacttattcgtcttctttttatagcttttacacttgttctactttcaatccttcctcttcatctctctctcgctggtgagtttcctttccccggataaaattggtgatgaaatgtattagttgatagaacattgtaacctgaaattgaggtttcgttttgtgtagatgagataacatctattgaatctgtacctgaccttcagaagctaatgtatgttgctgttgatgggtttccttgtgtacgtcttctcaatctgtctggagagattggatgttcaa

SEQ ID NO: 149080 - DNA, 519 bp, Arabidopsis thaliana landsberg
cacctagtggggggagagagagagaaagagaaacaaagagagcgataaagagatgggtggagaagagagatcaggagatggagaaaaaagaggggaagaagtagttgatgctggttctctcttcgtccttaaatccaaaggtacgttttattaattatgaaatctatgaaacttaacgtatactattataacccatttgaagaagatatgatgatgatgatgatggaaactagggacatggtggcactgcggattccacttgacgacgtctatagtggcgcctgcgctactgagtctaccgtacgccttcaagttcttaggatgggctgccgggatatactgtctggtcggaggagcagccgttactttctactcgtacactcttctttctcttactctcgaacaccacgcttctctcggcagccgttacctccgcttccgtgacatggctcatcacatcctcggtaattctttttctttttacatttgctctttcctataatcaaagctgcgacaaat

SEQ ID NO: 149081 - DNA, 221 bp, Arabidopsis thaliana landsberg
tgcaatgcttcttccatttctctcctcctctctcctcctccgtctctcttctccgatcatgtcccctgatcccaaatccaataccttcttcttctctttttccaattgattaccggagaatttcagatcgcgatctccgatttattaataattacagaaaaaaataattaaaccctagagagagagagattatatatacatggagagttcattaggtttca

SEQ ID NO: 149082 - DNA, 134 bp, Arabidopsis thaliana landsberg
aagaacaatagacaacttcgaattaaactagaactcttttaagttttaaccaacagaagatagtacaaagttctaaagaacactggtgaaaatcaataacaggggacagagcggtttttcctaatcaaaactac

SEQ ID NO: 149083 - DNA, 682 bp, Arabidopsis thaliana landsberg
tattacaagaaaaactagttgtatagagattttttttggttcatcccaagatgggctaaaaactgtaaaaacggatactaggaattgtatacaccacaaaattacgtataagaaagtctaaacaaaagtaaggtaaaaaaaaccaacacagtagtaatccaaaaatccaaaatctaaaagaaatagcctctatacgcttgggctgggcctataacccgttgaagatccggattcatgaagtccgggttcgggtcctaaattggatctccctcttttcacagagttcatcttctccaatttgagtccggctctgaatcttgcgatgaaatcatcggctttggtatctacgtcggggctcggacagaacatactcccgacggcctccttacttccagctgattgagctacatccggatcatcaggttcgtcggagcttatgctgatgtcactagccatcctgacgtaatcgccacgcttcacgaatttccaagccggctttttaagcggcggaggaggagaaaacggcgggatcggcattagtggtgattcgcttcctgtgcctacgtattgagttactttagctggcggatttggtttggatgtccgtgattccaccggagcttttcggagcttcgaggttgatgcgcgtgattcatatctccgttcaggtggtggtggagga

SEQ ID NO: 149084 - DNA, 346 bp, Arabidopsis thaliana landsberg
tttgtcactctcagcaccccacattggcaaacaaagctcaagattcaagaaaaagaccactttaaaatactcaaacatccaaaagattggattagattaatattcaatcaacttcatcattccaaaagcatttacaaactacaaatctctctaaagctttttaagcaatgcacaaaaacatataactaaccccaaaaaaagaaaaagaatttgatcaactcccttaagtttgtttcatcatcacacaaaaacctctgcatgtaacaaacctattttttcagacagcaatcttgtagatgactgccactggaatgttaacaacgtgacctctatctccaaacagtcc

SEQ ID NO: 149085 - DNA, 960 bp, Arabidopsis thaliana landsberg
aggttattaaccgaaaggatagtgatggctatggaagtccagctgatatatggagcctcgggtgaactgtactggaaatgtgtactggtcagatcccctactccgatctcgaacccgtaagtcttcaagattttcaaacttttgaactgtcttaataatcttaaacgacatttgaagtgtctactttatgggattttatgagttaaaagtcagaatttgtgcaaacgcgcaggttcaagccctgtttaggatcggaaggggtactcttccggaagtacctgatacgttatcactagatgctcggcttttcatacttaagtgtcttaaagtgaacccggaagagcggccaactgcagctgaactgctgaaccatccatttgtgagaagacccttaccatccgtgggttcaggaggctcgggatcagcatctccccttctccgtagatgaggctaattttagtaaatttcctcaataggtgaagtatttagttgcttttttcatgaggatattatcagaatcaacaaaagctatatattcttctaacattgatgtcctaatgtacaaaagcaggcataacccgaagatttatgagagattagatcccagagaaactattgggagacacgagacatgattcttcgacacacacacacgtgcggtcgggttgcgcagcaagagccaaacttacttagtttctgtgtcattcgttggttatttgttgcaagttatgtgttgggcttgattttaaaactgaagagccttatttttctaggaattagaaatgtcgaccttgggttttctgggtgtataggttttgtttagttttttttgttaaattatagtgtatgtatgtctgtatctatatcatgtaatgtataattatagttggttcttatagttcccggcttgttgtaactgtgtacatcgatgggtttaagttctatttgtctcatatttta

SEQ ID NO: 149086 - DNA, 338 bp, Arabidopsis thaliana landsberg
accagaaatcatgaagttcatctttcgttatcttctccagtttctgtcttcttctcctagccaacgcgtcgaatacactcaccgcaaagtccttcgaatccaccatccctttaaatttacaaaacagtggattggtccatgatcattttcgtatgtatatatagatatttattgacttaccaacgcactcgccaaaatcgtctcgggcgagtaatccatttttagaaagcgattcgaatcgcttttcaacttttttccacatctgatcgcaatcgcaatcccaatcgcagacgcagctatttcctctcgtggttttatttataaactgtaatcctttt

SEQ ID NO: 149087 - DNA, 466 bp, Arabidopsis thaliana landsberg
aaaaagatttgttataaacctaaaatgtttggttggtgaagaagaagaagaagaaacgatgatacgaaatttccggttcaaagctccgacgaatcaccctggttccaccatccaaactgatagccgccggttaatccgatttccgacaagatgttgtttatcaccagatcttagccattacacggttcttggcttgactcctctcgcttcccaaaccgaagtcaaacgtgcctttaaacgtctagctctaaaggttgttaattcttgtttgtctcttttgcgtcttattacgcttttaatttttttttaaagaaagttcaaaaccttttgacgaatcaaatcaagaaaataaaaagaaggattataactaaataagacaaaatgagttattgcagtatcatccagatgttcacaagggtcaggacaaagatttcaaggagatcaaatccgcttacgaggtaaaaca

SEQ ID NO: 149088 - DNA, 81 bp, Arabidopsis thaliana landsberg
caaaacgaaacaatgtctcacgtttcatgagctcaagaattctccataaaaagctgggaaaaatggtttttgaaaagaaaa

SEQ ID NO: 149089 - DNA, 314 bp, Arabidopsis thaliana landsberg
gtatcctttacctgcactgcccaacaaaaggcatgctcgagttggtggacggaaaatgagcggaagcgcgttcaacaagcttctaagccggcttgctgcagaagggcatcatgatctttcaaacccggtcgatctgaaggaccattgggcaaagcacggtacaaaccgctacattacgattaaatgatatgtgcatttaggtgtgagttgttcttacgacattatctgattttaaatcatgtgtactaaattcaaataaactcgagaggaaaagaattgtatgtggagccaatgttatgttgtattatataatt

SEQ ID NO: 149090 - DNA, 961 bp, Arabidopsis thaliana landsberg
cacgagacgaagaatgagttcgtgggtttgctcttccgtaactcgaaacgtcgtaaagtcacatcctttatcattaaccaaacaccttgatttcccggcgacgattcggagaagatcagtcagctttccggcgacgattcggagaagatcagtcagctttccgataacatctgcgccgaaatttccgtctttgaaactccaaaagtctcaatcgtcgatccatgaaggagaagaagactcagaatcagccgtacaagccctcacgattccagaagagtggttgctcccttctagagccattgaggtgctttctcgcttccattaaacgtcaatttcaatttttttcaagcaattgacttcagggttttgcaattcttctgcttctgatttcaaatttccccaacattgcttactcgaatgctgatttagggttcctctgtttcttgttaaaatttgcttaatttatgagaaaacagagaaaaagtcgcttgctttgatagtatggtatgattttttagattgctgattgtgaaatgtttgatcaggaatctgaatggttgagagtaactttgcacaaatggttggatgatgagtattgccctgagccaaccaatgtggagatcagtgaagtagctgcaaagtcttactatagttcactgctagagaaagaaagtgacatgggagagattttgttgaagatggctcaagatttaacttccatttcataccaagaaagcttccatggagctttcacatccgctaatgcagctataaatttgattgttgacagaatagaaaccggcctagtctagtctagtctagtgcagtctagttcacttgaagtttcaagaacagttttctttgtatattatgagttttgttacttcacttggtcaggtgcagggaaatctaacgtctttacagttgtgaatcctccatctaccaccagattatgcccatt

SEQ ID NO: 149091 - DNA, 165 bp, Arabidopsis thaliana landsberg
ggtttttttatgagtgttttttttttgtgtgttgggtatttaatttgtgtggggtttgagtcggtttggtgttttgactttttgatttttagattcaagtctttttcagaattctgttactcgtttgagatcgaccgtttgctttgaattttactcttcaatcct

SEQ ID NO: 149092 - DNA, 258 bp, Arabidopsis thaliana landsberg
tggtgtctagaaatttaaaattttatttttattataattattctattttaaaatttaacataaaaattaatgaaaatcaaaaatattttaaattggccggtaaacaatttgcgttcgaatttaaatctttcacgaatcaaactatttttgacaaaatctcaatccgaatcttatcgtctctttcaatattgacggttactttttcacatttcaaaatcttaatattaacggtccttatagacttttaccaaatccacc

SEQ ID NO: 149093 - DNA, 379 bp, Arabidopsis thaliana landsberg
gatgcaaatcttgagactgatcatcaaataatgataacagtggccaatgacataagcaactcacagtgaggacatgttggctcttgccattacaagcaagagaaagatcccaacagagtttgaatcgcctcaggttctgtagctttatcattccctttgaaagaatctgactcgatttaggttatcaggatttgatctatgacaatgtaatctgagtgataatgatctgcaatgttttgcttcttctttttttatgattcaaaaatgctttatagactgttgttgcattggtccatactctgatgtaacgtctagttgcagtctgtgttttaccctattttaaagacaaactaactttatttaagaactcaccaaaaga

SEQ ID NO: 149094 - DNA, 291 bp, Arabidopsis thaliana landsberg
tgggagaacctttagcatttacttgggcttcaacacatctggggcatcttaaacggcccagccgatgaaccaagcccaagaaaatgttcttgaatcttccggagagttccttttgcgacaactctcagctccaaggctccaatagtcttgcatttccgggaactaacgtaacccgcatcgatgaatgctcggtctaaacagttgcagcaatcttgaagaacgtcttcgtttgtttctcctgaaatctcccagaagatagcgtaatgtcctggatctgtcgagacatcgatg

SEQ ID NO: 149095 - DNA, 389 bp, Arabidopsis thaliana landsberg
gattagattatccgaattttattctccatacagacaatcaattattcgaatcttgatttttttgttccaagtataataaaggtaacgtcacatcagaaatctatttatttcccaaacactaattgcacaaaaagcaaagtaaaaccactgtgatacaaattctataaagataaaaaaagtttatgctcaattaaataacgtaaagaaaactatattgacaaataaagacaacaacgacggaaataaacaactaaaaaccactttctttgatttcacacaattttagtgagtcaaaacgctgtgctgaagtagctactcaccacattctcacacagaatttggagaaccttagcattacttggcttcacacatcttggcatcttaaactg

SEQ ID NO: 149096 - DNA, 1633 bp, Arabidopsis thaliana landsberg
caagccggaaactcctcaacaaacattccttttgatctcacattagagatagtctcgagacttccggcaaaacctataatccggttccaagccgtgtcaaagctctggttctctaccatccgcagtaaaaatttcaccgactcgttcctgactaggtcaaagactcgtcctcgtctctttttcacctttaaacacttcgattcccggaaacgtttcatcttctcagctcctgaacgcgacaacaatgacaaatcctccacagttgtcgccagacacgacatgacgatctcggatgtcgcctacatcagatctctccccgtcaacggtttgttttgctacacgcgtggtgattcgatcgcggtttgtaatcccaccactagacaaataggtaaattgccagatgtggaatccaacggaagagacgtatacacacgtcttgggtatgatccggttcaagaccaatacaaagtgttgtgtgtaatgatgttcgatgaacacgacgccaatcaacaagatatccaacaggaatatttcgttttcacgctaagttctcaacaaaaagagtggagaaagattgaaaacaccactggagaaacttatcacatggtctatggagggatatgcatagatggtgctatatactatggggtttcacagtcaataatagttaaattcgatgttaggtctgagaagatggaattcattcaagcacacgaagtatcacatatcgtgccaccatactattccactcttttatatttgtctagcgatatgatccgtatggagaatcattccaatgaagaggtaagattttggattctagaggatgctgagaaactcagagtttcgcatatggcgtgtgatgtgtgggatgattcacttgggaagtacgtaagggccaaggaagagattcataccggcaagcttatggggatttatccacggttacaatcgtcaaaatataaaccgtttagtgtttgcgtttaccattttaacaaagtggggttaaaaaaaacagagatccaaggaagtaacgacgatgatattagatttcgttgtgggattggtatgcgaactcatgagatattgagttttggaggttacattgagaatattaggttcttgcgaggagttttcatggtttcattagctttttcccttctgttcatgccttgttttgctgataaacaacaatttcgacgattttcttgacaaacacatcttttataagggataacaagagtagaactattacatgaatatgtatgtaccataaattcatcaccatctttgtgttggatagccaaatttgttctaaactctcaacctcttcacactaaagtttctctcttcctcctcaaagagataactacaacatttctttgatgaaatcaagattaagtgtgtcctttacgatgagaaataaaccgagaaataatacaagcatgattccagaagacataatcccttgctccacctctaacggtaatttcctcccgcctcgaaccgcttccaataagatcagagccaaagttccaccatcgagagccggtaaaggcaacagattgatcacagcaaggtttagattcagcaatgctgcaaactggtaaagcccgtccgcgtttgatctcgc

SEQ ID NO: 149097 - DNA, 350 bp, Arabidopsis thaliana landsberg
tgtgtgttcgtgcgtaaaagaattgtcatttctttaaaataagaaggaatgaaagattgaaaggtatatgttctaactaaaacgtgtgattaagattggacttttatacatagttgattagtatctttttgtttaatttttgtttcaataatgtcattgagtagtcgttgtgaatacgattgaccaacggttgcagagatatattggaggatttgatgtgatatctcctaagaatttcagaagttcattgaacgtttttttggggttagtgaaatagtatcatttgtatctttttgcataatttttgaaaaatcattcatatccacttgattctcattcaaactttgaat

SEQ ID NO: 149098 - DNA, 259 bp, Arabidopsis thaliana landsberg
  unsure (1)..(259): unsure at all n locations
naacattttacatatttgcggctgtcggaggaatgtcattcatttttatttggatgctcgtaccggaaaccaaaggacaatcattggaagaattacaagcttcgcttacggggacatcctaaatgcacatttatattgtaatatactattaattttgtttggtaaaaagataaaatttattttctgttgtcagtcgcattgcaaataataaatgtattttgtaacattatttgcatattgatattaataatattttaca

SEQ ID NO: 149099 - DNA, 382 bp, Arabidopsis thaliana landsberg
gtgatgtcatggtatgaatcaagcaacgagatcacaggttgagtcaagtaatcatagtttgacaaatcctggctcaagtcaccgaactctaatccataaccattgcttcccaagctaccgattgaatcgccgaactctaagccatgaccattgcttcccaagctagcgattgaatcgtcgaactctaagccatgatcattgcttccaacgccagcgattgaatcgtctctgaatcgagttagctcagaatctaggtcagatggagtggaaaagaagcgggattggaaaagagcgagcgcgattaaaggttgggttgtggcggagacatggtgaggagagagagaggagcaagtgtggtgagatcggcggaggtgagagagta

SEQ ID NO: 149100 - DNA, 129 bp, Arabidopsis thaliana landsberg
atgaactcgaggattacatggatcatcatcaagcgaacaggtataaaagatgggaacgataaatgattttggtttctcgaagaagaaggacgtgagaatagagcgtattttgatttctcatgaatgaag

SEQ ID NO: 149101 - DNA, 278 bp, Arabidopsis thaliana landsberg
gaggatttttcagtaaatggatagcctgacacgagaaagctgacctcactcgctacttgggttgattgtgtatatatatgtaagtatcgccgttgagaaattgggactctgatctgttgcagaaagccgaaagctttggtctttggagctctaacctctgcctctggtaaattttctattttttctttatgatcgatttggttattgttgaaatccagatcaatttttgttgagatgggtttagttgttgtgatgattgctaactggaaaagttttcc

SEQ ID NO: 149102 - DNA, 510 bp, Arabidopsis thaliana landsberg
taaacaatgcgcagaaacaaaacagactgccttcacgacgaagaaagactatgggaaagaggaaagagaagctctatgggctgcagctcaaagaaccctccacggacttcaaccagcagagaaaaacaacatctttaacgaaaagaatagttacagtgaactctctcagattgctgaacaggctaaacgccgagctgaggttgtcaggtaaagaaacttactcttcacaccatcgattcaaagctctaataactctatatgtacatgagctcaacccgactctctcgcctgtattactcgaaaatcaataccattaaccaaaacttgatcttactcgaaaatcgattttctttgtcgattttctttgtcggttgttccacaagtttttgctaaatgatgggttttgatgatgtctgcaggctgagagagataaatacattaaaagggcatgtagagtcagtggtgaagcttaaaggacttgacattgacacgattcagcaacattacacc

SEQ ID NO: 149103 - DNA, 296 bp, Arabidopsis thaliana landsberg
caacttgttcctcattctccgcaaatcaagcatagaaagagactcttggagatcatccaagtatccgattctcagaccctaagaatataatgtccatgataggatctcatcagcagagtcagataagctctctaggagcatatctttgacccacaagcgcaattccgaagagcttgacgtgtttgaagctgccgtgtacttcggctacaatgaagcctcctcctggtgaccatggacatacacaaaagtatggctataacgcagcgagagagcagaatccgaggagatggggaata

SEQ ID NO: 149104 - DNA, 2174 bp, Arabidopsis thaliana landsberg
tgttcgattttttttctcccgaacatgatctttcaatctcaacgacgatttctcagtgactaactactacatttgtatacattcttcatcatcatcatctgtgtttttgttcatattcatttttcagttatcgttttcaatttttaaaactttttttcttgggtttcacaaaatttgtcgttaatcgatgaatttgattgttttcaagatcacccatctctcgaattcacgaaatctctcagcttttccgtgattcttggtaaaaattcacaaaatcgaaattggagaaagaaagaaaaaattagggtttgaggaaaagcttcgatttttcacacgatgagtcatcaccggcgagattccggcggagatgtagttcacgtgattcccacaaacaatcctccgccggataattggtttccgaatctcggcgatagtgctgtttgggcgacggaagatgattacaatagagcttgggctatgaatcccgataacacctccggcgacaacaatggtccaccgaacaagaagactcgaggctctccgtcgtcttcatcagccacgactacttctgctgcgagcaatcgtactaaagcgattgggaaaatgttcttcaagacgaagctttgttgcaagtttcgtgctgggacttgtccgtatataacgaattgtaactttgctcatacggtggaggagcttcgtcgtccaccgccgaattggcaggagattgtggcggctcatgaggaggagagatctggtggtatgggaactcctacagtttctgtggttgagattccacgggaggagtttcagatcccgtctttggtgtcatcgacggctgagagtgggagaacttttaaaggaagacattgtaagaagttttatactgaagaaggatgtccttatggagaaagttgtacgtttctgcatgatgaggcttcgaggaatagagagagtgttgctattagcttaggacctggtggttatggaagtggtggtggtggtggaagtggcggtggttctgttggtggtggtggtagtagtagcaatgtagtagtgcttggtggtggtggtggaagtggaagtggaagtgggattcagattttgaagccttcaaattggaagacaaggatttgcaacaaatgggagattactgggtattgtccatttggtgctaagtgtcattttgctcatggagctgcaggtaaagattctgccttttgttcgatttcgtttgctttatgaatggaatggttaggcctgaagataaggacgggattgagttcataggtctctagtggttagccaagtttttagtgacttctcgtatgttagtttaaactttaaaccaatgttgcttgatgaatgggttaaaggtgactagagattggacgctgaagctccaagctgagtaaaatggttattcgcttattcgctgaccctgtcgggttctgtatcttatgacaccgctatctttgggtttttgttggtctgtggttaccatttagtctgttaggttatttgttagaagttttagtcaacggtgcttcatggttagactagtgagaatggtactaaaggttatataggagactaactaatggattgagtgcttatatcagttgagctcgccgcaggagtactgataaacattcatttttggtctggtattgtaatgaatctgacgagttgttgaatcttaggatagagttataggtttctcgaattctcaaaattttgatagataatctgtcttacatttgtgaaaaatgttgaatctttgatagtttcttatgggaaacaatttcttagaattgttgaacgatatgaccttagaaagttccgtagtcgtgtagctttaaagttttgagtctttatgatttgcagagttacatagatttggcggaggactcgtggaagaagaaggcaaagacggagtatcacccaatccggacacaaagcaaacagtacaaaaccccaaaggactatcagacacaacaacacttctatctccaggagtacctcataatgcagatgccagttaccacactggagttgcattgcaacgagcgtctagtgcggttacacaaaagcctggaattagaactcatcagaagtggaaaggaccggcgaaaatcagtcggatatacggtgattggatcgacgatattgaatga

SEQ ID NO: 149105 - DNA, 222 bp, Arabidopsis thaliana landsberg
tttccatttcctgttgcgttttccacgggaagacactgcccttctcttctttatcttctctcaaattcttcagttccttctcgaaatcattgatcttgatttgagctttagagaagagaagaacaaaatgcataagagaacatagaataagtagtgagatctaatcctgttcccatgtttttgtctataaagtagcaattagaacttcaatcttcaatttca

SEQ ID NO: 149106 - DNA, 1455 bp, Arabidopsis thaliana landsberg
atgtatgctgacgattcgtcacatggccatcagggatcaggccatgggattcgctatggcatcacagacttgagagtccagcttttccttacgatctacacgcatgtgccacgtgtgtttcatgcatcttaaaaacctctgagacagcaagagactctctgactctgtctaaagccaaaatgggtttattatatgacaatttgaccaaaatgggcttattataaacatctcgggcctaaaggtaaaagcccataagttgagacgatgacggtatccaaatgaaggaacggctttggtagtgacacgtcacgattcttccgccaccacaccacagctttttgcttcatctccttcttactctctgtgtctctaactcctcgtgcactcagacatcacagatatggcttgtgttcggtcgattggttctttaacttctgtcaaccattctcaacgaaatgttcctcgctcaggtacgcgaaaaaaccctaatttcgcacttttgattcgtcgaattggtagttgaaatcttcgtgttgcatgtagcttgaataaggaaaatttcccgtaattttcggtataatgctgaatccgaaactgtaacgagatttatcggaaacgaatcggtataaatcgtgtttctttgcgagctcatgatttctctgatttgataaacaagttgttaaggcagtaacttgatgtaatctgatcatggtttcatagtaaatgtgtgttctaagtaattgtggattagggttatggaaaaagattggatttttacatgtctcgctatcaattaacttcaagtgtgtaattaagaaccatagtttgatcccttttgttgcaggcattgtcttatcttcatgctctgttcttcccatcaaaagctcatctttcactggatcccctgtttctctcccgcgggctcaaccatcatcccgaacagctctaagaccgatgaaacccgtctctatcacgatgatggtaaagccggcgctccaattcatccaagggacggatgagatgacaatccctgatgttaagctgactcgatcaagagacggaagcaacggaatggcactgttctctttcgaccaaccatccgttttcgactcgagcggtgaagtcggagagattacaggattgtacatgattgatgaggaaggtgtgattcagtcgacggatgtgaacgcgagattcgtgaatgggaaaccggaagggattgtggcgaagcacataatgcgatcgccgaaagaatgggacaggttcatgaggtttatggagcgatactcggaccagaatggcttgcagtttgttaagaagcaatgaggttggagagaattttcaatgagcaaaacaaaatgtgtatgttacattaaattttttcactcttttgatttataatcttgtactctcctagttttgatctttacttgagtttcaacttacaatggtaat

SEQ ID NO: 149107 - DNA, 1575 bp, Arabidopsis thaliana landsberg
ttcttcattctaatttcacatgcagatgagaaaatttctggtgaatgtttactcgttgtcaatcaccagatcaccagagtgttatatatcatcggaatatacataagcatatagatttgtgttcgatttttaggtgattttgactttttgattagaaacaatggcttctagttttgtgttatctaattatcttagcttgaagattcctctattagctgattgtttacttgtgccacaagttatggtatctgtttcttgtgtctactaacttgtgatctgagtaaccatgaagctttgttgttcaatggctataattgttcttggttatgatcattgttttgtgtttagaggatctgatttgctttgttatgtgatctgtgtagtggaagcaaaagacggtaccatctccgtagcttctgcattttccggtcaccaacaaggtaatagaccttaacgtttttatgcaattacttatagtgatgacttaggagcctttggctttgtaattttgtccttgccatttttgttatccatcagtcttagttgaagattgtatgtgtttgcagaagttgttgtggtttatgtttatatactttgtctttgttcagctgttcacgatagcgaccataaattcctaacgcaagctgttgaagaagcttacaagggagttgactgtggtgatggtggcccatttggtgcggtgattgtgcataataacgaggttgtcgctagctgccacaatatggttttgaaatatactgacccaactgcacatgctgaagtcaccgccattagagaggtaagaaaagagtatacgcttgaatctcttgaaacgttgcaaaaaccggtttttttgatgatgatttgaatatattgttaatgtgcaggcatgtaagaaacttaacaaaatcgagttatcagaatgcgagatttacgcatcttgtgagccatgtccaaaaagcttcggagccatccatctctcgagactcaaggtaagaagtcgaaacaatgtctgcatacaaacccccttcttctaatcatttaaatatcaaaatgagtagtactcatgtctctacttgtgaacagaggttggtttatggagccaaagccgaagcagctatagccatcgggtttgatgacttcatagctgatgctttgagaggcacgggggtttaccagaaatctagtctggagatcaagaaagctgacggaaatggtgctgcgattgcggagcaagttttccagaacactaaggagaagttccgtttatactaaagctcttctccattaccacattcttcttcttcttctccttcatgatggtaattagaagtagtagaagaagaactgcacttgctttaacttaaataaatctctgtttcaaattgttcattttaaaaacagaaggaaacgaaaaaaaaattcaatttcggttcttgttgacacgctttgtaatttcttttcttcatttgaattgaactggtaaatactttcttctctgtcaaaatctttattttctatcttctgtacaaggccaagttcttcactaataaatcgaattgtttttctattaaa

SEQ ID NO: 149108 - DNA, 907 bp, Arabidopsis thaliana landsberg
gtattgtgtggattcaattataggctagctttgtgggatatgggatgtaaatcttagggcttcgggtgttttattgaaatcaggctaatcctgcgtcaggaatgacagtccatgatgactgcaagctaagatttctggaactgaaggcgaaaaggacacaccgtttcattgtctacaagattgaggagaagcacaagcaagtgattgttgagaaagttggtgcacctattctaacttacgaggactttgcagcaagtcttccagctgccgaatgccgatacgccatttatgatttggactttgtcactgcagataattgccagaagagcaagattttcttcattgcatggaaacataatttcttgttatctgctaaaaccatgtaacctcatttctctattcttaccttgttgttgttgttgttgctgctgctgccaaaggtgtcccgacgtagcaaaggtgagaagcaagatgatctatgcgagctctaaggacaggttcaagcgtgaacttgatggaattcaagtggagcttcaagcaactgatccaactgagatggatcttgatgttttgaaaagccgcgtcaactaaaagaaactctctttgaataagcttccgattatattcgactattatgaaatggtgttttctattctcttacagtctcttgtgactgttagatacacttgacacccttcattctatctgtctggtctgttctctgtgtctatgttaccttacagtgtctcatctatattcaaaattatcacaaggtttgtgctgtgtttgcttcctttgtttcaactctaccaaagcttaagattaagatttgggtaagatgattcttttaagcttccctttgttctctttgttacagagggtataaaaaatgcaaaaactattcacc

SEQ ID NO: 149109 - DNA, 1403 bp, Arabidopsis thaliana landsberg
aaaaaaaaagcaattgatacttctttttttaaacaaaatgcgaagaagatttctagaatgttgacgagagcgcttcggattttgaaacccaggttatttctgggaagtttgctacagcgtcgatcggtttgtttctcagctccgtcgccggcgttttctaccggagctatttcccgtacgacggctgagattgacgccgatgaagttactgcgtgcttggatccagctgaaccggtgactaagattccggtgataatgcctggtaaccttcagccacgtgtcgtcgtgtacgacggagtctgtcatctttgccatggaggtacaatgcttttctatttctctctttagcttagaacaactccgttttcaaaaggatcctttagtggtttattgatcgattctgtctattgatctggctatgtatgatgaaatgatttggttctagtcgattcttagtcttgttctgcgaaatttggggatgtttgcgattcaattgaaatgattgttatttctagttctggaagaagaagaagattatgcagtttttgtaattcgttgttcttgtcacattgatttgacttgaagtcatgaaccagagattgtggaagagaaaatgtgggaattgcttttcgtaattgtcctttgttggagtcattgtgctagagaatttgaggtcttctaagaaggattgtgtttctaggttgaattgttgttaatttgtatctgagtaattgtgttcaatgtaggtgtgaagtggataatcaaagctgataagtacagaaagataaagttctgttgtcttcagtctaaagcagctgagccttatctagaagtgagtggtgtcactagagaggatgttcagaaacgatttctcttcattgaaggtctcggcttttaccatcaggcatcaaccggtatgtacatcttctttttacaaaaatgctttcaagtttcacagttaagagtttggtaagatttagctgaaaacatctgctgcactgagaagtaagtattttaagttattgatgagtctgcctagtttaagtatgccccactggttagttatggtagatggattccaaatgatatcagttttaactttaagctagagttaagtataactaagtatgtagttgtttcgtaattaacatgttattataccttctgattctgcatcttttgactctgcagctgcactcagagtggtatcatacttacctctgccttattccgcattgaacgcgttctccatagttcccactcctctgagagactcggtgtatgactatgtggcgaagaatcgctatgactggtttggaaaagctgaggattgcttggttctgaatgacaaagagctgttggagaggtttatagaccgagatgaactcattaatcgaagctaa

SEQ ID NO: 149110 - DNA, 2050 bp, Arabidopsis thaliana landsberg
atggcgattctatcagcgagctctactatagtgagagctgctttagatacgcagccgaagctccgatacaatcccaatgcgccacgcaatgttaagaaaaattctaatttgagttcttttgttccaccgtcgtctccttcttcatcttctccggcgacaaacttaagcgtctccgtttctgatttactcaaacgtcctgcaagcaaaggtaacgaattgggtcctgaataattgtttagaactctctctttgttatgtccaattcatgattcatactaaatttctggttttatgtagatattggtgatggatttgatgatacttgtgttggatatgagaaatggtttccaagtccaccaaaagtggagaaacctagatctgtcttcaatgctgcctcattagcttatattggcgattcaatctatgaggttagttgttcttcagtgatttaagaaaagtttttttgtacttaatccctgatgatttagtcttcgtgattttagacaagtttatgatccaaggataccaagtgatgattatgttagtgtttatagcattaagatagatactatgagcttgttctttaggatgcaagaatgtcaaatgatgatcattttcagtgattgtagcattaaggcagccactatgagtttgtgttatgtgatattgacaagttttttctgcttagtccttgttgttttaggttgcaatagtgtcagatgatgattatgttagtgtttctagcattaagataatcatgattagcttattgtagacaagtttttgtacttaagccttgctgttttaggatgcaagaatgtaaggctgatagtgtttacaatattaagacagtcactctgttgatattcgtaattttctactctgtttaaccattttttctcttggttgtgcagctatatgctcgtaggcattttcttttccctccgcttagtattgaagattataacgatcgtgttagagctgtggtgccctgtgaagctcaggtttggtatcttttgacctccttgttttccaattttgaagagacagtgtattgttcggtatcatgattttgctgagtagttttatttatttcatcttatgacactcttactttgagaattcattttcgatgttaactgtcagcttttctcgtaattttatacagtatgctttgctgaataaacttgttgatgatgactttctaacaaaggaagagaggtcagtacacaaaaaccactatttcatcatccaacttttctctgccgccacactatgataattgagaatcctgtgattgagctgagatacatgattcacttctcattggattttatccatctgatgaatttgtatttgctccagggatattcttaggtggggaaagaatctaggttctgctagaacacgtacaagaaggcgtgcaggtaatgcggtttataacaaggcatcatcattggaaacactagtaagtaacaccagtatctaaacttacactgcgttcttctttgtgctcttaactctgttttgaatgtaaatcttcttgttgtcacttatctgtgcaatttccagattggttatctgtatctgacaaacgggaaaagattagaaaaaataatggagaagctaggattctcaagtgattcttcaactgagatcgtgattgaagaaaccaaccctaaaccatcagaatcatccaacctgccaaacttcatactcagtgagttaaatctacctcctccattaaattcgatcataaacttcatcatttggtggattcgctggaagctacacaagtcataaactcatataaccatcttctccttcgttaatttgtagacgagcaagtggtgtcattttagttgtaggaaaaggtctttactcggatcatggaaaagctgaagaatcaaagttgtcttaaatggccggtgtagcaagcataacagtgctcacttaaccggagaagacgttttttcgtatatgtacatacgtatgtatgaatgtccaactcctactggatatcaaatcaaaatgcccatttttgtcttct

SEQ ID NO: 149111 - DNA, 786 bp, Arabidopsis thaliana landsberg
atggaccctgaagttattgagaagcttgttttgaacagcttaagtaagtacaaactacttaacattgtcccaaccttctggacatttttactactaggcataaccataacattttccctggaacctaaaacaggcacagtaccagtgaagcttctcttgcagctaacaacagccgtggaccacggtgggttgcgtgacagaaccggtactttctgttacaaggatcatatcagcaaaacaaatgtgcctatcttagctcttgcaggggactgggacataatctgccctcccgatgcagtatacggtagttttctttgaaatattcttaccgcaaattcaagatttcattctcttatttgttgtaatctataaccggtgtgcaattgtgttgatctgatgaggcagacactgtaaagctgattccagaacatctagccacttacaaagttgtaggatcacccggaggtccacattatggccaccaggatctaatttcgggtcgaacggtatgtactatgatcaacacctcttcattcatttacgagtcatatcggtcggttttgtattcaacctttcattctccctacaggctcggaacgaagtatatcctctgattactagatttcttcaacaacaagatgagagttaagatcaacaagaatgcaaatgaattttgattcttgtttctgtacatataacactccttatgtacatttatgtacacaaatcttcacacagttaaactcacaagcactgtatacaaattatatacaaatgataccttta

SEQ ID NO: 149112 - DNA, 669 bp, Arabidopsis thaliana landsberg
acagaggattaagaccaataccaccagagaagggcattttccctttggatcacttgcacgagtgtgatgcggtattcttcaacaaacgattttcttatgacctttgtttggttatatttctgtttattcacttttagctttcattttttgttttcaggagaagaaagaatatcttggttgtcttaagtcttcagctcacaaatctgaacaatgtagacatctctctaagaaatatctccagtgtcgaatggctaagtacgtcttttttcttacttttgtcaccatcatagtttctctctagttcatgtttacttgggtcgtactcgtatcgaggaatgttggatgggtttagatcatgatagtgatattattatgcaggaacttgatggcaaagcaggatatggctgaactaggattcagtggtgttaaagaacttgattccactgaagataagaatacagagagtatcgaacattgaaaggttgaccaaaaaactttgagcctcattttgtaaaattttggattaacattgggatagcatttgagattttaggtcctaaaacccaactactatgaaagtatatgcttcagattcaccaatttttatacgtatgtattcctgtgtgaaataaagcattatacaaagcctgaaacagaagcaaagtattg

SEQ ID NO: 149113 - DNA, 3468 bp, Arabidopsis thaliana landsberg
  unsure (1)..(3468): unsure at all n locations
tatgtactacagatctcaagtactttcttttatgtaccctttcttgatcaaagcaaacaaattcatggttttgctaattcattgtttttccttaattgcaggctgcaatctgaactaatgggattgatggtaagctatcttttctctgcataactgaacctgttgatatggttggatgcttatatagaggcctttgggtttatgtattgcagatgggagctgatccggggatatctgcgtttccagaggaagacaacatattttgctggaaaggaacaattacaggaagcaaagatactgtgttcgaaggaactgagtacagactctcactcactttctctaacgattatccttttaagtctcccaaagttaagtttgagacatgctgcttccaccccaatgtggatctctatggcaatatttgcttggacattcttcaggtacataacaatcacttgctctttctacttgtgttactgtaaatcccatggaatcacatatcagagaagcagtacttaaaacagaatctgttttcacatcttttgtaggataaatggtcatctgcttatgatgtgaggacgatattactctcaattcaaagccttctcggaggtaaactctatggctgatataactgttgaggttacttatgaagaatttctctgttggtttgatccagtatctgatttttcctgttttgttttaattgatcagaaccgaacatcagctcaccattgaacaatcaagcggctcagctttggagcaatcaagaaggtaaaattgcaatagttatcagattacacatctctggacgtctccatttttcgattcataatgatattcgtcttcttgaacttgtaatgttatacagagtacaggaagatggttgagaagctctacaagcctttaaacgcatgattctcaaaaatcactgtaactgattttaaaatctcaactgtattggatcatatctcttttacttttataatctcaatttgagccaatattagcaatcaaactctacctttattacagttccacaatcaccacctatatctcttccgtaactgagatttgagaagttcataatagtaactctgaaatgttgtagtaagtatctgaaagtataatacaaaaaaaagtttctgaactattgaaaaatccagaaaccaaaggttccccacgagagaagtaagactcaaacatgtgaaacgttggcaccggacaaagtactgaagactaatgaaatgttttgaaattgacatttatggccttctttttaaatccccaagcccataattcgtgcttaactctttattacaaatgggctttgagggtatatattatttcggcccaatataaaaacgtcgccgcttcattcataccctggccgtacatcccagaaaccttgaaagttaaaaacccgccggagtctctcactctcacaaacttttgagaagcattttcgcttcaattcaataaaaggcgaaaaatctctcactgcactttatctcgagagctcagatctccgatctagagcctttcgcttctcctcttctgttcatataacaactgaataatgtcgatctccgcccaaaatccgnnnnnnnnnnnnnnnnnnnnnnnnnnnnnngatgttcgtactcagaacggtactactactctccatcgcttcctcttacgtctatttcctatctcttctcattactaaactgttcactttgttttcatcgcaaatttgtttcgatctctagctagggtttgttttgaatctattcttttagatgttttgtggttattgactcgtattttatatactctatttgcagtgatggcttgtcaagctgtttctaatattgttaagacctcacttggtcccgtcggcctcgacaaggtttggtttctgatttgcatctgtgtatatatattctgctagctttcttttttatatcttagatgcatcttggcaacagttgtgtttagttttaggttacttttagacctaaccatttctagttttattctaaatctgctcgatattgtcctttgtattttcgttcctagttcctccaatcgtgtttcatgttatgttggcttgtgtttcagatgttggtggatgatattggtgatgtgactattacaaatgatggtgctactattcttaggatgttggaggtcgagcaccctgctgctaaggtaatttatgcaaatgtgattgttatacgtattttcttatcatcatttcaaaacactggttatgaattattagttactcagttctctaatctgtctacttttgttgtgacaggttcttgtcgagttagctgaacttcaagatagagaagtcggtgatgggactacatctgttgttattgtagctgctgagttgttgaaggttagtttgattactgttttctttggttttggttttcctagagttgggagatttttcacatggtaactattgcttgatgattaatgggtcttatgtatatatttgcagagggcaaatgatttggtcaggaacaaaatacatccaacatcaattatcagtggatatagggtaagctgcgactttaatttcatatgttgtaacctgcactgcagaagtgtttccagtgtgttcattatcttttttactgttgacagctagcaatgagagaatcttgcaaatacatagaagagaagttggtgaccaaggttagtcctcgtgtgatggtctatagtcttgcctcttagaggaaattttcctctcttcatacaatttttttgtgtcagtataattgggaaagctcactgtactgtctgtctcttcccctttagttaattacttttttttttgcgttttataggtcgaaaagcttgggaaagttccattgataaactgtgccaaaaccagcatgtcctccaaactgatatctggtgacagcgacttctttgccaatttggtacgcttccagttctccttactaagcaataacgtggaaattcattaaaacattagtgttattaaaacctatgtttattcttggttttttcttgggggactcttttctacttaaatctggtttatcttgcaataataccctagtcattgcatgtggctgaactgttataatcacatttcttttaaaggttgtggaagccgttctttcagtaaagatgacaaatcagcggggagagataaaataccctatcaaggtctgttaatgcttctctgtcaaagtttcaaacataaagatctgtagtgaggatgatatttttatgcttaaacgcttattcttaccgcattgtaaggcattaatattctgaaagctcatggacaaagtgcaagagacagctatttgttaaatggatatgcactcaatactggtcgcgctgcccaagggatgccattacgagtgtccgcagcaaagattgcttgccttgacttcaatctgcagaagacaaaaatgcagctgggtgtcc

SEQ ID NO: 149114 - DNA, 3290 bp, Arabidopsis thaliana landsberg
  unsure (1)..(3290): unsure at all n locations
atgcaccgtaagctttggtgaaagtttagacatctcccatggcatgaatgactttgaagccacttctttaaggacagaaaagtctcacaacgtgactacaatgcttgtagaaccgacttgatggaatatagataaacaaaagatcaaatgaccaaattatgttaagagaaactaagctcaggattttgtaagttgtgaagtttacacaccaagaagtaatgcttagaattcttcctaaattttgtaaaatcctttctgaatttctatttttttacgagaaatttttaacgaaaattgttttagcgagaaaatattgtctgaaattttggtgatgaatttatgtattatttgaatgttatttttgtccaaaaaacttttgagtgctatttttgtccaaaaaacttgaaatgttgctatttgtgggaatttcctataaagtaacaatcttttgtttttcttttttttcttgcagtcactaaaaataataatttaattctcttcagttaaaacccaaaaaagaaaaaaaaaaactagaaaagcttttctcctatatgtaatcgttttcttgaaaatgtattgtgatccatgtaaaattatttaattctttcaacataatacatattttgtttgatatgttctctcaaaaattaatcataatttttcttatgtgtttaggaataaaattgttaaatgaaatttacttttctgattttataattgggctatgtggacgagaagcaacacaaagtggcaacaaagtcatcatttagtattggaggtcgggttttgatccctttcagaaatcgcctcctttctagaaatgttcaaaccttgctacgtattagaaatattcaaaactgacttagaaggtaaaaaagaatagactattttttatacttatttttttttatttattgatttatatctttaaattgtaggtgacattgttcaagccttgctatgttctagaaactgaccacgtggttttgcagagttagaaggtaaaaaaagaatagtctattttttatacttaatttttttcatttattgatttatatcttctaattgtaggtgacattgaagaatactttaatgatggaattaaaggtactacatcggtagcaagtagttgtggagtatgagaagaagttgtttagattttttcactacttttgtatttctgttttaaattagaatctttgatgaaattctgttttgtataatcttttaaattattaatgtttgagtgaattttggatttataaatttgttagaaactttgattaaattaaagaattaaaatcaattaagggtaacaaataaagttttttatacaaaatacaaaatacatgattcaatttaaatacatatgacagtgaatataatatatatgtcaaatacagaaataaatacaatttaaaatatctatataaaatacagtttttttgaatccttttttttttatgaagaggcctgttttgagtttgggctgggctgaattgtttttacccaccacaacattcctaaggataataatacagtaaccctagaaaggtttcctccaccttcctcttcccctcctatataaaaaaaatcgacatcgcttttgctcacttctctctcttaggttttttttcccttctcccaatctcatcttctccgaaaacctttcttctctcaaatttctgtgaaaacatgtctgacgacgagcaccactttgaggccagcgaatccggagcttccaagacctatcctcaatcagccggtaacatccgtaaaggtggtcacatcgtcatcaaaaaccgtccctgcaaggtctgatttctatttcatcatcaaacatcgttctcgatctctttttcctgattctagatctcgtctctgtatagtagctccttgattttgtttttatcctcggatttgacctggttctgtgtagtttgaatttttcttatagatcgctacttagatgaatatgatgaatcttatcctgttattttgatggtggtacctctctagattcgcggaattctgggaaatgaaaatgacaaatggatagaaatcaagcaatatcagacgacgccttttgtgattttgaatctaagtagtctattgattgatttgatttaaacgtttatggagaacatagatttgattttgatattttggttttgattaggttgttgaggtttcgacttccanaactggcaagcacggtcacgccaaatgtcactttgttgctattgatatcttcactgctaagaagcttgaagatattgttccatcttcccacaattgtgatgtaagttactacacaaactatgtagattcattttcacagtatttgatatgattgtgtgatctgactcaaatattgttcctttctctttttttctcaggttccacatgtgaaccgtgttgattaccagttgattgatatcactgaggatggcttcgtatgtttttctttatactcactttcctcatcactccagctttatttatctattcttgccataacttttgtacttgtttacattataggtgagccttctcactgacagtggtggcaccaaggatgatctcaagcttcccaccgatgatggtctcaccgcccaggttattttcttgtcttttcatactcgcacacaaatgacttgactttgtattcatctctcgaattgtgatattgaaaacagttgttgtgttttgttaatgcagatgaggcttggattcgatgagggaaaggatattgtggtgtctgtcatgtcttccatgggagaggagcagatctgtgccgtcaaggaagttggtggtggcaagtaaacaagtatcattcgatatattattaccagtttgacaacggacgtcaatgttataagaaccaaaagatgtttttctttttcctaatttagaccctttgtgtgtgtttcttgttgcaagacaaccatatctattggttttggattgttggaaaagtttgtgttgaaacattcaaagtttcttatgagatgttattcttaaaaccactttttgtttgttcactggatatgtttgttcatgaagcttgttttaagcaactctttacatgatattcattgctatttgcacgattcaagagtgacatatacattttatttaacaataacagtgtaagatatgtgattgaatacttgtggaaacatagagttacacaggctgcgatagtattcgacattttaactggttttgacattacacgattttgtattccttgcacaaagtctggtaaaacagtaatagcaagaaaa

SEQ ID NO: 149115 - DNA, 2687 bp, Arabidopsis thaliana landsberg
  unsure (1)..(2687): unsure at all n locations
aaagacatgagacttcgcttctatnttcggcatctttcgtaccactgtgaatttggctctaacaaatcttgatttccatagctgaatatttgataggtaaatagttcttttacaaatccatttatgagaaataaaatatggtccctaatgaacataaattttcatagatatttattttttgtatgaggaacaggatccctttccgtggtgaccgatccattttcaatttatagtctcatttctcccttacatgtgtttgaacttttatcagatttatgagtttaataatgaaatgggtcgggccgggccaggttgtgcgagatccaataccaacatgtacatcatcatttgctttaatgtcttacaaaatcatttacatttttaaattggatatttcatatatatctaaaatatgaaaacaaatcctcattaaataagcagtcaacaattactaacttatgttgacttagtaaatatatgcacatttgtaaagatttctctacctatatatatatacccagcacatggtccccatcaatattcatcacctatcaaagttaaataagaaaaatatcattcaaaagaaacaataatcatgaaactcttagaacaaatggtatacgtagaatgttttatgataataatggctacattgttagtgtccatgagttacggtcatcgagcgatgattaatgatgtagccgaagcacccgtgattgacaatgtaggcagcccaaccaacggactcgacagttcttggtatgatgcacgagcaacattttacggtgatatccatggtggagaaactcaacgtaagtgtgaaaaaactaattattgaatttttgtttggttcataaaaaatcatatacgctgcgattgttttaaatgattacttttgagtttgcgattgcatttacatatatcttaatgttttgatcaaagaaaaaaatgtacataaaattaatgtttatttatttttattcaatatagagggagcctgtggatacggtgatttattcaaacaaggctatggtctagagacagcggcattgagcacagcactcttcaacgaagggtatacatgtggggcttgttaccagatcatgtgtgtgcacgacccacaatggtgtttacccggaaccatcaagattacagcaacaaatttctgtccaccagattactccaaaaccgaaggcgtttggtgcaacccaccacaaaagcactttgacctctccctaccaatgttcctcaagatcgcccaatacaaagctggagttgtcccagttaaatacagacgtatttcttgtgcaagaactggtggtgtcaagtttgaaaccaaaggaaacccttatttcttaatgatcttgccatacaatgtaggaggcgctggagatatcaagttgatgcaagttaaaggagacaagaccgggtggataacaatgcaaaagaactggggacaaaactggaccactggtgttaatttgactggtcagggtatttcattcagggttacgacgagtgatggggttacaaaagattttaataatgtgatgccaaacaattggggatttggacagacttttgatggaaagattaacttttaggagaatgatttcagtttttttactttttagataagaaggaatacaattaaaatgaattaacagatgtattgggttcaataactaaaaataaatgagatatgctttattatgtgtagttgatggagtgaagttttttacttctatgtttccatctttttatttttttgccatggaatcaatttacagatttgttttgtgaacctaattgtttaaaataaaacatttttagatttttttctatgtataacatgatttaaaattttgaaatctcatacaaattatttaaaatagtgaataatatttggctaaaacacaaaaataaaataatataaaataaaactaaatagtatagaacgaacattagactaacaaaggatcgagttaaaccgatccgatcccaaaaaaaactataccctatgcgatataatattggcaacccaagcaaccaaggtaaatcatagtagtgatgttgacggtaaaggtggtggtggtggtgacggtaatgatggtggtgatgatgacaatggtagtgatggcactaacggtgaagttgacggtagtggttgcggcgatacagttgtggcagtgataaatgatgatggtgagttgatggtagatgtgatggtgtaaaaatatttaggatagttataataagagttggagttgcagaaaataagttgcagtaaaaaaaattaagtataggaagaggaagaatgtgggttacaaataaaagttaaagttgtctttattacatatattatacacaatattgtcttctagtttttgaggtgttagttttcaaattattaaaaaaatttaggttttaattacaaatttccctaaatgttttggcgaagagagaagatttggcttcaggatttacgtaggtttttttgctgatgtggcatcatagtgcttatcttgtctacatgggtttcttaatatcgatttagcccaaaacacatgtaagtggttctgtcgttatcctttgatgtagtgtgtatgggcttcttaatagcaattcagcccgacaaaccacagcccaacaaaacgggcttgtcattaaatgatgtgattatgtag

SEQ ID NO: 149116 - DNA, 2339 bp, Arabidopsis thaliana landsberg
ctgccaaaatgtctcatagagcagcattacattaaatgttttgtcaatgtccttaaatacctgatcgattaatgtcctgtaagacctgatctgtttctttctttcttctttcagtggataccgaaagagtcaagtggttcagtcacagatgcagtatattcatgtgatagccagtcaatctatgcagcctttgatgatggaagtgtgagtatcttgacggcaacaacattgcaactgaagtgccgcattggtcccaattcatatttgccttcaaacccgaggtaagaaccctctgctatatttcaacttttggcagagttaagacaaacacaacaacataagtaacatctggctttttattgaatatagctcgagagtatatccagccacagtcgcagcacatccgtctgaaccaaaccagtttgcagttggactaaccgatggtggggtccacgtgatcgaaccaccaggtccagaagggaagtggggaatatccgcaccaccagaaaacggagcagggccaagcgtctcctcagctcccgggtcagatcaacaaccgaggtgaggtctggtctgttcaccaagctcgcaccatgcagcctcccaagttattattatacactttgagaggatagctctgagattgtaggttattatattgtcttactcaattcatagtaggtgaaaggtgaagcagcagtttcttccattaattctagtgttttactaaatggtttcatttgagattcccttattagtaccattatagagtttccccctcgcaacagttaacgtttatctagatttcaaggtatgtagataaaaagattgtttataaagtcttggtgttctttagacacaacaaatcacagctctaactactgaagaaatagtgattcgtagttggagatggaagcaggaggagcagagatcaaaccaaagcctttcccttcatttgagtttcagtaggtaacttaacgttagtggccaaaccaatagcttcaagaaatctaatgagacaccaagtaatgtcgagctgccaccattcgagtccatgcctggccgagaactcgaacgcatgatgattgttatgccatccctcgccaagtgttaaaattgctacccacctgatatattcatcaccaatatagtaattgctaatatcactatttagttagattagatatatgtataagtgtatgtgtgtgtatgcacattaccaattgtttttggagaagtcagatgtgttccatgctcgtgttccccatatatgacaaactgagttcaccagaaaagtcaggtgaagtcgaaccgcaattgtgataccctgccattgccgtttctctcatattattttacatggataatagtatattgagattaagacaaggaatggtatgtatccttacaattccccagacgagtaaaggcatgcctccacaaaaatagaagaggaaggaataagccatcatatgcaataggaccgttcgctgaaggaacctatagaagggctgcctcacaaggtcatctacattctcctctccaccacactgcgagcatgcacccaacggtttagtcagggttaggtctcttccccggataggaaaaagggtattcttagcatcgaaaaaacttgatcatcttaacatggccatcaagaaattaatttggttttacaaattgataatttttattacattctcaaggatagaacttgtatcaaatatccatgccatgtgactaaaccaaaacccttgtgtagggctgtgtgggtcacgttgtgtctcacaatgcttatgatggtaccgatggttgctcacccactctattgggtctccctgcgcgcacacacaatttagaagttgcgattaaagatacataatatatatattcttaatctaatgttcatatcaaacagtgagaatatatatatatatatatgtaaacctgaaaagccagaacgccaccgtaagcaaatagatattcgagccatttcggcagatcaaaacttcggtgagaaaggttcctatgataagacaaggtaatgcagattccattgatgaaaacgagccaagggaaaacccaaaaagcctcccaactgaagtaaaatggagccaagaggctcaacaaatgagtcccgacgaatattactaacttgctcacgtcccaagaagtccaactcctttcccaaaatgacctcttcgttctcaccaccacaacctccgacaagagtcttctccatgagctctcgacatgatccggtgcctcataaacagccacgaccgtgtgtttcctgtgagacacagatcctcctcgtttggaccaaaaagagtttgtaa

SEQ ID NO: 149117 - DNA, 1002 bp, Arabidopsis thaliana landsberg
caataacccctgttccctctaatagcattttttttcaagaattgggttaaaattaaagaagttctgagttagttatcatgcaggagagctgtttggagagcaaaagtctgagaggatatgccaaacccattgcagaaatcgctgcatggttacctgtcaaagatcaaaaaagagacagggaagctgcaactgtcttcctcacattcattctcatcctcaaagaattgggtgcttggtaagcatcccaagaagctctccttctccttcaagcacagacgactcagcagcaagaccagattcagcaaagaagaacccgtttaccaccaggactctgctcacgccgccaccttgtccgacattgatcgttttcttgaggaaaacttcaaatccctctgcatcagagacgaccaggaggatgatcagcatcaagcccgggtgaccaaaaacaaggagaaaagggagtcatcatcagacgacagtgatgatgatgatgatgacgacgactatcgtcacagattcgagaggacatggggacatgccgtctacgactccccgaaacagcccccggatttgctgagaacagagaggctatctcctccgcctggatcttcggagggcaggcctagcatggaaacaacgtcaacatcgtcggagaggcaatcgagatccaccttggtgctgccggagaactgcatcgcggtgttaagatacacggatgagccgcaagaggatttcaggcagtccatggtggagatgatggagtccaagttagggatgcgggaaagcgaagtggattgggacttgatggaagagctactcttctgctatctggatctcaacgacaagaagtcacacaagttcatactaagcgctttcgtcgatctcatcattgctcttcgtgagaaggagaagagaatcaccaggaaaggtcatgtgaggtcgctcagtactcgcgccgccagggacaggcttaggaagaggatgatcatgagtgacaactaa

SEQ ID NO: 149118 - DNA, 534 bp, Arabidopsis thaliana landsberg
tttccttttcagttcatggtagttaattcacctcattaaggaaaaatttattttggtgtttaccttcgtaaatgctttctaatccttcaactcattataatggtcatggcttgtaaatgaaaaccaggaaatggagaaggtgcaacaaatgacaaacaacaaaggaatcatgaaggttgaaattcatagccatttcaattctgcggtggaagtgggttcccgtgggctatctcgtcagacaagcatgaccaagaccaactgcctttgctcaccaaccactcaccctggttctttccggtgtaggattcaccgttctctttcgttgcaacgtaccaagagtatcgaggctgcatctctattggattctccaccaaagccagcggattcccctagtaccgctacatagattcatgcatgaatccatgacattaccaaatgtttgttgtacttgtaatttgatcattatatggaggagtaggcttttattttccaacaatacgcatgaattacgcgttaatcaatggcattacaatt

SEQ ID NO: 149119 - DNA, 616 bp, Arabidopsis thaliana landsberg
ctttttcctttatataaagttagaaaaacaaaaacatcaaaatagttagaaaaaatctgagagaaacagaaggaacataaaaaaaatgaggccattgagcattaaaccaacatcgttagatgtagctagacatgccacatcagtagaatcatttgggaatcaccgaccgccgatatcgccgtggcactcaccggtgccatacctattcggtggtcttgcggcgatgttaggcctcatagccttcgctttacttatcctagcctgctcttactggcgcttgtcaacctccggtgatgactccggcgaaagagtcgacgaggaaaaagagagtcggtctggagtgaaggcggctagcgcggcgtgcgaggagaaggttcttgtcataatggccggagatgacttgccgaggtttctggccacgccggcggcgaacaaatgcatgtgtggtcacgagggtagaatggtaattttcaaggaggatggtattggtgctggagaggagaaaatgggagacagagagaaagccaaagaaaatgaagaaacaacgagcccgtgaccttttttgttttcttttcttctctcagtcttgtcttttttttattgttgggaattttcc

SEQ ID NO: 149120 - DNA, 581 bp, Arabidopsis thaliana landsberg
caattcgacctcaattgaaattagggtttctctgcaactccacaaacagactcttaacaaaacttcgattcccaatttcaacaatggcttgcgtaaacgaaccatcacctaaactccaaaagctcgacggaaacggaatccatggcaattcatcacaatcaccattcttcaaaatgaagaaactctccaagatagctgttataccaacacgtggctcaccactctccgctggatacgatctctcaagtgcggtgaattcaaaagttccagcgagaggtaaagctcttatcccaacggatctaagtatcgctgttcccgaaggaacttacgcgaggattgcgccgagatctggtttggcttggaaacattcgattgatgttggtgctggtgtgattgatgctgattatagaggacctgttggtgtgattttgtttaatcattctgatgctgattttgaggttaagttcggcgatcgaatcgcgcagttgattatcgagaagattgtgactcctgatgttgttgaggttgatgatttggatgagactgttcgtggtgatggtggttttggttctactggtgtc

SEQ ID NO: 149121 - DNA, 372 bp, Arabidopsis thaliana landsberg
tgtcatttctctctctagtggcaaagtatggcggattggggacctgtagtagtcgctgtgatactgttcgtgcttttgactccgggacttctctttcagattccggcgagaggtcgtgttgttgaatttggtaatatgcagactagtggagcgtcgattctcgtccacaccatcattttctttggtctcatcaccatcttcaccatcgccattcgtctccatatctataccggttaatttcaccgtaccggattcgtaacttcccccggttgtctagttttatggtttgttttggattttgtttcttctctgtgtcttgtcaaaaacgttatggaatttgtgaatctgaatatgcattaagttaatttcaaa

SEQ ID NO: 149122 - DNA, 1900 bp, Arabidopsis thaliana landsberg
atgaatcccgaggaatcaagaaggagagcttctgctcgagccgtggcaagagggtttgagatgattaatgagaagaatcagtcaaggaatcaggaagctgcgagtcgtggttttactcggatgacaggccgagtacaatggccgagtatggccccagagtcctctgtgggtcgttctgcggctgctcgaaaggaaatagcaagaggcaagtgggtctgggagtccgagccggttgcagaagaagaagtgcctgagatagagaaggaagcatctgaggaagatgtgcaagttgatgaagaggtcctgatagttcctacaaggagaagaaggaacaccatgaggagaaagaaagaacctaccattgaagagcactaccaatatctcatggagctgagttttgaggggacaagatatccccatagacctaccatgcaagctttggggatatgtagggatgttgactacctcatggagatggccaagctggagactttcttctcctacaagtgtgaaggatacaaaactgagagctgccaattcctagccactttgaagcttcatttctatgctgaagaaagggagagagagctgcataagggagttggctatatcacatttatggtgtttggaattcaatactcggttcccattaggcagttggatgctgttttcaagttccccaccaagtatggaatccgccaaaacttcagcaaggacgagctccttgatctatggttgacaatcgccggtccactcccctacaagtcatctagggccaagagttcgttgataaggagcccggtgcttaggtatctccacctttgcattgcaagtgccttcttcccgaagaagacaaccggccatgttaatgagggcgagctgaagttgcttgatctcaccttatgcttcattttggggcgcacaaggaatgggatagagatggaaggggatagggctgatacatccctttcggtggtgttgattgatcacttgattggttttagagaatatgcaaccggtatccaccaatccggttatggaggaagcttatgtgctggaggagtgatcacgcccatcctaatagccgctggagttcctcttcacaccccactcacacaacaacctatattgatatggagtacttgaagaggaaatgctattttgatagatctgccccagctgatcaactctatttcaagttcaagcactacacgctaggtctctctaggctagcactccgttgcaagaagttcaccacagttaggattgggaacaacattgactttgatcctcctcaatcgatcttagtcaacgtccttgcacctctacaagcagagccgagcataggaagtgagtctcaagaagaaagagcagagttcaatgaagaagaaggtgagcatgaagcttatactcggtcgagtgactttcagcaggccgagtatggccaggccgagtatgaacaagctgagttcagtcgagctgaacagtttgatgaacaagaagattcgtgtgaagctgcagcggtgcagtttttctttgaaaactatgctaagtccgatcaagagacagatcccggtcaagttcacaagaagttgggaatgctcaagggtttgggcaagtttcagagaaagatgttcagtgggttaaagaagaaggtgagagagatgaagagagcaatggacggcatggcggttcaaattcaggagctgcaaagaaggcagagatcgccaccacctccacccgagttcaggagatgtaactcaacgagtgtggcacaacaaagggatgctcgttttgacccgccaagagtctcaaattacgagctcgggaggagctccaccttctcagaccgccctttttaacaggcgcccacccggtctagtgaaccagttggttctga

SEQ ID NO: 149123 - DNA, 548 bp, Arabidopsis thaliana landsberg
ctctcttcggaatctgagaagccataaatcagcagaaaaaaatcttaaggatcggaaattttataatcggatgaatagagtgattagtcagttttccggtaagttgatgaaggagaagagtgttaccggtgtaagcggcggagatacgactttaagatctgccgtcaaagaatcggtctcgtctccacagagtgcgtcgtcgtcgtcgtcggtgaggaggcttaaaggagatctggaatcgagtcgatttggtgcggcggcgagtgagaggctgaggcaagcggaggaatctttgaggacggtgatgtttctgagctgttggggatcttgttagatctggttgagaaaataatagaagagaaaacgaaaccaaaacgtttctgtttgtgtttttgagttttggatttttgttttctctgtgaatagtttttttcttttttttttcgttttctttgtactttgtgtttaatgtaaatcatgtataaaatgaaaagtaagtcaatgaagacaactcgtttgtcttcaccaaatcatgtatttaaatcaaa

SEQ ID NO: 149124 - DNA, 568 bp, Arabidopsis thaliana landsberg
cgacgatgccgagcagatacccaggagcagtaacacaagactgggaaccagtagttctccacaaatcaaaacaaaagagccaagacctacgcgatccgaaagcggttaacgcagctctgagaaacggtgtcgcggttcaaacggttaagaaattcgatgccggttcgaacaaaaaggggaaatctacggcggttccggtgattaacacgaagaagctggaagaagaaacagagcctgcggcgatggatcgtgtgaaagcagaggtgaggttgatgatacagaaagcgagattggagaagaagatgtcacaagcggatttggcgaaacagatcaatgagaggactcaggtagttcaggaatatgagaatggtaaagctgttcctaatcaggctgtgcttgcgaagatggagaaggttctaggtgttaaacttaggggaaaaattggaaaatgattgaaacgatgtcgtttatcttgtattttgttgaccaatgtaaaacagaaaaaaaaaagtcttgttgttttgtttgataaatgaagaaaaaaaaacaaaaaaacatcttttaatct

SEQ ID NO: 149125 - DNA, 1194 bp, Arabidopsis thaliana landsberg
cacccgtatctgccaaaaaccctctaaccactcaaaaaaatatctctgctctgctccaatggcgtcgttactcgattccgtcaccgtgacccgcgtgttttctctgccgattgcggcttcggtctcgtcttcttcagctgctccgtcggtttcacgacgccggatttctcccgccaggtttctggaattcagaggtttgaagtcttcgcggagtttggtgactcagtcggccagtctgggtgcgaatcgtagaaccagaatcgctcgcggtggacgaatcgcctgtgaggctcaggacaccactgccgccgccgtcgaaggtaacttcagttttcttatagtacaactcgtagatctgaaccttaaatcagtgaggattcaacttcatcatctatataattacttggattgttagtctttagtattatctgatttagttctctaaaactaggattcatagggagtggattctgataaaacattgtagtcaacgttattgaatactcaacttcttcatctatcaagttgttgtatgatcaaaccaggattgattatacaaattgatagcaaagatactctgtgataagattttagcatatggtttaaataactcaagaaagaaccagagtcttgttggcattgagcattgatgtgctctgtatactatttcacagaacggttctctctgatagttgcataatttcaatcaccattgagatatatctaactagtttgtttgatgttgcagtaccaaatctgtctgattcagaatggcaaacaaaggttctggaatcagatgtcccagttctggtcgagttctgggcaccatggtgtggaccttgccgtatgattcaccccatagttgaccagctagccaaagatttcgcagggaagttcaaattctacaaaatcaacactgacgagagcccaaatacagcaaaccgttacgggatacgaagcgttccaacagtaatcatcttcaaaggcggtgagaagaaagatagcatcattggagctgtgcctagagagacgttggagaaaactatagaaagattcttggtcgagtaacaaaatttgactcttttgtcactctgaaccattttaccttatcttctctcttgtaatctctgtaaagtcttttaagtttttgactattatgttatcgtgggtcctctttgtcttcttcaataaaaa

SEQ ID NO: 149126 - DNA, 369 bp, Arabidopsis thaliana landsberg
taactatctctcctctcttttcttaagataacttctctcttcattctttggtataaaaaaagaagactaggaaaatagccgagtgtcttccggtggtggtcgcgaccccgttgtttgtggtgctgagcccgggattgttgtttcaggttccgggaaacaacaactttgtagacttcgggaagatggaaacgagcggatactcaatccttctccacgccttcctttactttggccttgtcactgtcttcaccgtcgtcatccactttccgggcacttaattctatgtaatctttacttacaaaaactttttcttcctatctatgcttttaccttttctatattatcagttataccatgtttcccgtgttc

SEQ ID NO: 149127 - DNA, 648 bp, Arabidopsis thaliana landsberg
tcgttcgtccatcttgttttcaggatggcacattctttgagtttcatctccaccaacttgaacagtttcgtccatcttaatcatcatcagtgccagagtttccgaacatttgtggtatcgtcaccgtctaaacgaaagaggagattttcaagaagcattagagctttactagatactgaaggtccaacgccaagaagattgatagacattataagatcagttcctgaaatctctaggaattacttcaagaagccttcaagaagaacgctttttggaggaatctcgttgttaggtgggttctatgtagcgcagactatctctctgtcgtttggagctttgggagtgaacgatgttatcgctgcggttttatgcgttcttttgacagagtatgtgacaagattctattatagccgcaccacagtcacatttcctattgctctgctcaataatttcaagatgggtttcacttatggtctcttcattgacgccttcaagctgggctagctaactgtttgcaaaactgagtcaccagagatcccaagctcgtgtatttacttgttttttctcctcaaatgtaatattttgttgtcataattttgtagtgaagcaaccaaaaactttgaagttaaagagaatctgtagtatgct

SEQ ID NO: 149128 - DNA, 763 bp, Arabidopsis thaliana landsberg
gaggtagatttcttcacggaatatggtgaaggaagcattttctgaatagaggaagtgattggtaaaggaagtgatggagttgtctgttctgcttacgatacacataccggagagaaagttgcgattaagaaaatcaatgatatctttgagcatgttttcggatgcaactcgcattcttcgtgagatcaaacttcttagactcttacgccatcctgacattgttgagatcaaacacatcttgttgccgccttcaagaagagagtttcgagacatttacgtggttttcgagcttatggaatctgatttgcatcaggttattaaggcaaatgatgatttgactcctgagcattatcagtttttcctctatcagcttcttcgtggcctcaagtatatacacacaggttaagctagcgagcaataaaatttcattgattagtataagtttatgattatctttctgaaaatactttttttttctcttcctttcagctaatgtctttcatcgggatcttaaacccaaaaacatattggcaaatgctgattgcaaactcaagatctgtgattttggacttgcaagagtcgcattcaatgatacaccgactgcgatattctggactgtgagtagtagtaatttaaatgcttactctttacaagtttactctttttggtatgaaaccaattttttattcctactgctttctgatcgcaggattatgtagctactcgatggtacagggctccagaactatgtggatcttttttc

SEQ ID NO: 149129 - DNA, 2870 bp, Arabidopsis thaliana landsberg
  unsure (1)..(2870): unsure at all n locations
ggtttgtagctcagtcaaatgnacttgtcatgttaggtgataagaaaggcataaatgtccatcgaaaatctcatcttgatgatgtttacgtcgaagatgatcagcatgattcggtcaggtcaattggtgtgggtattaatagtgatgcagctgattttggcagtgaagtacgtgacagtttggctggaggtagcagtgagggagattttgagtactcgcgtgatcatgatcctgtagcatccaggtttaaacagctttactccgagtcagataagaaacatattgatggccaaaataagaataaacagaaagcaagtaaaaatgattcaggcggaagttttcatgtgaagattcaaactgatggtgatttttcgtttggctcgtcacaaaaagatgggcagttaatgcatgcagaatctagtaaatcattatggtccggcaatcgtgaaacggtaactagagatagaaatactgaacttttaagtgcttcaacagctacagatgatatggttgcaacttggagacaaaaaagtagtgattcatcaagttctcgaagttctgtgaaagaaaataatgcaacgtccataaaatctgtaaactcatctccctcttctctgtcaaattatgctcgcggagaaagaaagcatgctgagaaagaaaatgatagcagtgaaagagaggatggccatgcgacagcacttgatgatgaacaggccgtggctgtacaagagcaagttagacaaattaaggcccaagaggaggagtttgaaacctttgacctcaaaattgtgcatcgaaaaaacaggtaagatttctccctaattttttgttttaaattacatcagtaatcgctttatttcctgtttagagagccacacatgatgttttctttttgtctctgattgttgcgtttcaacccagaaacatcatgttaagtaaaattgtgaatagcatatgaattgaactaactacattccttcagttttgtattgatccggtccaattttgagaaattattttacgttgatatgtttcgctgtaaatatcttggataagtatattcttttgaaaagttagaccaagattgaactaaaaaaatttcatcatcgtcttaattttttacttttatttatagctgagagtgctgctctcttattacttgtttggcatttatcaggactggtttcgaagaggaaaagaactttaacgtggttttaaattcggtcattgctgggcggtaccatgtcactgagtaccttggatcagcagccttcagtaaagccatacaagcgcatgacttacagacaggaatggatgtctgtataaagattataaagaacaacaaagacttctttgaccagagtcttgacgagataaaacttttgaagtatgtcaacaagcatgatcctgctgacaaataccatcttctacggttgtatgattacttttactaccgggtaagtgattacatcccttttgcaaaatttggttttgctactgtatatcaaaagtgaccaattgtgtctttctcttcaacaattttagcacaagtgtgaaccatatgccttttatttaatacctttgcaatatttctctttgtggattgtttggtgtaacggattccctgaatgttctttgcaggagcacttgctaattgtatgtgaacttcttaaggccaatctatacgagttccacaaatttaacagagaatcaggtggtgaagtttatttcacgatgccaaggttgcaggtttgtccactttatcattaccatacatcatagatatgtatatgtatccgattcctgatctctttgggaccgttctgtacagtcaatcactatccagtgtctcgaatcacttcagtttctacatggccttggacttatacactgtgatttgaagcctgagaatatattggtgaaaagctatagcagatgtgaaataaaagtcattgaccttggaagtagctgtttcgagacagaccacctatgctcctatgtccagtcaaggtcatatcgagcaccagaagtcattttgggacttccttatgataaaaagatagatgtgtggtctcttgggtgcattttagctgaactatgtacaggcaacgtaagtcctgcatttccattgacttggtgcatttctgatttttgcttcatcatgtattattttttctcatgcaaaatacgtttcgaagagatagaaaatttccatatccgcataaatttgttttcttacatgggaacttgattctcgggctattaagtaaacagaaatttaccagaaacttgtgtcatttatactaacacttgatggagttaaaggtaactgcatcattgatgttctggagtgtcagctggttattcatattgtctgggttggttgttgatttttgaggacaagaaggtgaatccgtgtttaaatatcgagttacttttgcaggttctcttccagaatgattcgccggccagtttgctagcaagggttatgggaatcgtaggatctttcgataatgaaatgcttaccaagggacgtgattcccacaaatacttcacaaaaaaccgaatgctctatgagcggaaccaggttagtgtttccagagaccttaaaggaacattccctgaactccaaaaactctgcaactcttaagttgaatggaagaaacatatgctaataaagaacattctctctggaaaaattgtttgttcaggaaagcaacagattggagtacctgataccaaaaagaacatcgttgagacatcggctgccaatgggagaccaagaattcacagactttgtggctcatcttcttgagatgaacacaaagtagtgtccttatgcagcagaggctctgaagcagccttggctt

SEQ ID NO: 149130 - DNA, 1113 bp, Arabidopsis thaliana landsberg
aattcctcaatcccgtcttcaagtatcgccgacgccgcagcacaaaggaggagaagaaggatcaaaggcgcgacaacaatggcgacaggtaaaacagtgaaggatgtctctccacacgagttcgtcaaggcttacgctgcccatctcaagcgttccggcaaggtaacgaatcgtgattcttagcttttggtccgcatcgtttgtccctaatctagtattttgattgatgtttgggattacgattacctcatgaaactgcaatgatcactgcttgattgaaacttgaatttggccttactctagagcattttgaatcgtaactacaaatctcaataaagtctaaacagtgatttgctagtgtcatttcagtgaagataggtttctgcttttgattccaatgttgttccttccatgtagattgagctgcctctgtggacagacatcgtcaagactggtaaacttaaggagcttgctccatatgaccctgactggtactacatcagagctggtatgtatatataacatctggtcaaatcttctacatattggatttagcattgtctttatctgttctatttagcttccatggctaggaaggtttacctgaggggtggtcttggagttggtgccttccgtaggatctatggaggaagcaagaggaacggaagccgtcctcctcatttctgcaagagcagtggtggtgttgctcgtcacattcttcagcaactccagaccatgaacattgttgaccttgacaccaaggggtaagtatattgtctctagtttagatttctcattggcctaaattaagttaatacactggtacaaagaaattgtaggaaaataaaaattgtataacacaagttagacacttggattcgattttcgcttaagaaatctgctgaaactgtaattgtgacctattaaaactcactagatgaagtgtgtataaatggttttagaatgtactactgcgtcatttactaatatacctatggaagcaattgttcatcttcgctagctaatgattacatgttctgatgtaaccagtggaaggaagatcacatcaagtggtcagagagatctcgaccaagtcgctgaaggatcgcaact

SEQ ID NO: 149131 - DNA, 1493 bp, Arabidopsis thaliana landsberg
tttgtttatggtgccagtttaggcaactgaatcggtaagtctcttctttatcttcaggagtttatgaatctgttcttataatttcaataataatctggttgtgtttttatagatcatttcattgtccaattcgaaattctcgctgccttgtgacattttgagaaactgctatgaagcttttgctttgtattcgtttggaagctacttggtggcatgtctaggtgagctatgtgtgccctctctctctctttcttctggttagtaattgttatgcatcagctttaagccaagattccaaatgaatggtcaggtggtgaaagaagagttgttgaataccttgaaaatgaatcaaagaaaccattgttagaagaaggagcaaatgagagcaaaaagaagaagaagaattcattttggaaattcatgtgtgatccatatgtcttgggaacgagagctctcctgtgatagaaaagtttggtctcgtacaaatatgtaagtcaagtgattgggctcttctgcaccctaattattgcatgtttttgagtttttgtgataattgtttcagatgatccctcaaaaccttttgtgccttcttgacatttttgttggagcttcttggtgtctatggtgatggtgaattcaaatggtattacgggtatgtgaattaactattatatcatagtatttgttatttcatcagatggaaagacaggtgatgagtctttgattctgtagatatccatacatagtggtggtgctaaacttcagccaaatgtgggctctgttttgcttggttcagttctataatgtcactcatgaacggcttaaagaaataaaaccgttggctaagttcattagctttaaggctatcgtgtttgcgacttggtggcaaggcttcggtatcgcgttgctttgttattacggtatacttccaaaagaaggtcgattccaaaacgggctgcaagatttcctcatttgcattgaggtaacttaaaagctctttcccaagtgccactcgaactagcgatctctattctatatgagctctttccaaacataattatgtttctaaggattctactacttcttggggtgtacactggcagatggcgattgcagcggtggctcatctctttgtttttccagctgaaccttaccactacattccggtatcagagtgcggtaaaatcacagccgaaacgagcaagacggaagtgaaactagaagaaggtggtcttgttgagacctcggagactcaggttgaagcatctggcacaagcattaaggagagtgtacaggacatagtgattgacggtggccaacatgtcgtgaaagatgtggttcttacaataaaccaagcaataggaccggtagagaagggtgtaacgaagatccaggatacgattcatcaaaaacttttggattcggacggtaaagaagaaacagaagtgaccgaagaagtgaccgttgagacttcggtgcccccaaaagagtga

SEQ ID NO: 149132 - DNA, 1860 bp, Arabidopsis thaliana landsberg
ttatatgaatcgctaaaactaaaccaacccttattatgaaatgaatcaggaagtgcagaaaactctttggcaatccaaagtttgaaaaaattccgatagaagtccggttacggcagctgattacggtttgtacctcgtcgtttgcatacccacgaattcaacttcaagtttctgtttttgctaagttcttgttttctctataaaatcaatcaagaaaatgtcttttaccactcccattaacggatggtttcttcaggctcacaagctgtggttagtcttgtattggagagggagctccaacctgataaactgtcattagtagctgaagaggtgaaataacacttgaaaacctatattaatcagaggttttatagcgtaaatgttactcgggttttataacggggaaatcttacaggaaactggagatctgcggaagaatggaagtgaggcgtttctagaagatattgcaaagcttgtgaaagatactctagcctctgaggaatcgtacaccagctctcctctatccacagatgatgtgttaaatgctatagactgcggtaaatcagaaggcggttgcaaaggttcccactgggttcttgatcctatagatggaaccagagggtgacaatctctctaatctctatgctttctctatacttaatcttttcagccacttaaaaacatggttgctaaacttctctgcttgtttagatttgtaagaggagagcaatacgcggtggggttagccttgcttgtggaaggcaaagtggtgcttggtgtcatggcttgcccaaatcttctcttggcttctgcggtttgcgcgactgatcattcttcccaggaagatgttggctgtcttttctttgctacaacgggttcagggacttacgtgcaatcgctcaaaggcaattctctgccacaaaaggtatcattcacctgtccaaagctaaaccatgtgataaatctgcaattgtttgaaagtgttaaagagatgttgtgctgacacaggtgcaagtgagtagcaatgagaatcttgatgaagcgaagttcttagaatcataccacaaaccaattcccatccatggtaccattgccaaggtaacaacttgttttttttctttctattacaatgtgctcgtaagtaggccataaccaagtgggattctttccactaaaacaatctgtttacggttagagtagaaactcgggattaaagcattacctgtaaggatcgatagccaagctaagtatgcggctttgtcgcgaggagacgcagagatatacttgcgtttcactctcaatggataccgtgagtgtatttgggaccatgcacctggttcaataatcactacaggtacagtacatacaacctttttaaacgctgagatctgttggctctacttcactttataacttaacatgttactggctagttatcaaacacataagggatctagatttaatacccacatgtcatttttttttaatgtataacgaaaatacaagaggactatacatataaagaagagaacaaaataaccttgtgcagaagctggaggcgtagtgtgtgatgctacagggaaatctctggacttctcgaaaggaaagtatcttgctcacaaaacggggatcatagttaccaccaagaaactcaagccatggatattgaaggcagtcagagaatccatagaagaagagaatctttatttctgaggcacaacagaaactgtacaatacagtatttgtatttgtctgaactagtaattggtgtatattcttagttcatatatcgtatacatcagatatgaaagatatttctgcttagataatgaataatgatactaaggaagattcgatttt

SEQ ID NO: 149133 - DNA, 1482 bp, Arabidopsis thaliana landsberg
aattcctctgggacagtggctaccgaaggtagctgtagatgcttacgtggcacctaacgttgtgttggctggtcaggtcaccgtctgggacggctcgtctgtatggaacggtgccgttttgagaggagatcttaataagatcaccgttggattctgctcaaatgtccaggaacggtgtgttgttcatgctgcgtggtcgtcgcctacaggttcttgttctttgtcattttttcggaatttgagtctctgtatggttccattgtagcttctagtttgagttctggatatccaattgctgtagttactgcttgctagctaatggaatcattgatattggaatttagggttttcattttcatcttccattttgattatggaaaatgtagagtctcacctttaaggagattttacacttttatctgaagtagtgaagtgtaagtaagcatatttgtttggagtgaagatgtccccagatcaagaatcatgaatgatatttgttcagtaaagttaatcttcagagcattttgcgtttagctagacaaggatgcatagaattgcgtagttctttaggtgattagtgatattggaagcaagaaacccattgatgatatgtgcttgattttaaaatttaggttattcaggggttgaatagattagcatggtggagaccatcttgtttagttgtagaaagttgcctagcagctctggagaagtttcaggaactatgtcatagtaaagatttttagttatgcggagagaattttgcagaaagttgatattatattcagtggttggaaccgagattctgaagctgcgtcaagctgaatgatcataagcgtcttttagtcttaccaaggtggattccgtgtcaaagtctttagttcaacagcctcctggtttgattaagctgtagtttacaactagtacttaattacttgattcaccattttttcgggttaatagctctgtattatcaaccagtcttcatgctttttctatactaacatcttgaaggatagagcatactgtggtgctgcttttgaattttgatatgatagataaaaatctgatcttagaagatactttctactttgatttttttcaggattaccagcacaaacattgatcgataggtacgtgacagttggtgcatacagtcttttaagatcatgcactatcgaaccagaatgcatcatcgggcaacactcaatcctaatggaaggttcactggtcgaaacccgctcaatcctagaagctggttctgttttaccacctggcagaagaatcccatctggtgaactatggggaggcaatccagcaaggtttattcgaacactcaccaatgaagaaaccttagagatcccgaaacttgctgttgccattaaccacctaagtggagattacttctcagagttcttaccttactcaactatctatctagaggttgagaagttcaagaaatcccttggaatctccgtctag

SEQ ID NO: 149134 - DNA, 529 bp, Arabidopsis thaliana landsberg
aaccacagccgtggtgacgtcactcggggtttcgacacgtgctactcagggcaagtcaaggtgccgacgataacattcatgttcaagggagtgaacatgacgatgccggctgataacctgatgttacacagtaccgccggaagcacgtcgtgcctcgccatggctgcagcgccggaaaacgtaaactctgtcgtcaatgtgatcgcaagcatgcagcagcagaaccaccgtgtcctcatcgacgtccccaatggacgactcggtttggcacgtgaacgatgctcttagaaagatgaatgagacaataagagcctactcatatttatgcagagacttgtttgtttgtgttatttgtgtgtttcatttttgtcttgtcttgtgtcgtttgcttcaccagtcttagagggcggaggtgtgtagcatttgtgctatctagtaatttatgtttttaattgttcttcaattatctagagatttggatctaagctaatcaaataatgaaactatattatatttccttacggtatag

SEQ ID NO: 149135 - DNA, 1196 bp, Arabidopsis thaliana landsberg
aaggcggtggtaagtactggtgagagtgtgagtgaaaaaacaaaaaaaacaattcaactgcaaaaatgagttccggaatcggaagtttagtgaaggtcatctttaagaacttcgatgtcatcgctgggtaatttaattagtattatttagcctgattatgattttttttctcgttttattttctccattaatttgatccttcttggtgtgcagacctgtgattagcttggtttatcctctgtaagtttcatacaagtatctctttattttcctgagaatatattatatatgtcaaatcttgagttctttttaatttggattttggtttacacagatatgcatcagtgagggcaatagagtcgaggagtcatggagacgacaagcaatggttgacgtattgggctctctattcacttatcaaactctttgagctcacttttttcagactcctcgaatggtaactttcacacaaaatctctaaacctttcttgattacgcaagctactacttatgaaaagagagtaaggtcacagtcacacacaatatgtttgtttctagggctcttaaaatttgtgatataatcgatgacttggattttacttaccgaccttactatatgaaatttattaagaagttggtttggggggtagatagattcacctttcttgtagtccaagtaaggtacttcaggtaacggatgagcttatgtttaacattcctagactgacttcaggagataaactgagctgtatgtaacggtggttcattgattcaattatatagactgaagtttcgagatttatggtatgatcaggatcccattatatccatccgcaaagctagccctaactagttggttggtcttaccgggcatgaacggtgctgcttatctctacgagcactatgtgcgttcattccttttaagcccacatactgttaacgtatggtacgagtcagccaagaaggatatcgacttgggagcaaccgctggcaaatttactccagtaaatgattccggtgcgcctcaggaaaagattgtgagctcggtatgacctcttaactctctattactctataagaccctatttgtgacctaatgttcgatctataaggcacatcaatctcttaaacgtttatattttcaggtggatacatcagcaaaatatgttggtcattcggctttagaaacgcgctat

SEQ ID NO: 149136 - DNA, 1971 bp, Arabidopsis thaliana landsberg
tattcttgctaggttcttctttacctttctcattttttatccattttttcagctacaaagtggagagaaggtggtagcggacaacatgttgaatatgatcaacgttctgatatgtttaggtaatatattttctactgttacctaatataatttgttttatactcgctcttaccttttgttgaatctctctcttcttaatttttatagagggacagttagatacgcaagtgcacatgctcatttagggagaactgctagcagaagggatgatctggaatcattagcatatacactgatctttcttcaccgaggtagattgccatggcaaggatatcaggtactgcagacctatcattttgttttgtagaatcatgttgttgcatgattctttctctgctaatcctgtctcttactcaattttcagggagataacaagtcattccttggttgcaaaaagaaagatggcacatcgccggatatgctttgttgtttttgtccccctcctttcaaacaatttcttgagatcgtggtaaatatgaaatttgatgaagaacccaactatggaaagttagtatctctgtttcaagacctcttgggcgaaaatccggcaattaggcctataaacacagagggtgctcaaaaggtgacattttcatgctgtatatctttccctttcgttcctatttggatatctaggagttgttgtttaacatcttgtatttgttttcttttgtgctagatcatattccaagttggccagaagcgaggtaggttgagcattggggaggaagaagaagatgcccctaggaaaaaggtccgtctaggagtccctgcaacgcaatggatatcgatttacaatgccaggcaaccaatgaagcagaggtaaaaaaattcatggttaattatttatacagtcagttaactgctgggactgcgtttgtgtctcattttttctcttggttatattataatcttggatttttggccttaatgtgtctaaaactatttttggactcacaatttatgtgtttaaccaggtatcattataatgtggctgatataagactggcacagcatattgagagaggtattgcagatggtttgttgataagctgtgtatcatcatgttcgaatctctgggcattgataatggatgctggaactggcttcacgcaccaagtctatgaactctctcctgtattcttgcacaaggttgtctgatgtttctctgttagttatttttatatctgtgttctgtcaagatgatcttacctgagagtgaattctgtttcgaatcaggaatggattatggagcagtgggagaagaactactacattagttctattgctggtgcaagcaatggaagctccttagttgtcatgtcaaaaggtatctacacttttcatgaatacttttgaacactttcgtcattatggtattttactagtctctgaatttgtggcttatcctatgtttggttttcaaatgaattatgaaggtacgcagtatacacagcagtcttacaaagtaagcgattcattcccgttcaagtggataaacaagaaatggagagaaggcttccatgtaacctcaatggcaacagctggaaatcgatggggtgttgttatgtcccgcaattctggctacagtgaacaggttagacttcaccgatatagatgaatttcttccgtttccttcagttttggatctgtcgcgttgatttctaattctcctgttttcgcttatatctcctctacaggttgtggaacttgattttctgtatccaagtgaaggcatccacaggcgttgggatggtggattcagaatcacatcaacagcagccacaaccgatcaagctgctctcatcctaagcatcccacgtcgtagacttgttgatgagccaccagagacgttacgtacctctcaattcaaaagaaacacacgtcaaggtgagtagagcagcaataaaa

SEQ ID NO: 149137 - DNA, 2601 bp, Arabidopsis thaliana landsberg
gccttcgtagcacttggcttatggcacttattcaacaacataaaactcttttgtctccatccaaacacattcagttcatcaacatggttcccaatttcaaagctcagacacttagagctctacttaatcatgctatcttcaacagcctccatatccatggagctcttcattggacctagaagacaccatccctttgacgtcgatggtaccatcccatcgaaccacctccacaacttcgaacattcttccatctccatgtccttcttagtctatgccgttttggcattagtcctggatcgagcacggcctagagccgccgcttctgaggggctaaccatgctagctgcagccgctgccttcagtcaacagctacttctctttcattttcactctaccgaccacatgggcgttgagggacaatatcatgtgattctacaagtcgttatcttcgtctctctccttaccacaatcatgggtattgttctaagactctaataaatctagtatcttaaatttacttatatttgtgtatatatatatatatcataatatatataaagggatatatatgttgttgcttgttggttttgccaattctataaacggtccaaaaaaatcctgaattttgaatttatgtgttctaaattttgtgttgttttcctttctttctcaaatcaactaataactactttaattcttaacatcaaaaggtattttcttgcccaagagttttctggtgagccttgtgagatcttcaagcatagcctttcaaggcgtgtggctcattgtgattggttgcatgctttacagaccgagtttgatccccaagggatgttatattcacgatgaaggaagacacataatagttaagtgttccaccgaagaagctcttcacagagctaagtcgttggtcaacctcgaattcagttggctatttgttacaaacacactatttgttgtcacactatatttgattctcgatcgtgtttacggtgaaaacgtagagtactctagtctaaccaccaataatcaaacataccaagatgatgaagaacaacacttcgaatcgaagtcgactcagaaaacaagttttgtccaaatgggtaaactcgttggacatgggcagaaaatgtgagaaaagtggtgatggttaatgttatttgttatgtgtgtcagtgtgtgataaacaaaatatgggttgattctactaaagccatggaccttcgtaattactgtgtaatcttaccaactcaacttggttattactggttcatataattgcttaattttaatttttttgtaattgttgccttgttggatgtaaaatagtttcgggttccaattttaacatagaagtaaactaccactacgattaccaaataattaacatatatatatatatatatatatatatatgttcataagaaaaccatgtgtacattgctcattgggaactgaacgtttaagttatgatagtatatagtaagcaataaatattcaacagctgtactataattaactaattaaccttttgcatgaaacatgttggttttttagtcgaagacgttatgtaaatccacacttgagaaaaatgttctcctaatgattctgctatttcagcatatcttatgcgtgacgtgtactttgtttctaatccaaaaggtacgctagtcattacaacaatacaacttcttaaacatgataagatttaataagattttcttttcattacgtcgagattgaaccaaaaacaaacaaagagaattgcacttgcgtctcaatttgtcgataatttcctacgatataaaatacttaattcgttattgggctttttaactctatttatatttatgtagattaggcccaatacgccttataacatattaacgatgtcgtttaagggttttctatctgttacataaaaataaaaatcagtcgtctagagaaatctcggaagattctccggcgatacctcctccgcctctggactcccgtaaaactcaaattagcgattctctgtcgacgagacaaatattgtgttcacaagttttcgactttagagttcctgcctgaaccaacgatcatcttgatttagggttttctgtttctcttcgagtattaatggagaatcaggaatcggacgagccgatgcagaagaagcctcatcttttagactccgtttctccgaattccatggctcgtaactcttcaccttctcaccctatagctaaaagtgtaagctttttcgactgtgacttctcgcttctctgtttaaggctcgttgattatgaaattgatgtttttggaatctgtgaatgagttgtctctgtctggcgtttgtaatatagtgtgcaatgtctcagaatgatacaaataaggaactatgcaagagtgagtttttttggtacatgtggtttactttggagttccttttttcaggttgatgccactgttctacagttacagaatcagaaactggttcagcaattagacctgcagaagaaacagctgtacgatgttgaaagcaagatccaagagttgcagctcaaccaaacgtcttatgatgatgaacttatatcagtgaaccagctttggaatcag

SEQ ID NO: 149138 - DNA, 2252 bp, Arabidopsis thaliana landsberg
  unsure (1)..(2252): unsure at all n locations
ggaatcttaaatcccgccgttgccgtcatcaaccgccgcagcggaggaatctggagagaagttcagcaagtaagcggctaagaaggaagctgccaagctagagaagttaagacgtcgtcaagaacaagaggaagcaacgcgtcgaacagcttcgatctctctggaagagaatgacgagttttccaataactacggcgacgtgactcttaccgagttgcaatcgtcggcggatccgaaagccgggaagtggatagaggctgttgagggaaaggagtggaccgatgtgagcgatttggtggaagagatgttggaatcagaggttctgatcagaggccgagtgcacacgaatcgtccaacgtctaacaaattggggtttgtggtcttgagggagagcggatcaactgttcagtgcgtggttagccaatcagagaagaccaaagtaggtgccaacatggttaaatacctcaagcagctgagtcgcgaatcctttgtcgatgttatcggtgtcgtcactctccccaaggagccgctgacgggaactacgcagcaggtttagtttccttgtcttcttcttctcctccagatttctcgtttgctttaactcatgtttgtgtgtgtatcgataattttaattgtaggttgaaattcaagtgagaaaagtgtactgcatcaacaaatccttggccaaattaccacttagtgtggaggatgctgctcggagtgaagcagatatcgaagcatctcttcaggtatagtttgctgtttcaagatttggagattttgttggacctggtacaattgtgctgtgaattctgataacttgtgttcttctgatactattatggtggtcaatctgttcataggagttgttgttttcatgactgttgcagactccatctccagctgctcgtgtcaatcaggatacacgtttgaataatagggttcttgacatcagaacaccggctaatcaagccatcttccgtattcagtgccaagtccaaattgtaagctctgatttgatatgcaacatggaggattatagctagttagtgtcaactaggatatgatttgtcattatcctaatagttcattgcatgatttaattgtttgtgtaggcgttcagagaattcttactatccaaggggtttcttgaaatccacacaccgaaattgatcgctggcagtagtgaaggaggttctgctgtgtttaggttggactacaaagggcagcctgcttgtctggctcagtctcctcagcttcataagcagatggcgatatgtggtgacatgcgacgcgtctttgaggttggtcctgttttcagagctgaagactccttcactcatagacacctgtgtgaattcgttggtcttgatgtggagatggagattcgaatgcactactctgaggtatgtatgattgtgctactgttaagatattaataatatttcatctcttcactagtgctaataattggtgcagataatggatcttgtgggggagttgtttccgttcatattcacaaaaatagaagaaaggtgcccaaaggaacttgaatctgtcagaaagcaatacccttttcaatctttgaaggtaatctatcttttggatttttaggaaaggaaaaaactgagtttcttttgtgttggatactgatgattggcactaaacttgtagtttcttccgcaaacattgaggctaacctttgcagaagggattcaaatgcttaaggtatgacaggattttttttgcatccaacttgatgagttaagactatgaataaataatagttgggtcatcttgacaggaagctggcgaggaggttgaccctctcggtgatctaaatacagaatctgagaggaaacttggccnnnnnnnnnnnnnnnnnnnnnnnnnnnnnnnnnnnntgctgcatcgctatccatcggctgtcagaccgttctacactatgccctatgaaaatgattctaactacagcaactcgttcgatgtcttcatcagaggtgcgtgcatctatgagtttgtcacccaattatgttacttctacacttgatttaataatactaaatttgagctttctgtcttataggagaggagatcatgtcaagagctcaacgtatccatgacccagaactcttggagaagcgcgcaagagaatgcggcattgatgtcaagacaatatccacgtacattgatgcattcaggtaaccacaaactgatcgatccagttgggttcctactatgagttgagttga

SEQ ID NO: 149139 - DNA, 2005 bp, Arabidopsis thaliana landsberg
agttagtcctattcaaatcaaatccgtttctttcccggagtgcgggtcagagttccaagattacaccccgtgcaccgatccaaaggtaagatagttccactctcactttgtatagtcacttctagctgcatattattgaactattgttgtgtttcttgttctcagaggtggaagaagtatggtgtccatcgtctaagtttcttggagcgtcattgtcctccggtttatgaaaagaatgaatgtttgattccaccgccagacgggtataaaccgcctataagatggcctaagagccgagaacagtgttggtacaggaacgtgccttatgattggatcaataagcaaaagtctaaccagcattggcttaagaaagaaggagataagttccatttccctggtggtggaaccatgtttcctcgtggagttagtcactatgttgatttgatgcaagatctgattcctgaaatgaaagacggaacagtcaggaccgccattgatactggctgtggggttagtctctcttcaactactcaagttctctaatcagttctgcttataatgtactctctaactggtatcggctatgtaggttgcgagctggggaggcgatcttttggaccgagggatactatcactctctcttgcaccaagagataaccatgaagctcaggttcagtttgctctagaacgtggaattcctgcgattctcgggattatctctacgcaacgtctcccttttccttcaaatgcatttgatatggctcattgctcaagatgtcttattccctggacagaatttggtaagcactaatatctctacctaccattgcatttgagttcttgtgatttgcactaagaagaatcatgaaaatgtgttctctgatcttgtaggtggaatctatttacttgagattcaccgtatagttcgacctggaggtttttgggttctttctggtccacctgtgaactataatagacgatggcgtggatggaacacaaccatggaagatcagaaatcagactacaacaagcttcagtcacttctaacctccatgtgtttcaaaaagtacgctcaaaaagacgacatagccgtgtggcagaaactctcagacaaatcttgctacgacaaaatcgctaagaacatggaagcttacccgcccaaatgtgacgacagtatagaacctgactccgcttggtatactccactccgtccttgcgtggttgccccgacccctaaagtcaagaagtccggtctccgatcaatcccaaaatggccagagaggttacatgtcgcacccgagagaatcggtgatgttcacggagggagcgcaaacggtttgaaacacgatgacgggaagtggaagaacagagttaagcattacaagaaagttttaccagctcttgggacagacaagataagaaatgttatggatatgaacactgtttatggaggtttcgctgcggctctcattgacgatcccatttgggtcatgaacgttgtatcatcgtacagcgcaaattcgcttcctgttgtctttgatcgcggtctcatcgggacttaccacgactggtaacatttattttttttgtcaaatacactctgtttccattatttgatctttgtgatattaacctgaaaccggaattgtaggtgcgaagctttctcgacgtatccaagaacatatgatcttcttcacctcgacagtctttttaccttggagagtcacaggtacgttatgaatgatgagatacattggtcaataggaagaaaatgtaaactgtttttaaagaatgccttagaaagtgtttggttttggtgttaatgtgtttgttgaaccatatggtaatgtgaataggtgtgagatgaagtacgttttgctagagatggaccggatcttgcgaccgagtggatatgttataaccgagaatcgagttatttcatggacgcaatcacaacgttagcgaaagggataaggtggagttccggagagaggagactgagtat

SEQ ID NO: 149140 - DNA, 1700 bp, Arabidopsis thaliana landsberg
  unsure (1)..(1700): unsure at all n locations
atggaagagtggagcgcgatcctttggggaatcgggacggaccgtgattggtcggtctctctcgttacggtgaggctgaggctgaggcggagattgagagagaccaaccatgatacgacgaatcaccgagagagcttctggtttcgctaagaatattnnnnnnnnnnnnnnnnnnnnnnnnnnnnnnnnntccctcgattcctccgtctcccctgttctcattcccggcgtccatgtcttccattgtcaggatgctgttgggattgtagctaaactatcagattgcatagcagcaaaaggtggcaacattcttggctacgatgtttttgttcctgaaaacaacaacgtcttctactctcgcaggtctccatttttactccaaaatcttcccttttttagtaactttctcgttcaatagactttaagaagtgtacgaagctttgataatgaatcgagtgaaatattatgtattggttttatttctgatgtttccttttgacagcgagtttatctttgatccggttaaatggccgagaagccaagtggatgaagattttcaaactattgcacaaagatacggtgccttgaattcagttgtgcgtgtgccttctattgatcctaagtataagatagctcttcttctttcaaaacaggtattcacaatacctttttggattttcgatactctttgtatttcctgctcaaaagtatgtgcttctattatatacaggatcattgtcttgtcgaaatgttgcataaatggcaggacgggaaactccctgtggatattacctgtgtgataaggtgagctaatagttctttggatctgtatattatgtaagcatttatatgtctagtgactcggatgctgaaatgtttttttttggttaatagcaatcatgaaagagcttcaaacactcacgttatgcggtttcttgagaggcatggcatcccttatcattatgtatctacaactaaagagaataaaagagaagatgatattttggaattggttaaggacactgatttcctagttcttgctagatatatgcaggtagatgaaatcacatttttagtctttgcatgagctcttttttctttctttggtcaaattctgacttacatgttcagatgaatattattgcgtactatttaagcttcttcttctatttccaactaagaatagcaaaatttaattcatagcattttccctttggcagattttatcgggtaactttttgaaaggttatggaaaggatgtaatcaacatccaccatggtctcttaccatcatttaagggtggatatcccgcaaaacaggtcactgagttttgtcatggctctaccttctcttagttggttatattgttgtctgtttttttcttgcctcttaatgttctagattctgtttacaggcattcgacgctggtgtgaaactaattggagccactagtcactttgttaccgaggaacttgattcagggccaattattgaacaaatggtgattcatcttccaagtagttgatatgtaatgtagtaccttctggggattgtcaattttcttctgcagctttctcaatttatctgtttgaatggaacttttcacaggttgagagtgtttcccaccgagacaacttaaggagctttgtccagaaatccgagaacctagagaaaaaatgcctcacgagagctataaaatc

SEQ ID NO: 149141 - DNA, 2087 bp, Arabidopsis thaliana landsberg; identical to SEQ ID NO: 29739

SEQ ID NO: 149142 - DNA, 3610 bp, Arabidopsis thaliana landsberg
  unsure (1)..(3610): unsure at all n locations
gatagtaatatatttttgcatacgggttgaatttagtttcgccgaatattcataacacgttaattagtccattacgtatcaatatatttgactaaaaaagttcaatgattattaattattaatattaatatactagattttaatcttagaactatacaggaaaattatattccctttgaaaatattagtacaaattgttgacaaacaaatagtacaaattccagtattgataaaaaatttaaagtcagtaaacataaagtgtattaaatgacacaaaaaaaagtaatttttttgttaaaactaacaaatttaatttcctcaagcttaacaattttaaaaattctacacgaaatcatgcatatagaaactcgaaaatgtagtatacgtactacacttatatatcttatagctgatcaaatattttgttttctcggcagatttctgatatattatatactcatgatcagtatcaaaataaagctcaattcttagagtcaaaggcgattagaaaagaaataaagtttaattatttggtttatgtttaattaatgcaattatattgtgtctttcgaatgtggaaacatccaaccaaaacaggacacgaagctaccgcagtgtgttaacaccacatgccttcctcgaccaccgaaggtcaccatcgttaaacgtggtatgagtgcaagtgttttcatcgacaacgcagcttaccggactttcctcaactccaagtttaacgccaccgccgttgaaatggagagcgccgccgtggctctcatttcccaccagcaaaacctccctttcatcgtcatccgtgccctctccgatctcgctggcggcggctccgacgtctccaacgaggccagcatattcagcagcctcgccgcagaaaactccgtcgatattctcgttaagttcgttgctttgttgcctccacacgaaagcaagattcaatcagaatgataaatgtggattaagactaaagagtgtggattaagagcatgtaacgggaaaagtaagatgtattatgtgtgtgacacgattagatatgtgtctaaaccaaataatgacgtacgtacttcaatgttaaacatatacatcagttttatgatgtggtaaggagtattcaataatatatcagtagtactcctctcgaattttagaaagtcgttganagagtctctgacgaaaattagaaagcggttgcaagaagacttttaaaacgttacatgagcacaattctaagaaactggttatgattttctaggaaaccaaaacactttttgtgtaggttcgagtactttattcttctaattgttttcgtaaaaagaatactcgagtttaaaaccgatacaaatgttacactacgagacttaaaatagtaaaatacaactagttttgttttctgaaataccacacttaagaagacttcttgaaggcaatcaccttctcaaaatttcataatagcttacaaaatcaagtgtacgagggtttatggatactttatatgactttctgaaccttcgaaagcttttgttgaaccaataatgggcctgttttttgatactgtatgaaacaagaatgggcctgttgtttgatatggaccctagtcatagcctacgtataatccaaatgtatacactatgaataactttcatgtatataacccaaaatgtcatttaaaattggcccacaataatatattgactcttcattgtcaacacattcaaatttgaatgaaatttgcgtatgatatgtatttagttgtcttttttaaaataacaatggctcaaatataaattttcttgaagggctcaagatatacatccaaaggaaaggagaagaaacatgagactcccaagacaaaacaccaaaaacacatagctggacatcagaaaagatgacaaaagtcgaaacggtgtcgtctctgacaacggtcgatacgtgtttcaacttaaccgttgataaatccaacttttagatagaagagtgggtttttgtaatttcattttgctaataagttttttgaaatttattgagagggacaataaagttaccctttttaagactttgacttgaacgaacctgaaaatccgacacatttaactctttctctgtctcgactctctagaaaacacacatgccaattggcttctctttggtttttgagaaaatattttgagatttacacttctttatgttgtctccgcagttgatactcgctgcaagcgtctctggtaagctcatttagagtcttcttcaccactcttcttcttcttcttctttagttccttaaactttctgggttttgagttttgttcttggactaagagaatgagtgcttcggagttcataaaatgtgtaactgttggagatggggctgttgggaagacatgtatgcttatctgttacactagcaacaagtttcctactgtgagttttctttaaaaatcgttcctttatgactctaaagctttcatttttcattgtaaagctttgattttgcttactgggtttaccttaaaagatacatctgtgttcttggagttcacaaatgggtttagcttaaagttgatttcgagtatctagggtttactctgatgtatgattcatgattcttgctggttttttcatgtctggcaggattatataccgactgtgttcgacaatttcagtgccaatgtagctgtggatgaacaaatcgttaatttagggctatgggacactgcaggtaaattcaaaatgtctaattttgaaaccgataagctaagaactgaaattgatgattcagagttttctagcttttgaagctctcatttcatacatttatttgtgggtttcttgttctgttggtgtctttaggtcaagaagattacagtaggttaagaccattgagttatagaggagctgatatcttcgtcttagccttttcgcttattagcaaggcgagttacgaaaatgtactcaagaaggtaaaaatgttttgaatcttgtactggaacagatttggatagtgaatgtggtggatgttgaaatgtgtatatgagttctgatatgattgttgtttttgacagtggatgcctgaacttcgtcggtttgcgccaaatgttcccatagttcttgttggtacaaagctaggtaagttttgttttgcagattctgttttgaaatttctcttggctaatccattacgtcttggtgttgtttagatctccgggatgacaagggatacctcgcggatcacaccaatgtcattacctctactcaggtatatatgggtaacctcgctatttgttctgttttgaaaatgaatctttaaaacttgaaaacttttctcaatcttatgactttgtgcatacagggagaggaattgaggaagcaaattggtgcaactgcttatattgagggtcgtgccaatactcaacaaaaaagttctctgattcaagaagtaatggtttgaaaaaagctttagaatcttatgaagacttagctttggatagggtgctcaatgtgaaagcagtggttgatacagtgagaaaggtggttctctaaactccaaggaagaaagaggtcccgaggaggacgaataatcatacaatatccggttgttcca

SEQ ID NO: 149143 - DNA, 1190 bp, Arabidopsis thaliana landsberg
attccatcacacatcttaaaaagtaaaaacacattcatctatccaacaaaaaaaaagaaaggagaaatggaaggaatcgatcatagaatggtgagtgtcaatggcataacaatgcacattgccgagaaaggtcccaaagaaggacctgtggtgcttctcctccatggattccctgatctctggtacacgtggcgtcaccagattagtgggttatcatctctaggttaccgcgctgtagctccagacctccgaggctacggagactctgattcgccggagtctttctccgagtacacgtgtcttaacgtcgttggggacctcgtagctcttctggacactgttgctggaaatcaagagaaggtgtttctggtcggtcatgattggggagccattatcggatggtttctctgtttgtttcgacctgaaaagattaacggctttgtgtgtttgagtgtgccgtatagatcaagaaaccctaaagtcaagcccgttcaagggttcaaggctgtatttggagatgattactacatttgtagatttcaggttttgcatcttgatctttctttattaaccgaccgtactaatcaagtaacatcgacgaccaataatctcttaaccaataaaataaaaccattcaattgacattgtttggttatgtccaatataatttcaattttgtttaaacaatgtgaatttgcaggaaccggggaagattgaaggagagattgcaagtgcagatccaagaatatttctgaggaacctcttcacagggaggacactcggtccgccgattttacctaaggataatccctttgggggaaaacctaaccctaatagcgaaaacattgaattgcctgaatggttttctaagaaagatctcgatttctatgtctccaaattcgagaaggcaggattaaccggtggattgaactactacagagccatggatctgtaagttcttagtatatgaatgcgtattttagggtttgggttaatttgttattggttaatatatcaggaattgggagctcactgcaccatggaccggagctaagattcaagttccagtgaagttcatgacaggtgacttcgacatggtttacaccacaccagggatgaaagagtacattcacggtggtgaaaatgcaacaagatgttccaactcttcaagagatagtggtgattgaaga

SEQ ID NO: 149144 - DNA, 1516 bp, Arabidopsis thaliana landsberg; identical to SEQ ID NO: 9047
  unsure (1)..(1516): unsure at all n locations

SEQ ID NO: 149145 - DNA, 425 bp, Arabidopsis thaliana landsberg
aatgctcgacaggaacggttatggtaaaattatcgattcaagagcttgttgtttcattggagaatctaggaatctacattgcagggaaagacttggtgcagatgatcgagaagattgatctcaacggtgatgggtacgtggacatcgaagagtttggagggttgtaccagacgataatggaggaaagagacgaggaggaagacatgagagaggctttcaacgtgtttgatcagaaccgggacgggttcatcacggtggaagagctaaggtctgtgttagcttccttggggctcaaacaaggaagaaccctagaggattgcaagaggatgataagcaaagttgacgttgatggagatggcatggtgaatttcaaagagtttaaacaaatgatgaaaggtggtggatttgccgccttaggatcaaac

SEQ ID NO: 149146 - DNA, 1679 bp, Arabidopsis thaliana landsberg
attatatatttatatatattttctaaaacattaaaaaacaaatgtacttttagtgttttcatataatttcattttaataatattaccaaatatggaaagttgagagacatcattccggtccgtaccaagtaggactgtaggagagtacaagtaattaaagacgtaaatcactcatcgaacctaggtaaagtaagtaagtcaccttgaaggcttgaagtgtgttttgacgtatatgttatatttttctttagcggacaggaagaaaacagaacatcttcttgcacttgatggtgcaaaagaaagactcaaattgttcaaagcagatcttttggaagaatcttctttcgaacaagctattgaaggatgtgacgctgtcttccacaccgcatctccagttttcttcaccgtcaaagatcctcaggtttttcaacaacttcaaatttgttgtggtgaatccaatgcatgttaattttaactactcactctgtttcgaattcatccaagttttagttttttaacacatgttaaagagatttctaaagtgacaattataaccttatgtttattaaatgtttcttaagttttctttaaataataaatatcataggggcaaaattgagaagaaaaaagaacaataactacacctaaaaatttgaaaacaccttaattgaaacattttaaaaaaaaaatcttttgctttcgacgccgtaaagaaacttatcaaaatgtgtgtgttttttttttttaataattatcagactgagctgattgatccagccttaaagggtactatgaacgtccttaatacatgcaaagaaactccctctgtcagaagggtcattctgacatcatccacggctgcggttctctttcgtcagccacctgtggaggcaagcgatgtggtggacgagactttcttctccgatccaagtctatgcagggagacaaaggttcttaagttttgttgtgatttgtgaacatatcaatttcgagattttggaatctttcttacacttttctttttcttctttagaattggtatccactctccaaaattttggcagagaatgcagcgtgggaatttgccaaagacaacggaatcgacatggtcgtgttgaatccaggatttatattcggaccactcttgcaaccaactctgaacttttcggtagagctaattgtggatttcataaatggtaagaaccctttcaataaaagatactacaggttctcggacgtaagagatgtcgccttggttcatatcaaagcgttggagactccttcagccaatggcagatacatcatcgatggtccaaatatgagtgtaaacgacattatagacattcttcggaagctgttcccagatttgtctattgctgatacgtgagatctctttccctagctctacctttgcttatcatcttatgaagtttataaatttaatgaaagattttgaaaaacttacttgttaatgattttgttaggaatgaagaaagtgagatgaatgagatgatatgccaagtgtgtgtggagaaagtgaaaaatttgggagtagagttcactcctatgaaatcaagccttagagacactattgttagcctcaaggagaaatgtcttttatgattctgttcgtatatttgtaactattatgtgtatttttattttgttagtatactaat

SEQ ID NO: 149147 - DNA, 1252 bp, Arabidopsis thaliana landsberg
  unsure (1)..(1252): unsure at all n locations
gagctttcaaaaaattgttgtacttcccaacggatctctgacgtttggtccagagccgacgacgacccacaactgaaaccaagagctatctctttttcctcttctctctctccttctctacctgcgttcgtgcttaaacaatgatctccctgaatctatctccttccctcaatccgggtctcctccacaagacccggacctgtcaacaaccgacccgtctctctgctcttctcgtcaccaaccctaaacccttcaatcacagacacccactagggctttcaccgattcccaatctccagattcgtgatgtttccgcaaaacccttgctttcactcacaaaccctgaatcctcatctgggttctcgagaaaacccagatccatcgccgccgttggctcatcggattcaaatccagacgaaaaatccgatcttggtgaagcggagaagaaagagaagaaggctaagactcttcagctagggattgtgtttggtctttggtatttccagaacatcgtcttcaacatcttcaacaaaaaggcactcaatgtctttccttatccatggcttctcgcttcgtttcagctcttcgcaggttctatttggatgcttgtcttatggtcctttaagctttacccctgccctaaaatctccaagccttttatcattgctctccttggtcctgcattgttccacactattggacatatctcagcttgtgtctcattctccaaagtcgctgtttcgttcactcatgttatcaaatcagcagagcctgtcttctctgttatcttctcgtctttactcggtgattcgtatccgttagctgtctggttatcgattcttccgattgttatgggttgttctttagctgcagtcactgaagtgtcattcaatttaggtggattatcaggagctatgattagtaacgttggttttgtcttgagaaacatttactctaaacgtagcttacagagctttaaagagattgatggattgaatctatacggttgcatcagtatactctctctgctttatctgtttcccgtggcgattttcgttgaaggatcacattgggttccaggttaccataaagccattgcatctgttgggacaccatcaacgttctacttttgggttttgctctctggtgtcttctatcatctgtacaaccagtcttcttaccaggcactcgacgagatcagtccattgactntctcttgtgggaacacgatgaagcgagtcgggtgattatc

SEQ ID NO: 149148 - DNA, 1861 bp, Arabidopsis thaliana landsberg
ctgatatctatgcttttgttggtgcagctaacgaatgctgcgaacggttggcttattatggcattgccaagaatctaatcacttacttcacaaatgaattgcatgagactaatgtttctgcagctagacatgtcatgacatggcaaggaacatgttacatcactcctcttattggagctttaatagctgatgcttactggggaagatattggactattgcttgtttctctgccatttatttcaccgtaagcattttcttgaaaaataactttgctttatgttctgttcttggcttgatgttctgttctttgatgttgttttaagggaatggttgcattgacactctcagcttcagttccgggtcttaagccagcggaatgcattggctctctatgtccaccagcaacaatggttcagtctacggttttattttcagggctttaccttatcgctcttggcactggaggaatcaaaccatgtgtctcatcctttggtgctgatcagtttgataagaccgatccaagcgaacgagtcagaaaagcttctttctttaactggttttacttcactatcaacattggtgcttttgtttcatctactgttctagtttggattcaagagaattatggatgggaattaggattcttgatacctaccgtgttcatgggacttgctactatgagtttcttctttggcacgccgctttatagatttcagaaaccgagaggtagcccgattactagcgtctgccaagttcttgtagccgcataccgtaaatcgaatctcaaggtccctgaagactccacggacggttacaagaaaatctttttccctctcatttcttgtttgaattgagcattagactattaacggttaaataagcggtttttgatatcaatgtacaggtttcttgacaaagccgcaactatatcagaaggagatgcataccctaacccgtggaagctatgtaccgtgactcaagtcgaagaagttaagattctgatccgaatgttcccaatctgggcttctggtatcattttctcagctgtatacgcacaaatgtccacaatgtttgttcaacaaggccgagccatgaactgcaaaattggatcattccagcttcctcctgcagcactcgggacattcgacactgcaagcgtcatcatctgggtgccgctctacgaccggttcatcgttcccttagcaagaaagttcacaggagtagacaaaggattcactgagatacaaagaatgggaattggtctgtttgtctctgttctctgtatggcagctgcagctatcgtcgaaatcatccgtctccatatggccaacgatcttggattagtcgagtcaggagccccagttcccatatccgtcttgtggcagattccacagtacttcattctcggtgcagccgaagtattctacttcatcggtcagctcgagttcttctacgaccaatctccagatgcaatgagaagcttgtgcagtgccttagctcttttgaccaatgcacttggtaactacttgagctcgttgatcctcacgctcgtgacttattttacaacaagaaatgggcaagaaggttggatttcggataatctcaattcaggtcatctcgattacttcttctggctcttggctggtcttagccttgtgaacatggcggtttacttcttctctgctgctaggtataagcaaaagaaagcttcgtcgtagtaatgctgttatctatctactttcattacatacaaaagtttgtttctttcaactgtaactgtctctgtatcaataacaacattgctgtgtacttttcctttcaatttcaaaagtttaagtcgcatttgcaatattataacgc

SEQ ID NO: 149149 - DNA, 2862 bp, Arabidopsis thaliana landsberg; identical to SEQ ID NO: 31653

SEQ ID NO: 149150 - DNA, 611 bp, Arabidopsis thaliana landsberg
  unsure (1)..(611): unsure at all n locations
tttcctagaaaaaaatccaatttctaatttctttcttgttttcttttttgcagnaatcaaatcaaatggcttcccatgcaaagacgcagctacagtcacatcagccgatttcttctcacaaggattagctaaaccaggtcttaccaacaacacattcggtgccttagtcactggagctaacgttaatgacaatcccaggactcaacactctcggtgtctccctctctcgtattgactacgcaccaggtggtttaaacccacctcacacccacccacgtgccactgaaatcgtcttcgtcctcgaaggaacacttgacgttgggtttctcactactgccaataagctaatctctcaatctctcaagaaaggagatgtctttgctttccccaaaggacttgtccatttccagaagaacaatggtgatgtccctgcttctgttattgcagctttcaatagtcagcttcctggaactcaatctcttggtgctactttgtttggttctactcctcctgttcctgacaacatcttggctcaagcctttcaaacttctccaggaactgttaaacacatcaaatccaagttccaacccaagaaatgatcatcacgcttc

SEQ ID NO: 149151 - DNA, 1128 bp, Arabidopsis thaliana landsberg
ctcatctcttccttcgtagacactttcgttgattactccgtctcgggcatcatcctgccccaagatcctagctcacaaaatgagattctgcaaacgaggttcgagaagccggagcgactcgttgcaatcggtgatctccatggcgatctcgagaagtctagagaagcattcaagatcgctggtctgattgattcgtcggacagatggactggtggatcaacgatggttgttcaggtgggcgacgtactagatcgaggtggagaggagttgaagatactttatttcttagagaaattgaaacgagaggctgagagagctggaggtaagattctgactatgaatgggaaccatgagatcatgaatatagaaggtgactttagatatgtgactaagaaaggtttagaggaatttcagatttgggctgattggtattgtttagggaacaagatgaagactttatgcagtggtcttgataaacctaaggatccttacgaagggattccgatgagcttccctcgtatgagagccgactgttttgaaggaattagagctaggattgctgcattgagacctgatggtccgattgcaaagagattcttgactaagaatcaaacagttgctgttgttggtgattcggtttttgttcacggtggtcttttagctgagcatatagagtatggactggagaggattaacgaggaggttcggggttggattaacgggtttaaaggaggaagatatgcgcctgcttattgtagaggagggaactctgtagtttggttgaggaaattctcggaagaaatggctcacaaatgtgattgtgcagctcttgagcatgctctttccactattcccggggttaagaggatgatcatgggacatacaatccaggatgctggtatcaacggtgtttgtaatgataaagccattaggattgatgttggcatgtccaagggatgtgctgatggattgcctgaggttttggagatccgcagggactccggtgtacggatagtgacatcgaatccattgtataaggagaatccgtattctcatgtagctcctgatagtaaaacgggtctcgggttactggtaccagttcctaagcaagttgaagtcaaagcttga

SEQ ID NO: 149152 - DNA, 5248 bp, Arabidopsis thaliana landsberg
aggaacaactgcagtattccgtcaaaacgtaacaaaaatgtcaaaaactctttcgatcagtgtgttggaagttagtttaatatggtctggtagttgagatccgatcaaatgaaaggaacaaatgagacaagagacaacggcatggagaatattgttaggaaaatatagctttagaaatcacttatgttttgcatgatattggagagtatttttgcaaaacaatttcctgactaaacatagaaaagtgatactttagtttacatttatcacaaaattacaaactttattgtaagtgttttctcataactaaactaataaaataataccgtgcaataccgacctacaatgcaatacacatgttctaatgatgttttagttgtatgtaaaacgtgatcatctagctaggacttttgcagaaattgtttttttagacctttaacgtagaaatctgcatttataaatattttgaaacaaaaagtcaaaatttagttatactataagataataaattctatcattagtctttcaaagacttgatgattaataattttcctattttctaatgataccatacaaatattaaactcttaaatataataataattataattataaaactgaccttagggttatctaataataatctaaaccagtaaagatactagacttactccacaacagtaaccgaccccaaaaaaagttactcaccaacttgggccttaaaaaaaagtagcgtatgtcgaaaagaccataacacccactggcatttactttcccttaaaaaaacaaaaaaccaaacaggattcggaagaaaagtccatcgaatctaaaagaccatcatccgcttacataaatctcagagcagaacacaagtaagaaagaaaaaagaagacaactcgaaacgacgtaggtttaattcgttagatagaaaagaaaaaggaaattccgaggaggagaatatgccgttctcctcgtatatcggcaacagccgccgtagctccaccggcggaggaaccggcggttggggccaatctcttcttccaacagcgttatcaaagtcaaaactagcgatcaatcgaaaaccacgaaaacgaactctcgtagtcaatttcatcttcgccaacttcttcgtcatcgcactcaccgtctcactcctcttcttcctcctcactctcttccacttcggcgtaccaggaccgatctcctcacgattccttacctccagatccaatcggatcgtcaagccacggaagaatattaatcgccgacccttaaacgattccaattcaggcgccgtcgtagatatcacaactaaagatctatacgataggattgagtttcttgatacagatggtggtccatggaaacaaggttggagagttacgtataaagacgatgagtgggagaaagagaagctcaaaatcttcgttgttcctcattctcataacgatcctggttggaagttgaccgtggaagagtattatcagagacaatccagacatattcttgacaccattgttgagactttatctaaggtatgacgaaagttttttgcttttggttttaaaattttaattctctcccatgattatcccgtgaacaatcttaagtgtctcatgacgtcattaaactctataaccaacttctttgctgggttctgtttttttttagttttgtgttgaaacagagtttttaaagctcgttctttcggaaaactttcagtctttggagtttaaagtttggatttttattactgggttttgagattgagggatagctagaatcttatttgtgtgggggtttgttttgaatatgtttgataggattcaagaagaaagtttatatgggaggagatgtcatatctggagagatggtggagagacgcttcacctaataaacaagaagctttgactaaattggttaaggatgggcagctagagattgttggaggtggctgggttatgaatgatgaggtatgtttcttacttgtcgcttggctataaagtaaaataaattgttgttatagtcccatgccattcttctgctgattgttttgatggagattgtatgtgctaaagttttcttcttaatgttctctgcaggctaattcacattattttgccataattgagcaggtatgtacatcaacacttgactttccagtttttataggcacttaatttgtctactcctgtttgcgtttaggcattttaattcttactgaaacaaagatgatgacgatgatactgcattttcattaatgtttctgttaggtttttatttattatgtcacttatggttggttatagttcgacatcccctgagacctcttttgagctgaaacctctcttttttttggttatgcatagtacatgtgatgttagaatgtcatttggctagtgataatgctagttaactagccccttgttgcattgtgtttctttcctttttatactgattttgtactggatcacttcttctgcagatagcagagggtaatatgtggctgaatgacacaattggggttattcctaagaattcttgggctatagatccctttggctattcatcaaccatggcttatcttctccggcgtatgggttttgaaaacatgcttattcaaaggactcattacgagctcaagaaagaccttgcccagcataagaatcttgaatatatttggcgtcagagctgggatgctatggaaacaacagatatctttgttcatatgatgcctttttattcatacgatatcccacacacttgtggaccagagcctgcagtttgctgtcagtttgatttcgctcgaatgcggggatttaagtatgaactttgtccatggggaaagcacccagtggagaccacactagaaaatgtgcaggagagggcattaaagcttctggatcaatacaggaaaaaatccactctatatcgaactaatacgcttcttatacctcttggagatgattttaggtacattagtatcgatgaagccgaggctcagttccgtaactaccagatgttgtttgatcacatcaactctaatcctagtctaaacgcagaagcaaagtttggtactttggaggattatttcagaacagtccgagaagaagcagacagagtgaattattctcgtcctggtgaggttggctctggtcaggttgttggtttcccttctctgtcaggtgacttctttacatatgcagataggcaacaagactattggagtggttattatgtttcaagacctttcttcaaagctgttgatcgtgtgctcgagcatacccttcgtggagctgagatcatgatgtcatttctgctaggttattgccatcgaattcaatgtgagaaatttccaacaagttttacgtataagttgactgctgcaagaagaaatctggctcttttccagcaccatgatggggtaactggaactgctaaggattatgtggtacaagattacggcacccggatgcatacttcattgcaagaccttcagatctttatgtctaaagcaatcgaagttcttcttgggatccgccacgagaaagaaaaatctgatcaatccccatcatttttcgaggcagagcaaatgagatcaaagtatgatgctcgtccagttcacaagccaattgctgcccgggaaggaaattcgcacacagttatactcttcaatccatcagaacagacgagagaggaggtggtgacggttgttgttaaccgcgctgaaatctcggttttggactcaaactggacttgtgtccctagccaaatttctcctgaagtgcagcatgacaataccaaactattcaccggcagacatcgcctttactggaaagcttccatcccagctcttggtctgagaacatatttcattgctaatgggaatgtcgagtgtgagaaagctactccgtctaaactcaaatacgcttctgagtttgacccatttccttgtcctcctccatattcctgctccaaactggacaacgacgttactgagatccgaaatgaacatcagactcttgtgtttgatgtgaagaacggatcactgcggaagatagtccatagaaacggatcagagactgttgtgggagaagagataggtatgtactctagtccagagagtggagcttacctgttcaaaccagatggtgaagctcagccaattgttcaacctggtggacatgtagtcacctctgagggtctgctggttcaagaagtcttctcttaccctaaaaccaaatgggagaaatcacccctctctcagaaaactcgtctttacactggaggtaatacgcttcaggatcaagtggtcgagatagaatatcatgttgagcttcttggtaatgattttgatgaccgggaattgattgtccggtacaagactgatgttgacaacaagaaggtcttctattcagatctcaatggtttccaaatgagcaggagagaaacttatgataagatccctcttcaaggaaactactacccaatgccatctctcgcatttatccaaggatccaatggtcagagattctccgtgcactctcgtcaatctctcggtgttgcaagcctcaaagagggttggttggagattatgctggacagacggttggttcgtgatgacggacggggtctagggcaaggtgtgatggataaccgcgcaatgaccgtggtatttcaccttcttgcggaatctaacatttctcaagcagaccctgcttccaacactaacccgaggaacccttcgcttctctctcacctcataggtgctcacttaaactaccccataaacacattcattgccaagaaaccgcaagacatatctgtgcgtgttccacaatacggttcctttgctcctttagccaaaccgttaccatgtgacctccacattgtaaatttcaaggttcctcgtccatccaaatactctcagcaattggaagaagacaagccaaggttcgctcttatcctcaatagacgagcttgggattcagcctattgccataaaggaagacaagtaaactgcacaagcatggctaatgaaccagtaaacttttccgacatgttcaaagatcttgcagcttcaaaggtaaaaccaacttcactgaatctcttgcaagaagatatggagattcttgggtacgatgaccaagagctacctcgagatagttcactgccacgggaaggacgtgtctcgatctctcccatggaaatacgagcttataagcttgaactgcgacctcacaagtga

SEQ ID NO: 149153 - DNA, 809 bp, Arabidopsis thaliana landsberg
  unsure (1)..(809): unsure at all n locations
tagatttagctccgtcccggagaaccatggcgtcgctttgctctgcgaggttccttccttgtccatcgctcgatattttatctacgaagacgaagatatcctccgactcgcgctcgcttggttgctcttcgtcgcgtgtctttgctttctcttccgttcaccgttcttcttcgcgtcgcaatcggaatcagctgcaagttgtgtctatggctcctgaggaagaaaagctcactcgtcggaaccctgtcgattgtccaattgtaagttcccgggtcgagtcggttttatttcggatcttttaatttccagtttcacatttctattcgctgtggtaatagctccgattgagaataaataggttttggtttagagtttgtgatttgttctacatttctatgttcctgctgtttatgctttctttatgaatctacatgtgttaacagtcaaatcaattgatacaagtgtagagaaaagctttgtattcatggcttcaaagtgatttggtagctcctcatgtgttttgtttgcattaggtgggattagtgatcattgtttctttatagaatatgaatacccgagaatctacttagaatcataatgctttcccttgttatgttctttacgagtctcgcgatgttaattatgttgtgatctacttgttaggagtgggaaagaccaaaacctgggaggaggcctgacattttccccaagtttagtcctatgaagacaccattgccaccaccgatgccttatgatcctnncgnagaagatgaagaagaggaagagaagaaagaagagggagaagaaaa

SEQ ID NO: 149154 - DNA, 2829 bp, Arabidopsis thaliana landsberg
gggttcaacaaagttaagctatttgaagctgaccctggtgcactcagagctcttggtaaatccggtattcaagtcatggtcgggtatccccaacgatctcttggcaactatggcatccactgttaccaacgcagagctttgggttcaacaaaacgtctctcaatacatctctagatatggaaccgacataaggtaatttgcattgcagttcaataggccattagctaaaacatgttttaagtttgtcaagcttggatttttaagctaaaacatgcttaagcatctgaagagtagacttttaaactataaacaaccttctgaaagcttagacttttaagctaaaaacatgcttgaagtttctaaagattggatttttaatcggtgatcagatatgtagcggtggggaatgagccattcttgaagacctataataacagattcgtccgatcaacatatccagcgctgcaaaacgttcaagcagctctagttaaagctggtcttggtcggcaagtcaaagtgacggttcctcttaatgccgacgtctacgaatccagcgatggtcttccttcttccggcgattttcgatcagacataaaaaccttaatgatctctattgttcgattcctagctgattccgtctcaccaatcaccttcaacatctaccctttcctctctctcaacgctgatccaaatttcccgcgcgaatacgccttcttcccaaacggaggcggcggcggtggagctaagcccgtcgtcgatggttcaatctcttacacgaacgtcttcgacgcaaatttcgacactttagtctcggcgctggagaagaacggatttgatgcgaacaaaattgaaatcatcgtcggagaagtcggatggccaaccgacggtgatcagaacgcaaatcctgcaatggctcagagattcaatcaagggttattgaatcgtatccttcaaggacaaggtacgcctcgccggagaatggcgccggaagtttatatattctcattagtagacgaagatgccaagagcattgatcccgggaaattcgaaagacattggggaatattctcttatgacggcgccgttaagtatcctctgagtctcggtaacggccgtccgttggttccgactaaaggtgttcgttaccaggcacgtgagtggtgcgtgctctccactcaggctgcgggtaacggtgctgccacttggcaggcttctgctacgtacgcgtgtcaaaatgccgactgcacctcgctcgggccgggttcctcctgcgccgccttggacccgaccgcgaatgcttcttatgcgttcaatatgtattttcaaaaaatggataatcgtcgtggctcatgtgattttaacaatcttggggtggttactaagatagatccgtcgagtggttcctgtaggtttcctatcgaaatcgacccgagcaggcagcagatgtggaatccgccacggaggaattcaggtgcatctgaagcaaagtataggttgggggcagccgtggtgatggtaatctgtttggtgttctctaattgatccttggggatgtttttttcattctttcattgaaatgtaaatacaattgtccataattcgataactggacatgtaattattctgtcttagaacttgttttcctttttttcacttgttatgttaaattattgataggttaatagtgatgatttgattcgtaatagatggaatgaaagcggttaacaaggtgcacgtatgtgattagagtccatgctctgcctcgtctttgagcccacaacgttttgagacttttgtggtaaaaccttttctaagacaaaagaactataccaaaattcagataaggaactatagtgtggtggtccgtcggattagcagttattatgtcactcttccgtatgataaaataatttgacttctttttgcagagttgttgtagtaaaagcatgttacattatcttcttaccagttagaactgattgttttttcggttccatcttgtttgtttacccacacagaaagtagctaaggttttcatatgtcgtccaagtcaactagtacgagagttatgacaggtattatatgttctgttttggcattagtggatatatagtttaagtgattggataatggtattttggatcttgatgattaaaaattgggtatgatcgagcgagtatttgaggtatatagttggatcaaattgtccaacaaaaaaatatgtttggtcccaaataaaaacgaaaaaagaaaaacaaaacaaaaaagtgagtgttaatgatcccatcgaagccactcaagtctcaatctactctatgaaaaaaatggtagaccgctaaactaactcaccagacactcacctcctcagctaaaactatcttcttcattccctcctctatataaatcaatgctaatctctagttaattggatatcatcaactttaccacataaagtacccaagaatataaatagaggataaccaactttttgttttaaagaaatgggtgttatagatatggtcttgttttgggtgttattggtcaatgcccttctcattgttgatgcctcttcaagaaatatgccatttgcttaccaaaatgaaatgcaaaggcattgtagctccacaaagtacacctcactctgtgtccaaaacttacgagagtttcgacatggatctcttgacggtctcgactttgtgtcttttcttgttaacaagactatctctgattccaatctgctaattccacctctctcctcgtcgatgggttcctccaaacttgtttctctggaagattccacttatacgttgccttcaccttccgtctcag

SEQ ID NO: 149155 - DNA, 612 bp, Arabidopsis thaliana landsberg
atcatttcagtatgataagaatacgcatgtatacgcgatttccaattccttaatcataaatactttttactatatataataagttacggtatatgaaaacaactatatgcacaaatatgagggattgttttaaattaaatctttatacatgagattaatttaatcaatcacatagataccaattatagcggattcataaataaattaacagaatccttctttttgagatctaaatttagatttttttctaaaatgaagaattaagaggttgataattaaattaagatccttgtacaaaaaaactaccattattattactgatcagtaaaattaatatctttcaattcatattaaaaggggaaggatttctttttatgataaaaaatatagtcatttcatttgaagaacaaaaagaagaaagcaggggatccgttgaatttcaagtatttagtttcactaataagatacgaagacttacttcacatttggaattgcacagaaaagattatttatctcagcggggtctacgaaaaattctgggaaaacgttaacgaccgatggctaatgcgtcaagaaaaagatgaggacgctatgcagaataaagagctcagc

SEQ ID NO: 149156 - DNA, 3981 bp, Arabidopsis thaliana landsberg
ctctcagaggatcagaaatgtagcagaggttataatcaatgataattccgaaagaaaacttgtggttgtctcggcgatgtcgaaggttacggacatgatgtatgacttaatccgcaaggcacaatcacgagatgattcttatttatccgcgttggaagctgtcttggaaaagcatcgtttaacagctcgtgaccttctcgatggagatgatctcgctagtttcttgtcacatttgcataatgatattagtaatcttaaagcaatgcttcgtgctatatacataggtagtgtgatagtaatcttatttacttttactttgagatttcagaggaaggaactgacatctttcatttgcagctggccatgcatcagagtcgttttcagattttgttgcaggacatggggagctttggtctgctcagatgctatcatatgttgtcagaaaggtttgaattatgagttatgataattacatgtgaagttactgaggttgtatgcttttatcatctctcttttctttttactgtagactgggcttgagtgcaagtggatggatactagagacgtgctcattgttaatcccaccagctctaatcaggttgatcctgattttggtgaatctgagaagagactcgataaatggttctccttaaatccgtcgaaaattattattgcgactgggtttattgctagcactccgcaaaatattccaacaactttgaaaagagatgggagtgatttctcagcagctattatgggtgctttattgagagctcgtcaagtaaccatttggacagatgttgatggtgtatacagtgcggatcctcgtaaaggtatgtcctgttttttttttctttgcctgtaaaccgttttacaaataactagaagttttgctgcagttaatgaggcagtgatactccagacactttcttatcaagaggcctgggaaatggtaaactttgcgttcctgttatcctaaattcaggaggccaagtacaaacttctgatcaaaactcttaacttcatgcagtcttattttggagcaaatgtgttacatcctcgcaccatcattcctgtgatgcgatataatattccgattgtgattagaaatattttcaatctctctgcaccgggaacaataatctgtcaacctcctgaagatgattatgaccttaaactgacaactcctgtcaaagggtttgcaactattgacaatttggccctcataaatgttgaagggtaagctactttctccgttgatgtgcgagtgttatttccattctcgtaaataacaagctgcattcatacctatcctattgactgctctcttccaattcattctgatagtactggaatggctggtgtacccggtactgcaagtgacatttttggctgtgtaaaagatgttggagctaatgtgattatgatatcacaggtgccttagtttctaactttaccttagtattatagcaaattttttcattatagaggcagagtcttatgtcatggatatattcattgttcaggctagtagcgagcattctgtgtgctttgctgtacctgagaaggaagtgaaagctgtttctgaagcattgaactcaagatttcgtcaagctttggctggtggccgcctttcccaggtgcctttatatctctctttgttcttcgaaagatatcaaatagcttttctcttagcaaatgaacagaactcttattttggcatccactatttttctcaaactatggtttcattgttttcattcagattgaaatcatccctaattgtagcatattagcagcagttggccagaaaatggcgagcactcctggtgtttgtgccactttttttaatgcgttagcaaaggtaagttaagtgtagtgtttgcaaagaaaatcagatgacggttcatcatacttttcatatccttttttctgcttagaagctctgctgacacattgccatacctaaataactgcaggccaatatcaacatccgtgctatagcccaaggttgctccgagttcaatattacagtagtcgtcaagcgtgaagattgcatcagggcattaagagctgtgcactcaatgattttacctatcgagaaccactttggcagtgggaatcataggaccgggattaattggtggaaccttacttgatcagattagagatcaggtgagtatgtgatacttatatgcaagattatagtaaaatatggatcaatgttcaagctgcatcatatttaaatttcctttcacaggcggcagtgctcaaagaagaatttaaaattgacttacgtgttatagggatcacgggctcaagtaaaatgttgatgagtgaatcgtaagccaacgaacttgatacattacttttttggtgaagtttctactgctgtaatctttacacaatcgtcatctttttagggggattgacttatcaagatggagagaacttatgaaagaagaaggagaaaaagctgacatggagaagttcacccaatatgtgaagggaaatcattttatcccaaactctgttatggttgattgtacagccgatgctgacatcgctagctgttactacgactggttgctacgaggaattcatgtggtcactccgaacaaaaaggctaactctggaccacttgatcaggtaaagtgtttgatatttgcttaaatgactgttggatcgggagctacttttatgttcatcttgagtatatatccattaagattctgtggttttatgaacagagagactaattggtaacactcctgtaaatgcagtatctaaagatcagagatcttcaaagaaaatcgtacacacattacttttatgaagccaccgttggagctggtcttccaattattagcaccttacgtggtctcctcgaaacaggggataaaatactgcgaattgagggaattttcaggtatctatctcctcttcgtcttggtgccacagtaatttgttcagataccacaacaatggccttgctttgcatcctcacactaaaattttgctttgatgcctctctgcagtggtactttaagttacctcttcaacaactttgtcggcaccagaagcttcagtgaagttgtagcagaagcaaagcaagcaggtttcacagaaccagatccacgagatgatctatctggaacagatgttgccagaaaagtaaggttttttttttcctgtcaacaaatcgagccaatgcaccttgtaaaaagatattgaaccttctcgtttctgcaggtaacaatccttgccagagaatcaggcttaaaattggaccttgagggccttccaatccagaatcttgtgccaaagccgctacaagtaagactctgtataatcacacaattaaattcatcaacaataaggttaatccttttgacatttcttattcacttgttgattcacaggcttgtgcatcagcagaagagttcatggagaagcttcctcagtttgatgaagaattatccaaacaaagagaagaggctgaagcagcaggagaagtaagtagtacctccttggcaaaacttttttaacaccaaatgcgccgtcttgaaaagaactcatttcagattttgttgcgttgtgtatttgtttaggtcttgagatacgtaggagttgtagatgcagtagagaaaaagggaacagtcgagttgaaacggtacaaaaaagatcatccgtttgctcagctatcgggtgctgataacatcatcgctttcacaaccaaacggtacaaagaacagcctctgattgttcgtggacctggtgctggtgctcaagtcacagccggtggaatcttcagtgacattcttcgccttgctttctatcttggggctccgtcttaaggcacactctacatgctagaatatgtattttggatttcagagattctgatttttatagatgataccaaacttcaaggtaataaaacattctaggaaaaaattgaataaagactgttggtattat

SEQ ID NO: 149157 - DNA, 2002 bp, Arabidopsis thaliana landsberg
aacacagcacagagaatataagaaaggaatgatcactcttatcatctttgtcttcaaattcactcttaacacaaaacaccgagtcattatccatccttatatcaacaattgaacaatatcaacgaatgaatagaaaaagtggaaggtgaaatgtgtatgtaccctatagactaaagcttgagcgatgtttcttaagtgccaatcggatctaccggtggcgatgacagtgaaatcagcccagaaacaatgattctgtgtaggaatcacagtcacgttatcagctttcacgtcggcgagaatcttctccacttcgggaagtgtgagaatctctgagacatcagagatcccggcggttgaagaaaaagagggagaggaagcgaagattcgattgggagctagcttccatgattgatctagaagaagagacgaacaacgagatcgaagagtcgtcaacattagctaagcgcggtggagaaatgggggacggttgggtttaaaccctaataccgaattcgattgaccggaacgttggtcaaagctggtgatgcggctttaggtgtttaatttttttgattaaaaaacgctttaattattctcttatacaaaaataaacattaaatttaatacccttagcctattacacaagcaaaagaggaagattgtcacaagcaaaagaggtacaatgaacaaagaatagatttatggtaactagatgatgacatgtgtaatgttaactagggttttacaagggcttaactttagtataaataaggagctatgcctcatgtaatcgttaagaagagaacggatcaatatcaaaagaaacaatctttcttcccagttttagtatcttctacagacagaaggtgacacgcctccctcaatctcaggccacaaacgcgagaacccttgcgcctgataatgaatgtatcttcttcttcagtcaaacgaccctgtagctcgtcggaaactaccccagaaaggcggatctccatggctgatgcttttaccgaaagacggtggttgtgtgctgtacaacccgaaagaaggaaagaagatccatagggaactgcgagactttccagggtctcgaatcctggcaaactcgggttactggttattgttgttagattctggatccaatttagttatcatagatgtctttagcgataaaacgatccctcttccgtctctagagtcgattgcgtcagatactagtaaggtcaggcgtgtgggagatagagtatttgaaagggaatataatggcccggaatatagtgcccgtgttgccactgatctgacttgtgatactgtgaggggccttttgtgggtagacgagagtggaacagattacgttgtggtgtggttcttcgacctccctggccactcttatataagcttttgcaagaaaggggacactcattacactgacattcctctgtttttccgagacgcccactttttggatggcttatcttatatggtactggggcgttactctctttatatctcgacaagtcgtcgttttgttaaagtcctagatctgtctggaccgcaaggtttcttcaaggacatcaccgagggtaataaaccattctcaatgctttctcgttatcagtcgtgggattctagcattgctgttacaacctctggagaggttttgttggttgagagtaatccatggcagagggactgcttccgcgtctacaagtatgatcctaatgtagaactcccagattacgcctgccacactgttcttgaggttgattctcttggtggtgaggccctgcttcttgacttgggtttcactatacctgctaacgaaacccttggtatcgaaccagactccatctatttcacccgtcactaccgtccctgccaatgcagacctcgtgaccttgacatctgtgtgttcaatcttgtaacaaagaccctcaaacgctttcctgctcttgacgacatgtctcttatggatgctcgatggtttctccatgccaattaa

SEQ ID NO: 149158 - DNA, 1427 bp, Arabidopsis thaliana landsberg; identical to SEQ ID NO: 30114

SEQ ID NO: 149159 - DNA, 5039 bp, Arabidopsis thaliana landsberg
tgtcttgcaggaaatctatgtcgttgtactgggtatcgacccattgttgatgcgtttcgggtttttgcaaaatctgatgatgctctctactgtggtgtatcttcacttagccttcaagatggttctactatttgcccatctactggcaaaccttgctcttgtggatcaaaaacaacaaatgaagttgccagttgtaatgaagatagatttcagtcaatctcttatagtgatatagatggagctaagtatacagataaggagcttattttcccccctgaacttttgctgaggaagttaactcccttaaagttaaggggaaatggggggattacctggtatagacccgtatgtcttcagaacttgcttgagctcaaagcaaattatcctgatgcaaaactactggtaggtaatacagaggtgggaatcgaaatgagattgaagaggttacagtatcaggtgctgatctctgttgctcaagtcccagaactcaacgcattgaatgtcaatgacaatgggatagaggttggttcagctttgagactttctgaactcctgaggttattcaggaagatagtaaaggagcgtcctgcacatgaaacatcagcatgcaaggcttttatcgaacagctgaagtggtttgctgggacacaaataagaaatgttgcttgcattggtggaaacatctgtacagctagtccaatatctgatttaaatcctctttggatggcttcaagagcagagtttcggataaccaactgcaaaggagatgttaggtctatacctgcaaaagatttcttcctcggttatcgtaaagtggatatggggagcaacgagatcttgttgtcggtattccttccatggacaagacccttagagtatgtgaaagaatttaagcaggcccatcgcagggatgatgatatagctattgtcaatggtggaatgcgtgtgtttcttgaagacaagggtcaacaattgttcgtttctgatgcatccattgcttatggaggtgtggctcctctttctttgtgtgcgagaaagactgaagagtttctaattggaaagaattggaataaagatcttctgcaggatgcgcttaaggtcatacagagcgatgtcgtgattaaggaagatgctcctgggggaatggtggagtttcgcaaatctctaaccctaagcttcttctttaaatttttcttatgggttactcatcatgtaaataatgtaaatcccactatagagacctttccaccctcgcatatgtcagctgtgcaacttgttcctcggttctctagaattggaaaacaagactatgagacagtaaaacagggaacatctgttggcttgccagaggtccatctttcggcaagaatgcaggtattttggtccatctgttggctcgccgaaggtccatagagtgtatctcaacactcttgtatattcatctaggtcacaggggaagcagaatatactgatgataccccattgccgccttgtaccttgcatgctgctttagtgctaagtaaagttccacatgcccgcatcctttcagttgatgattcggcagccaaatcttcatctggttttgttggtctgtttcttgccaaagatgttcccgggaataatatgattggaccaattgttgccgacgaagaattatttgctacagacgtggtcacgtgtgtgggacaagtaagaaaataaacctcaatggggaacttttagtttatctgtatcttagaagaagtgataccagaaaagtaaaggagcatgtattgattttgttacgtcaaataagttaaaaaagttttcatgtactgctttcgttcccttatttctaagctaatcttgtatttcaggtcattggtgtgcttgtcgcggatacacatgaaaatgcaaaaactgcagcaagaaaagttgacgttaggtatcaggaactgccagcaatattatcaatcaaggaggcgattaatgctaaaagtttccatccgaacacagagagaaggcttagaaaaggggatgtcgagctgtgctttcaatctggtcagtgtgacagaataatagagggagaggttcaaatgggtggtcaggaacacttttacttggagcctaatggtagtttggtttggactatagatggaggcaacgaagttcatatgatttcatccacacaagtgagcatattatttagtatttacatcatttagaataacgtacaaaaaaccattaggcatcagccagtttaagatattaaatgataatgttgtctctgcgtatgccaatattggtagttatgatttatatacaggctcctcaacagcaccagaaatatgtgtctcatgttcttggtcttccaatgtctaaagtggtatgcaaaaccaaacgacttggtggtggctttggtggtaaggaaacaagatcagctttcattgctgcagcagcttctgttccttcctacctattgaatcgacccgtgaaactcatactggacagagatgtggacatgatgattactggtcatcgccatagtttcgttggaaagtacaaggtatctttctctgttgtttccagctttttcccttgaatttttaggcagtggccattaatgagcggccaatcaaaaaatgactgaaaacagttgaaagtagaagaaagagtgggaatagattgttagacaaactaatcattccttttaaatgtgctctgctatcttaaaggttggatttacgaacgaaggaaaaatattggcgttggaccttgaaatctacaacaatggtggaaactctatggatctctctctttctaatcttgaacgtgccatgtttcactcggataatgtttatgagatcccacatgtgaggatcgttgggaacgtttgctttactaattttcccagcaacaccgctttccgagggtttggagggccccaaggtatgcttataactgaaaattggattcagagaattgcagctgagctggataaaatccctgaagaaatcaaagtgagttgaatattttctaaagatactcatctcctgaaagtttgtaggaatctgtcctccttttgtaagtttagtttaatgtttcctggtgatatttactttaggagatgaactttcaagtggaaggatcgatcacacattactttcagtcacttcagcactgcacattgcaccaactctggaaagaactgaaagtatccagcaacttcctaaagactcgtagagaagcggacgagtttaatagtcataatcggtggaaaaagcgtggtgtagctatggttcccacaaaatttggcatatcctttaccacaaagttcatgaatcaggttatctttgtttgatgtgaatccttttctttcaaatttagttatctgtcgaggaactgaaaagattaagctaaagcttccttggaaatctcaccattgcactaccgttcaaagctagaatctgaattttgagatacttaatccaatatataattaaacggctgtcacaggccggtgctcttgttcacgtttacaccgatgggactgttttggtgacacatggaggtgttgagatgggccaagggttgcatacaaaggttgctcaagttgctgcaacggcctttaacattctccttagttcggtttttgtgtcagaaacaagcaccgacaaggtacatttaactcggttacaagcagtggacttttggccaagacgtagtcagacaaaactgttgttgttctctcttatcatttctgtggtctcttaataggttccaaatgcctcacagtttttgctctcttgtcgttttgattgccttgtaacaggttcctaatgcgtcacctactgctgcttctgcgagttctgatatgtatggtgctgcagttttagacgcttgtgagcagattatagcaagaatggagcctgttgcatctaaacacaatttcaacacattctctgaggtattctttctttcttctagcaatttgatacaaactcagaagattttgatgaacaaaactctctttttctctgagtgtatgtagctagcaagtgcctgctactttcaacgtatagacctatcagctcacggttttcacattgttccagaacttgaatttgattgggtatctggaaaagggaacgcatatagatattacacatatggagctgcctttgctgaagttgagatagatacattgactggtgattttcacacaagaaaagcagacataatgttggatctcggatattctcttaacccaaccattgatattggacaagtgcgcaatcttctctcaacatcctacgcttttagctgttcgttggccttttgcaatgtttaaaatccaagaaaatcatagagaaaagtgttatttctgaaattcaccatttgcagatagaaggagcgtttgtacaaggactaggttgggtagctctagaagaactcaagtggggagatgcagctcataaatggattaaaccaggaagtttactcacttgcggacccggaagctacaaaataccttccatcaacgacatgccgttccaactgaatgtttctcttctcaaggtatgcaactataggaacaagctgtttaaattggtagcaacacatttgaaactgaacatgagattatactcagggtaatccaaatgcaaaggcaatacattcatctaaagcagtgggtgagccaccgttctttcttgcagcatcagccttctttgcaataaaggaagcaatcaaagcggctagaagcgaggtaggtctcaccaactggttccctctggagactccagccactccagagcgtatcaggatggcttgtttcgacgagttttcagctccttttgcaaattcagatttctgcccaaagcttagtgtttgagctttaaactttaatagaggggagaaagatggatcaatccattttgtcaaagtcatatatgtaagttacttccagtctccaaatacatgatgtaacatgatacatgtttcttcaaagcagcaactttgttgactaaatgcgcgcgccatcgagataaaatatcaga

SEQ ID NO: 149160 - DNA, 1893 bp, Arabidopsis thaliana landsberg
cgtaatgtaagtcggcttttcgataaatcatatgaaatacatttttcttactaatggtttgtattagtgtggacgtgtcataatttggtttgcatttgaaatatcacataaaaatgccaaattttggttttggtattttttgttttgataaaggtatcatattttgttgtcttacaaaatgatttctaaatttgaattttaatttgttatagaccggtttgaatcttcgaacaactggtaatacaaagagtgatgagtcaatgatcgatgatggagaatcttccgaaatggaagataagcgtgcgaaaaatgaggtaagtttagtttgattttacattagtaatatttaatagatgaataatttgaaccggtttgattaatatttcgatttttttttgtttatcacagttggtgaaattacaagatgagttgaagaaaatgacaatggataatcaaaagcttagagaattgcttacacaagttagcaacagttacacttcacttcagatgcatcttgtttcactaatgcagcaacagcaacaacagaacaataaggtaaataattattagattgatcaaccacaagtaaatggaatttaccctacatgaataggcaattaattttggtgaacctatatgattaggtaatagaagctgctgagaagcctgaggagacgatagtaccaaggcagtttattgatttaggccctacgagagcagtaggtgaggccgaggatgtgtcaaattcttcatccgaagatagaactcgttcggggggttcttctgcagccgagaggcgtagtaacgggaagagacttgggcgtgaagaaagccccgaaactgagtccaacaaaattcagaaggtgaattctactaccccgacgacatttgatcaaaccgctgaagctacgatgaggaaagcccgtgtctccgttcgtgcccgatcggaagctccgatggtaagttgatttattagatactaatacttataagactatataaaaaaataaactatgtgctttagagattaattatctttgtactttatgtttctatagataagcgatggatgtcaatggagaaaatatggccagaagatggccaaagggaatccttgtccgcgggcatattaccgctgcacgatggccacgggctgtcccgttcgcaaacaagtaagatttaaaagatttaaccattggactaaaagattcttgttgtgaaaacattagagatttcaatgtatatatgtttgcgtgattggctaatacgttcggtccgaaatgatatttataggttcaacgttgcgcggaagacagatcaattctgattacaacctacgagggaaaccataaccatccgttgccgccagccgcggtagccatggcttctaccaccacggcggcggctaacatgttgctatccgggtcaatgtcgagtcaagacggtttaatgaaccctacaaacctcctagctcgagctatcttgccttgctcctcaagcatggctacaatctcagcctctgcaccattcccaaccatcacattggacctcaccaattcacccaacgggaacaatccaacgaatggctcgctgatgcaattctctcaacggcctgccttggtggagttgaaccaatcggttttgcctcatatgatgggtcaggctttgtactacaaccaacagtctaagttttcgggtttacatatgccgtctcagccgctaaacgctggtgagagtgttagcgccgctactgccgcaatcgcctccaatcccaactttgccgcggctctagctgcagccataacttctattatcaacggttcgaacaatcagcacaatgggaacaacaataacagtaatgttacaacgagcaacgttgacaataggcaataa

SEQ ID NO: 149161 - DNA, 2643 bp, Arabidopsis thaliana landsberg
atggttcgcgcttacgagataaatccacgaaggtaatttcaattgatctctactggctaacaacatatatacaaatcgtaattccgcgatggtaaaccctagaaacttcaaatcagaatcggtacaaagatgacgagacatgcaagcgaatcgatacttcggtataaacaaagtataagaaacgagaaatcattaccagagagtacgagatctgctcgtgatttgcgacggaaccctaatttctgagaagaggagaagctgcagagaaactttggcagaacacacaagacacaagtgaaagcaaacgacgcgatatatctcgtattcgacagctaacggggtaatttcgtcatttaagtacaagtgggcctgattaaatgggctttattaggcccatgtataagggttttgaagaaaaggttttagtcgccgtcgttcttcgtttcttccttctccgtcttcgtcttctttctcagttctgttgtcaaattagggttttggtttcaggggaaaaagagagagagagagatgtggtttctatgtgtcttctatcacaggctattagacttcagaaaaccagaagtggaagctttagctgaactcttcggagaagagattgcagagaatgagtctctccaatggcgtctacctgaaaatcaccataacgatactccattccatttcgttcaactttcttctgaagaaattgctcgtaacattgctaaacgaagcatattggtgaaaggaatgtatgagctttggggtgaaggaacttgttatgaagagcttaaagactcgattcaaagctaccctgattctcgaaagcttccatttctcacttctgattcaacttttagaatctctgttgaaacttttggaaaggctttaacttttgacgagcagaaagatcgaatccagtcttttacttatataccatttgaggtctgattccactttcttgtttcaatctcttttggtgtttatcgtcatggttttgattctttggtgatttgattgttgcagggtcgtgttaacttgaagaacccagatcataacttttttctaatggaaatgattgaatctgaagagaacaatggacttcaacctattctacagagaaggatattttttgggagggaggttggttttgctgataggaagcttttacctacatttcagttgaaatctcgtacttaccttggtccaactgctatggatgctgaaatggctttcttaatggccaatcaagctaaagctacttcgggaaaacttgtgtatgatccttttgttggtactgggagcattcttgtttctgctgcacggtttggcgcaatgacaatggtttgcaactcttctcttagtatcttgatatccttttgttggtttgtggatctcgaactgagaaaagagttattgtattagggtgcagatattgatatcagagtagtgcgtgatggacgtggtccagattgtaatgtttggagcaatttcaaacaggttagtgtgagtgtgtgacttctattgttatgtttctttcgatatcactggttcttacatctgttaatacttatgcagtatggattaccaatgccagtagctttacttagaatggataataacgttcctccttggcgttcggggctaaaggaggtaatgctctatatctcagttctttcattattatctttggtatattgagtagagagatcactgagttatatcttatgtatcttttggtccagatctttgatgcaattatctgtgatccaccttacggagttcgagctggtggacgtaaatccggtggtaggaaaatccttagaggaacagtggatccttacactgtccctgatgacaaaagaacagatcacattccatccactggtgcatatagtctagtggagtgtgttcatgatctacttcatcttgctgcaagaatgctggtaatgaaaggcaggctcgtctttttcttcccggttttgagagatgagactggcagcgaggttaagtttccggagcacccgtgtttcaagttagtagctgtctctgaacagatcctgagctctcggtacagtcgggttctgttaacaatggtgaaagtagagccttatagtgaagaggttgaagaagctgctcgcttaatgcatttagagtttagagagaatcatcttaagtggttagaggacggtaatattcactcctctatattcaaacccattgattcttctcagattgacattgaatccaaagccttcaaagatccaaaacctaagtatagagggaagtatgtgtaagcaacgagttttgtgtgtttttttctttcttgttgtatgttgaacgatatcgtttttatctttcttgttgttccaatacaaatagggttactggcaaataattgtgttaacaagatacataaaaaggagatgagagactccaggaatagctacaaaaaatataacaatcaacattcgaaaatgtctaacaatataataacaagaagagacacattctcttgagacacacgccttcgctgagcagagaagaccaaaacgaaacaacaacgctccgattccgaagatggaccaacgaaaaaagaacaaagattagggttttttatgaatattttattaatgaaattaacgc

SEQ ID NO: 149162 - DNA, 1326 bp, Arabidopsis thaliana landsberg
ctctctctccctttcaatttctccttgtattttggatctttcttacttccgtacacacgaacccaaacaaacaacaaaaaactgttatctctctctttggtggaattcaaaaattgaattcgtggttgcgttttggtttttcttccttcttcgggtcacgagaacaatgggacaacaaaatttgatctacagcttcgtcgctcgtggtacggtgattctcgtcgagtatacagaattcaaaggaaatttcactgccgtcgctgctcagtgtctccaaaagcttccttcttcgaataacaagtttacatacaattgcgacggacacacgttcaattacctcgtcgagaatggcttcagtgagtctcttcttctcgatctctatatatgattctctctaagcttgaaactcgcgttacaataagtttcggtttaatcaatgtctatcttgatctctattttttttttttgcaatgatggaattcagaagttgcattgctatatctacttttggcaatgaagtaataatgctttgatggatctgataaaattgttgttatgcagcgtattgtgttgttgctgttgaatctgttgggaggcagattcctatggctttcttggagagagttaaggaagatttcaacaagagatatggtggtggtaaggctaccactgctcaagccaacagcttaaacagagagtttgggtactataagctctgccgttagaatgagaaaacaaaaatttctacgttaaatttctgtggatatgatttaaactttggttgtaccacaggtcgaaactgaaggagcacatgcagtactgtgtggatcatcctgacgagattagcaaacttgccaaagttaaggctcaggttactgaggtgaagggtgttatgatggagaacattgagaaggtctgaatcatttatacatgccaatctcacaattctgtgtcattactttcagtatatttgtcatatctggcttgaaccttctttgcccttaacgtagaagtgacacacttctgcgaaactgaatgactttcatgtaattcattctttggcaggtccttgaccgtggtgagaaaattgagcttctagttgacaaaactgagaaccttcgttcacaggtttactacttaccttttcactcatatttgtctgaatattatacgtgtatacatataagcgcataagcatgaaatggctttcccaggttcagacttttatattccaattcaaaaaatctacagggcacaagaatttcaaaaacaccaagggaaccaaaaaatttagaaagaaaaggatggggggtcttggaaaaacca

SEQ ID NO: 149163 - DNA, 2865 bp, Arabidopsis thaliana landsberg
cagatgaaaccaatgagattttcttggaagaatatatgtcttcccataagctgcatcaataacacaaaccagaagaagactacaacaacaaacccaccaaaggaaaaacttcttcttctctccaaacaaacctctgttccaagcagagtctacatgtccgatttcagcaattcaaccatctcactcaacgacttctcaaactctttcttcataaacattcacatattcacctacgaagagctcaaaacgatcacacaaggcttctcaaagtataatttcctcggtgaaggaggtttcggggaagtctacaaaggtttcgttgatgatagcctcaagactggtttgaaagatcagcctgttgctgttaaggctttgaaacgagaaggtggacaaggccatagagagtggctggtaatgatttcttctccatctgcatatcaatgaatcacatttcaagaattatatagcagcttatataagaatggaaccataaaactaatagtaaacgtttcttcgagattctgcaggctgaagttataatccttggtcagttgaagcatccacatctggtaaatttggtcggatactgctgtgaggatgatgagaggcttctagtatacgagtacatggaacgaggcaatctggaagaccatttatttcaaagtgagttggttaaaagaccaaaaccatacaaaaggtccaaaaatgattgttatagagatgcagattactaacaatatgagtactgtttggtgcaatgcagagtatggtggagccttgccttggttaacaagagtgaagattcttctaggtgctgcgaaaggccttgagttccttcacaaacaagagaaacctgtcatatacagagattttaagccttccaacatcctcttgagctcggtaattcgaatgcttcggtgcctattttgcatttccatatatctgttatcatgtcaaataacttaaaatctcaatatctaaaactttcaggacttcagctctaagctttcagatttcggcttagccacagatggatcagaggaagaagactcaaactttaccaaaagtgtaatgggcacagaaggatatgcagctccagaatacatctcagcaggttaaagaacataacaataaggctacttgtcataaagccggtgcattattagcttacatgttttcttggtgaatttcaggtaatctgacgacaatgagtgacgtgttcagttttggggtggtgcttttggagatgctaacagctagaaaggcagtggagaagtaccgggcacagagagggaggaacctagtggaatgggcaagacccatgttaaaggatcccaacaagcttgaacggatcatagacccgagtctcgaagggaaatactcggtagaaggcatcagaaaggcagctgctttggcttaccagtgcctgagccacaaccctaagtcacgaccaactatgaccactgtggttaaaaccctagagcctattctagacctcaaagatatccaaaacggaccgtttgtgtacattgttccagtagcaggtgtaagtgaagttcatgagatcaaatgtaaggatgatgtcaaagtcgtaaaagaggaaacagagaaggacgcaaaagtcttcccacgacaccgagcaggtcgaaggaacagacgtaaacacaaggcaatgaggtctcgtgcagtatattcagacactgctctatacaagagtctaggaaccagtttatataatccagccaactaaattgatgcacaaaaagcaaaattatttaatttttatacaggtatagtatagatattaggatacgttagtatacagggaatatacgaagaagttgtgttagagaaatgaagataccataaggtttcataaaattctgcacatgttgtgatagaaacgtagcttaaaaagtgagctacatagatatttagcaatcaattttcaattttgtaaccacagatgtataagtctgaattgtatgcgtgttcaaaagggacagtattacttggatttttttcaccacaaagattccacatcaaatcctaaattgactgtagttcaccaactaagaatttcagtggtaagcatgttattcctagtcaatgtttaagtatctgggtacatacgcaagcatgtttcaatttcagacaaaacagtttcacatgaagccaaagattagattacataccttggtcatgaagaaaaaagacttctcaatcttaccaaaccccactcaaaaagacgtgtaggaaaactcttctgtggttgctttcgtctcctcgaatttctatatggcctgattgacaaacgaacaataagaagcagccatttggtggatcagtctttttcaatggagacttcaatacctaacagattatgtcactaatgaaaactgaagcaattgagagaactttgatgaaccaaagtgattatccaattttgatgagatcagtaaaacattacagatctacatctactactggcactggcttacatcatcacttaatctagacacattcctgttagcttctaagttcaataggtagacaatgatgtggaatctactcagtatctcggattgattgattgattgagtaaaaaaaaaattctctaccattacacctaagattcttattaacagcttatattagtaacactaaaagacattccagaaaatcttcaaggcttgaatgccacactgaagcaagaagacttccaaataccaaaatatctccaattaaatcaacttcttctttcttttcctcctatgcttctttttgactactccgcttttagcatcctcatcagtttgatctcgtagccagtccgcatgatacttctcatcatacggaacaact

SEQ ID NO: 149164 - DNA, 490 bp, Arabidopsis thaliana landsberg
gctccgggagatattccgatcatttgaccagaacaaggatggaagtttgacggagctcgagttaggctcacttctaagatctctcggtctaaagccgagtcaagaccaactcgacacattgatccagaaagcagatcggaataacaacggactggtccagttctccgagttcgtcgccctcgtcgagccagatctggtcaagtgtccttacacggatgatcagcttaaagccatctttagaatgtttgaccgcgatggaaacggttacataacggcggcggagttagcccattagatggctaagctaggtcacgcgttgacgtcggaggagtgggcccacatcatcaaagaacgctgatccaggcgacagtgcatgtattgatgtgcgacagtttgttcaagcgattacagcagctgcgtttgatcatgccagcggcttgaaaaagacagggagatatacagagcgtgtccaatacatgtggatgatgcc

SEQ ID NO: 149165 - DNA, 3276 bp, Arabidopsis thaliana landsberg
tgcctttgcccgaagcatcgaacacgtcacgcgttacacttcacagtgccttcgcagaccatcaagctactagagcaaaggcaatcacttgttctcatattttttttaacgacacttgaggttatacgacgtcgttatagtttaagtaacaaaatcaaaatcaagtggtctttctctactcttcctaaccatcgcatggagttgctctcttcttcaccggctcagcttctgagaccaaatctcaggtctagggcgttgcttcctccacgaacatcaatcgcttcttctcatcctcctcctcctcgattcctggtaatgaattctcaatctcagcatcgtccatctatctcctgcgcttcgcctcctcccggagataacggttttccggcgattaccacggcttcacccatcgaatcaggttaacttctttaactatgtagcctgagaatgaaatctcatttcactattcatttcctgatttcttagtttttgttgatttcaatcagctcgaataggtgaagtgaagagagaaacaaaggaaacaaatgtatcagtgaagattaatttggatggtcatggagtttcagatagctccactggaatccctttccttgatcatatgttagatgtaactaaacctttctccgtatcaatttgattttctgggagttgaaaatttcctcatgtttgattatttttgacattggaaagagcttaaacacttatgagtcggttcattttatatatgttgtattgaaattttatcaagtgttgtttgtgattcttttgattagcaacttgcttcacatggcttgttcgatgtacacgtaagagctactggtgatactcacattgatgatcatcatactaatgaagatgttgctcttgccattggaactgtaagtagtgaagtgcctttcctttgtctatctagtgagttaatagagtagcattctttggaagtttgtagttttgattgctattttttgtttatgttaggctttgttaaaggcactcggggaacggaaagggattaatcgttttggcgattttacagctcctcttgatgaagcactcatacatgtttccctggtatgatacaatctgtaaacttgctgttttatctatctagtttggttgttcagtggtttggagtttccggaagcagttttggttgttgatggatgaaaatgtggcaggatctatctggtagaccatatcttggatacaacttagagattccaacgcagagagtaggaacatacgacactcaggttcttcacatttagtattttagtatccagtttttcggtttttctagtgttttctttgtttgttaaaatcactaaatgactcttttcccatttagttggtggaacacttcttccagtcattggtgaatacttctggtatgactcttcacatccgacaggtattaggattccaatctttcttaaagcatacgaggacaataacagaacgttaatgtttcatctgttgacaaacctttcttgataagatttgattcatttctatttattatgacagcttgctggtaaaaactcgcatcacataatagaagcgacctttaaggcctttgcaagagctctccgacaagcaacagagtctgatccacgccgcggtgggacaataccaaggtttgactttgacacacactacacatctcattcatcatccactatttatttgcaaagattcatgataacaaaatccaatttggaaagaagcaaattatggctggaaagattgtatgtgataagaaaacaagtctgacgctttagatttttgggcatttttgcagctcgaaaggagtcttgtcacgttcataagaggacttgatgagcatgggtcagttgtctgaatgtcttatgtacaatgtcaaacatgctggatctttgttcatttgcaaaggtcaatgtatctaatctagctaattgattattgttggtcaccaggatctttttgctctctctagttctagactttgttcaccttaagccagagctctttaatcaggagttactcgtaatcattttgttttggtcatgtgtgcaccatttacgagtgtcatgctcgtgattcatggagctttctctgtattgtttgtcatgttaaaaactggtcaatggtccatgctcgtcgtttcttttatgtgttgccctcttttgctcttgtacaatgaggcctatttgagagaaatgggctttataggcccattttgatgaagaaattaatactttaaaaaatcatttcttctcccgtctctttcgccattgtcgttgatgtctcgttccgccgcgagttccgttggctcaataaccggagaatcgccacagaagaaactgcttcaatcggcgtcttcttcttcttctctggcaatacttcatgacgaaatcgctgtgagttgcttcgcacgcgtcccgagatgttactacccggcgatttcactcgtctgcaggaacttcaggcgtttaatggcttcgccggagatctacatcgaacggtcagtaattcgtcgcactgaaaatatcctctatgttgcaattagatcagaagctacaaaaacccttagctggtacacactcaatctaaaaccctttggaacaatagagattagccatagattagttccggttccatcattcccttcaattcctggatatggaacaactattatctcgtccggttctgaaatttacgtcattggtggatgcattgacggagaattagtctctactgtgtctgtcatcgattgtagatctcacacttgtcgcttcctccctaacatgaaggagccacgtaaatgcgccgccgtgggattgatcgacgggaaattatatgttgtcggaggttgtaacgctccgtctttgagttgggtcgaggtattcaacttcaagaagcgaacttgggagtctgttttaagtctggataatgtggacatggatgagcaaatgaacttctttgtgatgaatgataagatctatagaataggtcagaatactatgtttgtttacgatccgaaaaagggtagattcgaggaagacttggcgttgggaagattatggttcaacgaatcttgccctatagataacgtgttgtacggcttttattgcatgaaccaaatacttgcgtacgatttagttgtggggatggggacagtcttctggggtcttgaagccttacctgaggggcttcaaagttgtacaggtagaatggtgaatcatggtggacgacttgcaattctgtttagaagtc

SEQ ID NO: 149166 - DNA, 1995 bp, Arabidopsis thaliana landsberg
agtagtattgagatgctgcactagtgtaaccaaggttaggacatggaaaagatgttcgaagcagataaaggagcaaagggctcgtctttacatcgtctggaaatgtgctgtctttcttctctcctcccatgattgatccatatacatatgatataatcaatcaccaaattcctttcttcttggttatgtattagttcagttccaaactaattaactagctatttaattaaacgtatataccataatgtaaattttaattgtaatcatcgaaaatatcgatacctactgtcatttggtcatcaatcggaagttctgttttgtaaatagagatactaataagaacaaaaaagaccacaatatggtgttgtcttcttgattggtgctaaaaacatttgccttaataaacaaaaagttcaaaaacgaggcgcgtggtttaaacttgctcttaacacgcgtggtgatcttgtagttctggtctttcagggtttaaaggcatatttctttctcacgctccggcgaaaaaccctaatttctgctaagatcaaatcaggaatggtgctcagaaacttaaccatttcttacgaaatcatcaaatctctgaaacatgccaaagaacatagtttagggattcaaatccgatggatctcgagcctgaaagtggtatggaagaaagacacgaggctagacgaagccatcgagcaggacaagcgttacaagctctgtgctcgggttgtgaaagaagtcctgaacgagccaggtcaagtcattcctctcagatacctcgaaaaacggcgcgagaggctacgtctcactttcaaagctaagagctttgttgaaatgaacccttccctgttcgagatctactacgatcggatcaaacccaagtccgatcccgtccaattcctccgccccacgcctcgtctcagagctttcctcgacgaagagcagaggatttactctgagaatgagcctttacttgtttccaagctctgcaaattgctgatgatggctaaagataaggttatcagtgcagataaactggttcatgtgaagagagatttcggatttccgaacgattttctgatgaaattggttcagaaataccctaattacttcaggctaaccggtttacctgaagaaggtaagtcctttcttgagctagtctcttggaaccctgatttcgccaaatcgaagattgagctgagagcagaagacgagacccttaaaaccggtgtccggattcgacccaattacaatgtgaaattgccgtctggttttttcctaaggaaggagatgagagagtggactagggattggttagagcaagactacatatcaccatatgaggatgtgtctcatttagaccaagcttctaaggaaatggagaaacgaactgttggtgttgtgcacgaattgctttctctgtcactgttgaaaagagtccctgtgcctacacttggcaagttctgcgatgagttccggttttcaaacgcgttctcgagtgttttcactcgtcattcaggtatattctacttgtcgttaaaaggagggatcaagactgcagtgttgagagaagcttataaagacgaggagctggttgatagagatcctttgcttgctattaaggataagttcctgaggttattagaggaaggatggcaagaaaggaaagatagactgaagctgcagagggaacaagttcagaaagacagggagatgatgttagcagcgaaaagcaatgaaccgatagagcgtctctgtgattaactttacaatcaagactctgtttatgtcctctgttttttctctaggcatagttcttggcctggtttggtctttaaggtggatggttaagtttgtaagtttttggctaataagagataaataatcaaatgttaatcacctctctcagttgcaatcttgaattcacttgttttctccatctcagggagttgattctagttaagaccggtttcagcgactaaatgttacata

SEQ ID NO: 149167 - DNA, 867 bp, Arabidopsis thaliana landsberg
acttcttcttcctcgcaactctttcactctgtttcacacacacattctcacatatatataacacaaactaactctaatcaccaaatcataaaccaaagcttctaaattcagtttcaatggcgatcattaaaccaaaccgagatctcaaaccggacggtgtcacagtcgtgactcgtgaagtctgggcggagaatctcgaatcagaatttgaattaatcagcgaaatcatcgacgattatccatttatctcaatggacacagaattccccggcgtgattttcaaatccgatctccggtttacgaatcccgacgatctttatactcttcttaaagctaacgttgacgctctcagcttaatccaagtcggtctcactctctctgatgttaacggtaacctcccagacctcggtgacgatctttaccgaggattcatctgggagtttaattttcgtgacttcgacgtggcgcgtgacgcacacgcgcctgattcgatcgagttgcttcgtcggcaagatatcgatttccagcggaatcgtcgcgacggtgttgagtcggagaggtttgcggagctgatgatgtcttcggggcttgtttgtaatgaggaagtgagctgggtgacgtttcatagcgcgtatgattttgggtacttgacgaagattctcacgcgccgagaattgcccggcgcgttgggggagtttaagcgcgtgatgagagtgttgttcaatgagcgtgagtatgctgcgaagcagataacgaaccagtgctacctatgcatagctgatgatttacaccactcaccgagtagatcccaccgcatcctctataagactcaggcttggtccttatattccctaacgatccctacca

SEQ ID NO: 149168 - DNA, 4148 bp, Arabidopsis thaliana landsberg; identical to SEQ ID NO: 6216

SEQ ID NO: 149169 - DNA, 747 bp, Arabidopsis thaliana landsberg; identical to SEQ ID NO: 308

SEQ ID NO: 149170 - DNA, 2150 bp, Arabidopsis thaliana landsberg
  unsure (1)..(2150): unsure at all n locations
gaacgaattttaatgtctgatttcactcctgaaaatgtgaactgaagaaagttaatgttgtgtgcttaatccggcagcttcgattggtttatatgttgattgcggttctatttatgaggcgccttatttccatnnnnnnnnnnnnnnnnnnnnnnnnnnnnnnnnnnngagcacgttgaacagaactcattttcgtcttgtgagggaaattgaggctattggaggcaacacatccgcttctgcgtctcgagagcaaatgagttacactattgatgctcttaagacctatgtccctgaaatggttgaagttcttattgacagtgttagaaaccctgctttcttggactgggaagtgaatgaagaggtacttcatgtcatgttgcatggaaattttagccttttccaaccccaaaaaactatttaanatagctaagcaatttttttacactgttttcatcatttttctcctggcagctccgaaaggtgaaagtagagataggagaattcgcaacgaatccaatgggttttcttttggaggcagttcattctgctggttactctggcgcattggcaaatccattgtatgcacctgaatctgcaattactggattgactggggaggtcttggagaattttgtttttgtaagaccgttaacacaagagattattgcattcgctggaactagtatcactggcttttggtttgttatttcgtagatgtgtcttttttctcattttgttctgaaatttcaggagaattacactgcttcacgaatggtcctagcagctagtggagttgatcatgaagaacttctaaaagtggttgagccattactatctgacctccctaatgtaccccgacctgcggagccaaagtctcaatatgtcggtggagatttccgtcaacatacgggtggagaggtacaaatatgacgtttcaatgggcttctttgagtaaaagaaggtttattattcctaatatctttctttttttgtttcaccattctcaggctacacattttgcgcttgcttttgaagtgccaggatggaataacgagaaggaagctatcattgcaactgttcttcaggtgcctgactcaaatacattacttgatctttcaaacgcaaagacttaattgtgtaaaatccaattcttatcagatgcttatgggaggaggtggctcattttctgcgggaggccctggaaaaggaatgcactcttggctctgtaagtctctgaatgtgttctctttctacttgcggtttttcaacactcatgttttaatgtaagttagttatttgttggtcatgatgatgatgagattggtttctttattgtctggatgcagatcttcgccttttgaaccaacatcagcagtttcaatcatgcactgcattcactagcgtctttaacaataccggattgtttggaatctatggttgcacggtgagtttgcaccgatttctagttgttgcttattaacggtttttagcactttgcaatgtgggtttgcttacattcttttggcgttgcagagtcctgaatttgcttcacagggaattgaattagtagctagtgaaatgaacgctgttgctgatggaaaaggttttctatatatttcatccattcttttttagaaccatttatcaactcatacaaacatattatttactctggtgtacatgctttggcagttaatcagaaacatcttgatcgcgccaaagcagcaacaaaatctgcgattctgatgaatctggaatctcgggtaggtcacttaaaagttccacctctttttcttaagccatgagggtgactttataatggaatttaactgtttgtgtgatttgcagatgattgcagcagaagacattggtagacagattcttacttacggagagaggtacatacactttgtaacattccacttctaaactgattataaccagacttttctctaactgtttttttttttgttttcccaacatatctgcaggaaaccagtagaccaattcttgaagacagtagaccaacttaccttaaaggacattgcagatttcactagcaaggttatcacaaagcctttgacaatggcaactttcggagacggtaatgacaaaaccatcatcacagttttacatattttataaaa

SEQ ID NO: 149171 - DNA, 2266 bp, Arabidopsis thaliana landsberg
  unsure (1)..(2266): unsure at all n locations
aaatagattcagaaacttgactctttatttattctctgtgcacaagcaggagacgaaatggctcgggttttctgggnnttcttcccnggcngggtgngggtcttggcttttttttggttctttgctcgcgggttgcgttctttttgtggttnttttcttgggcnttttgcagcttattctccctttcctggagctggatatcaaatactttgatcttggactgcctaaccgcgatttcactgatgatacggttgctatagagagtgctgaagctactttaaagtatgtcgtctttacattttatacttagatatcatattctccatgctttctgcttctagtgttgaggttgttctgtgaataaagcttgttcatggctattggtttcagaatatattgtctgccttaaagtttttttcttttcttttcttgtgtgaaggtataatgtggctattaagtgtgcgacgattactccgggtatgtattcttaaacctttgcaatttttaatttaaaagtgtgcttctttcacttactaacaacagtttttgctttcaacgacagatgaagctcgtgttagggagttcagcttaaagaaaatgtggaggagtcctaatggaactataaggaacattttaaacggtcagtttcttcgccaaaaaagggggcaattccttcttcaattcctaagctctaagatcatgttgttatttttatgcaggcacagttttcagggaacctatcatttgcagaaacatccctcgtcttgttccaggtttgtcaatggctgctctttttgtatgagttagccattttctgtacctttaacatgtagagcaaaacaaatccctctgatttcatttcctcaggatggacgaagccaatctgtattggaaggcatgcttttggtgatcagtatagagccactgatctcattgccaatgaaccaggaaaactgaaactagtttttggtaatctcctcctcccgttctggatctgtctaacccttcaattaaattgttcattatacagaataatgggggatcattgtcattgaattcacctacctgtggaagtttatttatacacgttaaaaatcatatcttacatatgcagagccaagtggatcttctcagaaaacagaattcgaagtcttcaatttcaccggtggaggtgttgctttagccatgtataacactgatgaggtagatattattgaaatagtcctctccttcatgtctgcactatctgaatacacttacagagtatctattgatatggtggtccgatttcatttttgaacagtctattcgtgcatttgctgagtcctcgatgtacacagcttaccagaaaaagtggccactttacctctccacaaaaaacaccatcctcaaaatatatgatggaaggtgtgaattcactggcctttatactttcttgttagagtctcaccgaaatcatttcaccatctagtcatactgccctgatattaccttttcatcttgttttcagattcaaggatatattccaagaagtttatgaagctaactggagatccaagtatgaagcagcagggatatggtgagatgtgcatgttattagcgacattctattacagtacaccatgcaaacttgtaaacaaagttaatgaaatccaggtatgagcatcgtttgatagatgatatggttgcatatgccatgaaaagtgaagggggttacgtctgggcatgcaagaattacgatggagatgtacagagcgatttcttagcccaaggtttttcctcttaaatttgagatctgtctagggactgaaaccttaattctgccaaatgcattttggtcttgtatcatggttctttgttctttacttgtgatctaaatggggacagaaacttcaattttatttctccttatgaaacaaagtttctgctctccgctgcaggatatggatctctgggaatgatgacttcggtgttggtatgaaatgacgcgggcctcagccaaagtttttggtctttatcatgataacatgtttcctgcgcatcattatattttatgtattaaatttgagatatattacaggtttgtccagatggaaagaccattgaagcagaagcagctcatggcacagttacacgccactacagagttcaccagaaaggtggtgaaacaagcaccaacagcatagcctctatttttgcttggtccagaggccttgcccacaggtaacgcatttccactgtctttaaacattttcatacttggtaa

SEQ ID NO: 149172 - DNA, 4065 bp, Arabidopsis thaliana landsberg
ttctcgctttaaaattgaaacatttttttttgcaattcttatggtatggttttaggttagcttacatgatatatgaggatcaggttcttgtgaatttgagttcaatttagtaaaggtgtagtttttcttgtagtttcttctttaggtggtttttggtgatgattgtgaggaccatataatttgactatgtatattgtctggtgagaatttgcaggtgaacttgagtattgctataataccaatgtcacaccagtttggatggagctcatctgtggctgggttggtccagtcttccttcttttggggttatgccttgagccagttgcctggaggttggctttccaagatttttggcggaaggtgtgtcttcttttttctaggctcttcccagttttgatttcagggcagttcatgattttgtatgcttgatgcagaaaagtgcttgagattggtgtctttacatggtctttcgctacagctcttgttccactccttgctggatttatgcccggtttaatcttttctcgaattttggtaagcatgtccatatgtttatgtcattatactgctttatgcaaatcattctagtttctttcgagtcatggtcttgttacaaattccctagtttattaagcttgtaaattaaaaagtcccatagacactcttaagctctttccttctctcccctaccctactctagccttacattatgtctttgtcttaacacagagatttgtaactccaggtgggaataggagaaggtgtttccccatcggctgcgacagaccttattgccaggcatgtattaatctggagcaaatttgtagagtgctcatactttaatcgaatataaatgatgtgtgtttaattgcttatgcagcattgtcttttaatttagctcatgatctagatatgataatctactaaatccataggttggtcttcaatagccgatgggcaacttcaagaactggacatttttttcttatgaaaacccttccttaactaaaactgaaattacatatgcatgtatttagtcgctttatgcttaaatatctggctgcacagattacattatagcttttagacccttctttcatatcctgattgcgccattcaattgctgggtacaggacaatacctgttaaggagcgctcaagagcggtaggctttgtttttggaggactgagtttggggagtgtaatggggtatgtttttcttattgtgatacttaaactatagaagttacaagtatgtggtttttatttatcaatgtttatgatttggttaataatctaatgaagacgaatggacagcttcgagacttgcacagacctaacattatcatgtctgcaggcttctcttggctcctcccatcatcgaaacctttaattgggaatctgtcttttacttgtttggtctccttggtgttggctggtaagtctcatcgattactgactaaagactttcacaacattgttattctgactatacttctttatcaaatattgatggctcaatttatttatttcatcattcataccaagatgccaacatgctattttagtatttctgtattctcagtttttcccctatatgttgaaggttcgtcgggtttcagtttcttaatgaagaagaagtttcatataaaggtggtttctccttctttttgcttattcaaactttatttaatcgtgaatataattgtgaaaccagggagcttagatgtcacataagtgtatttattacgcatttacttactgtgtcgttttgtctatgatttatattgtgaaagccatcctagttgtttctttttataatatgtgaaacagaagtgtaacagatgagaattacttgtaaatccttctctaacccactattaagttcgtaccatcttgaactgaagcatatactgtattgggagtgaagcaattcttttaatgtacacttagctagataatcttttgttgtctgtttattggccaactattataactaatactccactcagttatttggaccttggacttgaacaccatttacaatcaggattgccctttctttgtaggtaatgagatctctacttcgcataaatcagaaaacgctacaaaggaagagttggggagctcattgaaggttggttatctattactttgtctgtctggctacgttcttttatttcatttctagttgtagttgtcccctaaaatggtgccaaaatggccaataaataagcaaatggttttgaaaaaccaaaaccttatagtttggttgaagtcaatgcttcaattttttgggtatcttactacaggaaattccatggaagtcatttttccaaagcccggctgtttgggcaatgatatacactcacttttgtggaagttggggtcactatacctgtttatcttggctaccaacttatttcaggtaattgtggggtctactgttcaccatgttaaattttactgggcaatgcttaagctgctctatctgttgaaaagctatatatctgtagactgaaattctaatatctattagcttaatttgtacaagaggtgttctcatttgatataaaatcccggggccatggtttagatgaaagtacttttaaattgttctctaaatatacatttatggttataccagtattccgtctctttcattctgtatctttgttgatgacgaaagtaattctgatcatatttccggtatacagtgaggctctgagtctaaatttgacagaagctgcttgggtaagtataaaactgcttttatcttgtgttttccctggaatattgaaaaatcagttcagcttgcattttgcaaaggtataacattttgggatttaatatgtggatgtgaagatcaggtttccatccttcctccactggcttcgattgtcgtgacaagtcttgcttcacaatttgctgattacttaattacaaatggagttgagactaccacggtataaaatcacatatcttttccctgtatgtagccttgtataacaaaccaaaagggtcttcacttgaagggctcttgcagatcggttattctatactcaatttagcaaattctttttttattcccttttctcattttgcacatatggttacccagatatctagatcaacctgtcgtcactttgatatgtaaactccttgggaatttgccatgtaggtccgaaagatttgtcaaacgattgcgtttgtggcaccagcgatctgcatgacactttcatctgtggacattggattgccaccatgggaaattgtaggaattttgacagcaggcttggccttatcaagttttgctttatcaggtacctggagatgttctacttctctatcttctgtcaaaagtcttcaagtaacttcatataaagaaaatgcacccgaaggagtttattgtaatggattgagaaacactatgttcctttttcgaggacttcattgtactcatcaggacatttcacccggatatgcaagcatactattggtccttctcatatgaaccttgctagatgctaatgagctatgatataatatatgtgtatgaagaactagcttccctctaaacttgttgtggaatatttatgtatttcagggtattacaaacacagtgggggcagtacctggaattgtaggagtggccctaactggttttctcctagactcaacccattcctggactgtaagttgctagctttacctttaatgatgatcagtccctaattgattagttaactcaaaggttctgatcaccgtgtagatgtctctattcgtgccatcaatattcttctacttgacggggacggttgtatggttggcatttgcaagcagtgagcctcagacgttcacaaaggaagactcataagttttgttattgaggcacaaaaacatggagaaacttttattattgtataggtaaaaaagaaatggtaaaaaattttctgttgtgaaagcaaaaacaaagagcagtggtaattttgttcactgccttatcctggtttttgcatagatgcaaattaaactcagtgttaatgggtataaggtggagtattga

SEQ ID NO: 149173 - DNA, 753 bp, Arabidopsis thaliana landsberg
accttaccaattcgtgcaagaagatctccagaacaagagccaaaccctgctccggtataacccggttcacaagaagatcccggttcttgtccacaacggtaaacccatctctgaatcactgtttatcattgaatacatcgacgaaacgttgagacacggtccacatattttgccacaagacccttatagaagatctaaagtccggttttgggctaactacatccaattacatgtgagtaaatctgataaaccctaactttttaattcaagtttttaactttactgaatttttattgtgcagctttacgatgtggtgataaaagtggtgaaaagcgaaggagaagagcaagagaaagctctcacagaagtaaaggagaagctgagcgttatagagaaagaagggcttaaggagattttctctgacactgatggtgaaccaactgtgacgaacgagaccatgagcctcgtagacattgtgatgtgcactttgcttagcccttacaaggcacacgaagaagttttgggtctgaaaattattgacccagagatagttcctggtgtctacgggtggatcaatgctataaacgaaaccagagtggtcaaagatctaagtcctccttatgaacgaatcctagagattcttcgggctttcagacagatgtctctctctcccgttcatgcaactgatcagtcagcactcttaagatttagattgagtgatgcaaagataatagagtaatgagctctgtcctc

SEQ ID NO: 149174 - DNA, 612 bp, Arabidopsis thaliana landsberg
  unsure (1)..(612): unsure at all n locations
cagactttgatttaaagctttttcaaagagtaaaacatgtctgcaaacgagttacctgcttcagctcaatccttgcaagaacaattccttggcagttttgtcactagaaagcttcttctgcacgacccatttgaccacaactctcttcgagtatttgcggttgcaccatctcctctcataacacatgagaacaacctcaaagggaatgttctgatgcttctctcagttctcatctgtggcatcatctgttgccttgggttacattacatcattcgctgtgcattcagacnnnnnnnnnnnnnnnnnnnnnnnnnnnnnnnnnnnnnnnnnnnnnnnnnnnnnnnnnnnnnnnnnnnnngaatcaagaagaaagctctgaggatgttcccagtcgtgagttactcacgtgagatgaacttgcccgggattggtgaagagtgtgtcatttgtttgtcggattttgtttctggtgaacagctcaggctgctccccaagtgcaatcatgggttccatgttcgttgcatagacaagcggcttcaacatcatttgacatgtccgaaatgcaaacactgtctggttgagacatgtcaaaagatattaggtgacttcagt

SEQ ID NO: 149175 - DNA, 2478 bp, Arabidopsis thaliana landsberg
gagctgcaagtaactctaatttgagtgatgataaaaagaaacgaaggaaaaaccctaagcctcggcacttaagttcgtatgggaagcgtaataacactccagttcaaccctcaggtaaaaacatgtttcacacaagttatttttcatttacactatttttcagtttctcacacattatattgcaacaattttttcattagaaactgaaaccaagagccaaggcaaaagagtttgcttcaacaactctgatgtaagacagatgaagcaaaacacttcttctagagaaaatcagtttggcataaaagaaactgtcttggagaatttccccaacgtcactcctcagtttatgtcagaccaaatcaatggccatcaagataaacctgagaaggcgaagaagaatccggaaagctatggtttagggcttgagcaatgtgtgaagatcataagaaagcttgagtgttcaggttatgttgagagcacttttagacaaaagtttttgacttggtttagcctacgagctacgagtcaggagagaaatactgtcacgacattcatgaatgctttcaatgatgattcaatggctctggctgagcagctcgttgacacattctctgattgtatatggagcaagggttctgtgattggcgatcgcgatggaggtggcagtagtggtgtctcatgtaagaagccgcgacattgattagaagagattatgtaggcattctttgcagttttagtcttttttttattttttctttgggatcacgtaaaaagaattcaacttttttttttaatcttcattagcattttcatggacatcacaatttggtgctggatatggattttctctttttctagtgtgttggattttttttcttccccgattgttgaaagttcaagataataaccatatcaaaacaagctatttgtaaagaaggatttcttaccaaaatatccctcgcagattggctataactagctaatgagttgtgaaaggaaaaacaatcctcgcaaatcagtcctttcaaactaaagaaactcacaaagctctttcaaaatttgcaaaagtgttaattagcaaatctcttgcaaattttgactagcaaatccccatgaatattgtgaaggatttacgacttttatataatttcaatttctttttaaaagagtttggttttggatttggatgagtttagaattgatcggttgctttatcaaaattgtgttgatcatctttagaatcttggaaaatgttataaaaaattattaacgaggttttgaaaattatgttgctatctttattacgccacataaatatcaaaatgtgcgatgtcgagtataccaatgcccaatttcacatttagcatatatacaaatagtataatatttgtataatgttacatatactacaattttcaaaaaatgatacataatttaatttataatacacaacgagtcacgacgaagatattgctctgcacgactccaacgaactagctagagtaaaaaacgttgctaagtcttacgtggcatctcccgcccaacaattcagcaaagttagttattgaatgctgtttagttattctcagtaatgcgatagacccaacgaaactatagacgaccactaataataatacacgtaagcaaaaatcgagccactaaacaatcacgtgaagaaacacggatacattgagtgcaccgttacgtacacaatcaagccaattataaatgatttaatttaattgtctgttcactccccaagatagatctatccaagagagacacacattcgctgcttttgactcacttttttaatctttttggattttggtgaaaaagtttaatttgtctctttctctatttatctccggcgtcaatttcacggcggctacacgacggttatcgatgtcattgactgtaccggaattcgatttcagagtaattcttctctctttatctatcattctctctcactgcttcacgaaatctctcttaagcttcatttgttgtgtttgcttcttttatagttgacgccacagtttggtttctcacagtcaccgatcgggtgagttttctcgtcatttaaaggttttttgttctccgattagattcgatttttactctgtgtatccatcagggagcgtaatttcgcgcatgttgataatctggagacctgtattaagtatttgaatcagagcttagtcacctatggattctctgcttcgcttgacctcttcgctaccgatcctgtgcgttttaatcattctctaattgttttttttcgtttatcgatttgtttgatgaagctgattcgatgaacttgtattaggtttcgattgctagaacttgcaattgcgtatacgctttgattcaacacaggcaacgagatgtggaatttagagaatctgctaatgatcagagacaccggtgactattttgttttttttatctgaatgttgatttttctatgtgcattct

SEQ ID NO: 149176 - DNA, 1259 bp, Arabidopsis thaliana landsberg
ttggggccatctcgcatcactaataatatccccaaaatacccttctatgttaaaaacggcacttcgtatataaacaaaaactctttctgctccgtttctcacaagcgaaaagaaaaaagttaaacgaagaagacgaaagagagaaaattttaggtttttgatttttcaatggcgacgacgacgggacacgagagatcaaagactcttatcaatttctcgttaccgaagttgtgggggactcaacgacttctgcggtgtgggaagggtgatgattctgacggtgacggtggtgaaggttctagctccggcggtgatcaacgaatccgtcgccgttcttcgaatttcgaatccgatcatcagaatcgacgattaaaggctgaatcatcggagaaagaaggaatcgaagagtttagagagaagattatgttagatcttagaaacgttgctgataagatgaaggaatctatatttaggcaacaagtacttctcggcgaagaagaagaagataaggagattgagattgagagggatgattctccgccggaagcgacgggagcggcgacggtggaggtacggccgtggaatttgagaaagagaagagctgcttgtaaagcttcgatttctttaggaattgattcgaaaaatcagtgtaaggaatcagtgatgaatccgtcgatgttaggaaacgaattggggaaagataggtcgagattgttgtatacgttgtcgaagaaggagattgaagaagattatatgatgatgatagggttaaaaccaccgcgtaggcctaagaaacgatcaagaactgttcaaaaacagatcgatgtaagtcgaaaacttcgcagctttttttttgttgttgttgagattttgtttggttaaagtgttctgattttggtttgtttacagttgttgaattttgcttcttatataactgaaatcactgaagatctttataatgttcctgaccaagctgagaagagaaaggtatgatcttggttttatattgttaagtgaattcatgtgtggttgctaaattttggttactgattctgcagagttgatgatgataatgatggattggagttagaatgtgagatcaaattatagtcttgaagtttgtgaattgctcagttttgcttctttgttagttcgaatgttcattggctgagaataacctgtacaaagatatgggacaaaagtagttctgtttcattggaacttcttcattggaacatactctttttgatttttcagtt

SEQ ID NO: 149177 - DNA, 1595 bp, Arabidopsis thaliana landsberg
tgtttttttttccaccttgctggatgaagttgctggatattgcttgagatcgtcatctgaccttttaattcatagtcctgagtactttgctacttggcgtatttattttatctggttggccatttttgtcctgaaaagcttcaggatttaaggaaaacagagactttgtatagtagggtttgtcctacttattggagctgatggtgtaataatacatataatagcagaagactgcgtcatcaaatctattatcaatgtcagaaggtgatttggccgtcatgaaaccagaggtaaaatttcatccctgtccttttgctagactatcttagttagctacttcacctctaatggaaaaggaccaataaattcatatgccttaactagtaacgtttaagggttgaatttagtttttgaaaaaatgagttcattttatccaaaatcaccttttgattgatgattctttacaatttagtgtttgactcatgattaactttattctcatcttcgcaattcacgtgagctagttattaatttttctactgatgtatgattttatatgaaagactaaatttctctcgcggtgtcatggatatagaccatgaagtcctacatctggcttcaaactgctgatggttcaatccagcaagtggaacaagaggttgcaatgttctgtcccatgatttgtcaagaggtaatacagaagggtgttggatcctctaaaaatcatgcaatatcgcttccacaacgagttaatccagctatgttcagcttgattcttgattactgcagatttcatcaactgccaggacgttcaaataaggtttgtttgaattagaagtaaatattttcatttccataccccgtctggcctctttcattacatctattttccactctgtaggaacgaaaaacttatgatgaaagattcatccgaatggacacaaagaggctctgtgagttgacctctgccgctgacagtttgcagctgaaacctttggttgatcttactagtcgcgcacttgcaagaatcattgaaggaaaaaaccctgaggagatacgagaaatatttcatttgcctgatgaccttactgaggtatgcgctattaaatattgagatgtgtcttctccatctgcttcgtttcttgactgctctttgattgtttatctaggaggagaaattagagcctgtgaatgattcaatgaatgatcctcggattctactaatcaatagattatatgcagagaaaataaaggatctgaaataaagggagagattaaaggtctgtaacagcactatcaattttgcttgggtagatattgtaatttggagctctatcaatcaagtataagggtaactctgtttgtaacattgtattgtttcataaacatatggagctggggttttacatgtgttataatgtttaggttgaaggctaaatggacgtacgttctgtggatgacctgttatcattaaagatcggcagaggctctctcctttgaccagactctggttttctacagcacaaaacctttccaggttctgtctcttcgaagactgctctgagacatgtccaattatcactgtagtactgtac

SEQ ID NO: 149178 - DNA, 1946 bp, Arabidopsis thaliana landsberg
acgatttgttctgtaattcttcaattccacggcgttctttctgcttcctggagatctaacgttggtgaattcggattggagccgagagattgcctataagaatcgtcctttgttcggatcttctaatttatagatttgtgttgtctgctttctcgctcaaatctatatgatctttagggagtaattttctcgatggctgttcgaatttttcgagaatagatccaaagaaggtattttgcttttcgatcttacattctttctgcgcaatttaagttttgttcatcttgaaagctagcattgatgtgctaggtttcgtcgggaattttagggtttaggaaagtgttgttctttaattggaaataattttttcacaagtttagtagaaattcaatttctgttgtttaatctgcagaaggcaacatgtttgtctgtttagcttgagtttaagaactttgaccagtgttttggatagtttaattttctgtgtcaaggtttaaagttcaaagttcttgcttttcgtcttcgtatgctctgcatgtgagtgaatgctttggctttttcctcctttgaagttgttttcttggtcttgcagctcgtgctttggtgcaactagacaggccacatcccacgttttgatttcttaggttcactgtaaagaataatcaggagagtacacagatggattaccgaccttctgatagtagtggtgagtcttatgtgctttttcagttagaagcattcgttccttctctaagtttattttacttccgtatttgtttccgtgtgttttgtgatatgtttttttatgcgggaactcaggtacagatgatgacctgcctccatctcatcaaggtagatatcaaagaaacgccagacctaccgggaatggaaggccttcagttctcaattctgctcctttatcacgggtgcacaatgaaatggaaactcaaattcatctcattgagcaagaagcttatagctcgatactccgcgcatttaaagcccagtccgatgctattacctgggtactattttgcttgtcttcttcattagtttagtacatgtttatgtaacttcacaagcttaccttttgtcctttttttattcttgttccttcggctggaaaaaaaatattcaggagaaagaaagtttgatcactgaactcagaaaagaacttcgagtgtctgatgaggaacacagagagctgttatcaagggttaacgctgatgaaatgatcaggcgaataaggtctgttggatatgtaattgatcactgataaatctctgcaatcaatcaaaagtaagccaacaaggttaatttaaatcatgtcagggaatggagaaaggcaaacagccttcagtctagtgttcctcagctggttcatgatgctccgagtccggctgtatcaggatcacgtaagaagcaaaagacatcacaatcaatcgcctcattagcgatgggcccaccatctccttctttgcacccttcaatgcaaccatcgtcatctgcactaagaaggggaggtcctccaccaggtccaaagaccaagaagccaaagacagtaagtcatgatgctgcttgattctaattgttggtaccgtcaatcttgttcttatattcttcattgactaaggtataagaatatttcattctttgtgctcgatgaagtcgatgcagtacccatctacaggcattgctggaaggccccaggctggcgctttaacaaatgaaccaggtgaatcgggatcatatgacccgttggttggaaggaaggtatggacgaagtggcctgatgacaaccaatactacgaagctgttataactgactacaaccctgttgaggtatcttatctttcattgctatatattagtgttttagtgccaaatctccgttttctgatatcaaatatttccctttttcaacctttattaaggggcgtcatgct

SEQ ID NO: 149179 - DNA, 1231 bp, Arabidopsis thaliana landsberg
  unsure (1)..(1231): unsure at all n locations
tcttcctcaaaaggggtttctcagcttcagcctaagtctggtttccacaccttctcgtcgagacccacttcgaaaaactttggcttatcccagattcttccctctaatggggtttctcagcttcaacctaagaccagtttccacagctttttgtcgagacccacttcgaaaaatgtgggattatcccagattttacccagtcctaagctcgtacctggtttgcagaattgtggtgtagccttggttaagccccgtgttaatatgaactttgtatcggcgtttagattgttttcgagctctggatttcgaaaagttgatgggaatttcgctagaaaggttgttgacaagccaatcaaagctgttagttcgacttttgctagataccgaatggctttagggttgcacgttgatgcattttggaagaagaataaccttttggtgtttggagcaggagctgtttttgtttgtattttcttgtggagggtcatgtttggaatcgctagcacattcgttggtctctctgagggaatggccnnnnnnnnnnnnnnnnnnnnnnnnnnnnnnnnnnnnnnatttgctgtaagttttagcttctctctatacttatttctgataactttgagatacaacttaggattgattcagtagtgggtctctgaactcagagctatgacatagtttctgtgtggatcttttccgtggaaaactgtattgttttgttaatctttatagtcttcaacttttcatcaaaaattgcaaatactgttgttaactttggtttgttgtcataacattcccattctcttatgttatagagttatcactgctcacagcaatattctgtgaattttccattaatagggtttataccttcgcgcaaggttcacgatcaatcccgataaagtttacaggatcactatgaggaagctcaatacagcggctgatgttcttgaagttatgggtgctcctctagcaggatcagatttgcgtgcttatgtgatgtcaggtggtggaataacattcaaaaaattcaagccaacaattaggaacaagcgttgcttcctcctattcccggttcaaggttctgagcgaaagggacttgttagtgtcgaagtcaagaagaagaaaggccaggtatttactttctctactttccctatagatgaagaacattcttcttagattgatcattgatcacattactatcatgatgattgtaagtaatcggttt

SEQ ID NO: 149180 - DNA, 848 bp, Arabidopsis thaliana landsberg
caagcctaagtaaaggaaatgatggcgtagaagaaggcatcggtgagaagacagattgtgagaccggctttggttgtgctgattatacaggtcatggtggtgacgctggccttgatgtaaatgattatagaggtcatggtggtgagtccatatttgatacagatgatattggtggtgttgagatcaaagttcatggagacgatattggtggtggtgagaaagctgttggtgagagtggtggtgagcagttaaggactggtcatgggatgatatagcaagcagcggctgtaaaccgcatagatggttgtgagaatgttggagatgttgttggtgagactaagtcaggttttgggaatagggttgatgaggagccggctgttgggaagagtattgatgaggagccggctgttgggaagagtattgatgaggagcaagctgttgggaagagtgttgatgaggagcaggctggtggagagaagagtcttgatgaggagccatctgttgggaagagtattgatgaggagcaagctgttgggaagagtgttgatgaggagcaggctggtgtagagaagagtcttgatgggacagatggaaacatgagtgttgatgaggagcagactggtggagagaagagtcaagatgggacaggtgatgaagttagagaaaggccaagattgataaggacgaagatggttcataagaagaaatgtgtgttgcaaccgcgaaggcaactgaaaaaatcaattcatgtcagttcgccatttactgaagaaaaggcaaaaaaagaaaaaaagaaagagaaggagaaggcaaaggcgaaggagaaggagaagattgattttttctaa

SEQ ID NO: 149181 - DNA, 1552 bp, Arabidopsis thaliana landsberg
cgagttcacctacgcttgaaccgcacaaatcccctctcgtgtgatcatgaactcgcaagaactcccaggcaaataaggtgaaaacactatgtcaagccgtctcttagcacttctggacacagaacttgaacaactctcgtccttttcacttctatctttaacaatactaccatcacttcgtgaaataaaaaatctggaattcacacaattagcccaagccaagcctaaagaaggaacaactcgtcttccagacgaatacaaatacctcaaattcccaatcctcagcccacttaacccatcagaagtttcaaccaaatccgtaacctgattcgtaatcacaatagccaaatcaaacttgctagccaactgcttcaatttcccagatatcttgaaaaacaaagaagatctcttcttaagatcagacggagtattatcaaactccgatctaaacaatgccgctacagaatcaagcacaatcaacttcaacggaaacctagttttcgaattcccaacaaacccatctatcctaggcattatgtcgaacaggtggtctacagaatggacattttgtacaaacacatgatcacaaggattatcattgtaattcgcgtaaatactagggtttgattgatgaaacgtgtgcgagagctgatggagacgacgaaacggaaatgggaactctgaatggagataaagagaagaaccgttgagtccgccgtgtgaaatcggaagttgggtacagagcgaaagctgaaggcagagctgtgtctttccgcagccactctccgcaacgatttcggttaaagaatcgcaggaaattccgccgcgaagacatccgtcgaggatttcacagcctgtggttagtttacgattcgtcggcgatcgtcggaggagattctccggcttaattttcccattttgcatttcaccgccaaaagctaccaattaaaaaaaaatcgcaaaagttataagcgctacaaaatttaaaaagacctaatcgcgttaaacgacatcgttttatcatattattgggcttcttaccttgacattaggcccaataagttaagaataaacgtctactattgggcttattttcaaaccatcgcattaggtccatgcaggtaggatacgagtaatgaaacaaacgacgtcgttttcgaaagaaacaacgaagatctcatttctctttctccttttcttctccgacgattcttctcagttctcagatctgatcgatttcttcatcagatgtttcaatctaaccattgagattgaatagtcaccattagtagaagcttcgagatcaatttcgaatcgggatcatgtcgtgtttagccctagctctgcaaccagcaaatggatccgacattttgctccaaactagagaatggtttccaccagccagagccttaatcgctctctcgtattttcgtcaaatgcgtcaagcattagcgtcctcgaagcagcagcatcagcaacaatcgaatcagaaacagaatcaaagctcttcttcttcttcttcttcttcctcccgtgcggatcctgacgatgc

SEQ ID NO: 149182 - DNA, 1813 bp, Arabidopsis thaliana landsberg
tgtttatgctatttatacggggcggtaatctggtgtgggtatgtggtaggttgcgagtaagactaatgactctgctggtgatgggacaaccactgcgtctatccttgctcgggagataatcaaacatggattgttgagcgtcacttctggtgcgaatcccgtttcactcaagaggggaattgataagactgttcaaggtctgatcgaagagcttcagaagaaagctaggcccgtgaaaggtcgtgatgacatcagaggtactaactttgcagtgaccttccttgtgatgcagttatgtttgatttcttttactgatcaatctgttctatttttttttttccagctgtggcttctatctctgctggaaatgatgaccttatagggtcaatgattgctgatgccatcgacaaagttggacctgatggtgttttgtccattgaatcttcatcttcttttgagaccacggtcgaagttgaagaagggatggaggtatgagtttttttgtcttgcttctcttcaactgtaattttattcaccattcattgccaatgactaacttgattatttacagattgacagaggttacatctcgcctcagtttgttacaaaccctgagaaactactagctgagtttgagaatgctagggtgttgatcactgatcagaagatcactgcgatcaaagacatcatccctattttggagaagaccactcagcttcgtgctccgttgttgattattgcagaggatgttactggtgaagccttagctacccttgtcgtgaacaagcttcgtggtgtcctcaatgttgttgccgttaaagcgccaggatttggagaaagaagaaaagccatgcttcaagatattgcaatcttgacaggtatatgcagatttcgcgtgcgtttagtacttttactttctctctgttatggtctaaactttttatcattttgtatgtttttcaggagctgagtacctagccatggacatgagcttactggttgaaaacgcaaccatagatcaattgggtattgcccgaaaagtcacgattagcaaagattcgactaccctcattgcagatgcagcttccaaggacgaattacaagctcggattgctcagctgaagaaagaactattcgagactgattctgtgtatgactccgagaagctcgctgagagaattgcgaagctatctggaggtgttgctgtcattaaagtcggagcagcaactgaaactgagcttgaggaccgtaagcttcgtatcgaggatgcaaagaacgcaacatttgctgctatcgaggaaggcatagttccaggtggtggtgctgcttatatccatcttttagatgagataccgagaatcaagaagaatctaatggaagattcatacgaacaaataggtgcagatattgtagcaatggtatgaaaacttaatgccaaaacaaaacatgttttcttaaccatactggattcgtaaagtaaccttttaagagtgaaaaatcactttaatttttttgtttgcaggcactcactgcacctgcaatggccatagcaaccaatgctggtgttgatggatcagttgtggtgcagaaaaccagagaactcgaatggagaagtggttacaacgcaatgtctggaaagtatgaggatcttctaaacgctggaatcgcagatccttgtcgggtttcaagattcgcccttcaaaacgcagtttccgttgccggcattattctcacaactcaagcagtactcgtggagaagatcaagcaacctaaacctgctgttcctcaagttcctggcatacccacatcataa

SEQ ID NO: 149183 - DNA, 1354 bp, Arabidopsis thaliana landsberg
  unsure (1)..(1354): unsure at all n locations
ctcgattaatgtctttcctctagaatgctnntggtaaatgacaatgtgaatctgtgtattagactctctggtctgaaaagcaacactttgttccattgattatagcctgatgtggtcgtgaattgtgctgctctgtctgtcccacgagcttgcgagcaagatccagattccgccatgtccatcaacgtacctacttctcttgtaaactggttatcaagttttgagactaacaaaaccttgttgattcatctctctactgatcaaggttagttgccaattgcattagccactgttatagtgttaatctcatcatgagtcatgacttatgcttttgcacttggttttcatgtctcaatttcagtttatcaaggtgtcaagtctttctacaaggaagaagatgagactgttgcagtcaacgtttatgggaaatcaaaagttgcagcagagcttctcatcaaggataagtgtcaaagctttgcaatattgagaagtagtatcatctttggtcctcaaactgtatcacctctccccaagactctcccaattcaggtgcttcttaacacaatttctcagagatatatatacacacttgagttcattgagttagccatgaaactggtcgtcttttatgttttagtggattgatagctccttaaagaaaggggacacggtagacttcttccatgacgagtttcgttgccccatttacgttaaggatcttgtgaatatcactttcaaattaatagacagatgggtctctggtagattcttttttactgagtttcattctctcgctctgcatcattgtacataaaatgtagaatcataacaacatgttgttgctgctttcagatgataaacagatgcggctagttctgaatgctggtggacccgagaggctatctcgtgttcaaatggctcaaatggttgcagaagtcagaggatacgacctgtccttgattaaacatgtgtctgcatcatcggtatgtatgaggctttcacaaatgaatctcacttgttgaatattgcagatcagtcacttaatgagtctcagctattttgtcagattgatcgtggcgtagtgtcaccagcagatatatctatggacataactaaactgattcatacacttgagctctctccaacttctttcaaggaaggtgttaggttaacgcttgactctgaatctcattctcatatgctcccatgatagtattcccttatgtgctcttctttaccactctgcttctttctatggagaaaaatctcggtttgagaaaaccaatgtaaaacggttgatatggtttcggaattaaggtttggttttcaatcaataattgtgggattgaaacgg

SEQ ID NO: 149184 - DNA, 3068 bp, Arabidopsis thaliana landsberg
ctcgatgaagattctatgatatcaaagctccactatgaaggccaagcagtttgcatgtttggaatatttgatggttagattctatgtttccttccttttcttttggtatagacgaatacgaagtgttagtgtgacttggggaaggtatttgatctgttttgaagcctagttttcaactttccttattactattgtattatcgcaatgtaaacatggctgagctaaaacacagtccagcttcatttgcagaatgacagttaagaaagatctagaattaccttagttagagtccgtatttgtacatacttatttaggaaattaaaggttgcagtgcacttgaactagcaatatgcgttcatataatactcagaaacagaatcatagattgttgacttgatctctatttttcctcttctaatatctgaagctttaatcatcacaggccatggtggttcacgtgctgctgaatacctgaaggaacacctgtttaacaatctcatgaagcatccacaatttttgacagacaccaagctggcattaagtgcgtctatatctcttgacataagatcttgttataatctaagaagtatgaagctcataagtcatctggtttccttcttacgttggttaatttggcagatgaaacatataaacaaactgatgtagcattcctcgagtccgaaaaggatacttacagagatgatggctccacagcatctgctgctgtgttggtggggaaccatttgtatgttgcaaatgttggagactcgaggacaatagtttctaaagctgggaaaggtcagtatgtcgttgtgatctaatacaatgtggcatatcatttaaagataaaatcgagagcttcaaaatgagtttaggaattggagttatactatccttatagaacattgaaatttagttaatagtgaatggattcttatgattggtcacaaacctttgttgtgttctttccataaggactcttttcaaacttcgtgctttatgttttgcagcgatcgcgctatctgatgaccataagccaaatagaagcgatgaaagaaagagaattgaaagtgctggtggtgttatcatgtgggcaggtaatctgatctataagaaattgtccctcgtttgtgtccccctaattggttgcttgcttctaaacatgacaaagtgagatcgcagatttccctcttgagttagattactagcttcattattgatttactcaaaatgcttgatatctccttcgcgaaattgaatatgacactattattgttggtttttttgtttctccttatttagatggaacagtgacacacataccatcttatctaggcattctatttgtcgggttagggttattcatgctttaaacattcagtgtcagggaaaaactagatttcctgaggcatgcccattaagcatccttctctaaatttttctttcagccctagacttgataataatatcatcttgatttttacttgtcaggaacatggagagtaggtggggtgttggctatgtcccgggcctttggtaacagaatgctgaagcaattcgttgttgctgaacccgagatacaagtaaccgcttctaactgcaacttactgtttttgtccaagggtgtcatgttgttctcatcatctgtagtatcacccatgtgaaatctccgagttttaagtttttgtgaacatgcttctgtgcttatttttcaggatctagagatagatcatgaggccgagttgcttgtgcttgcaagtgacggtttatgggatgtggtaccaaatgaggtatgactcaaataaattcacccccttgtatctgtttctgaatggtttgagggatttaaatatttgattttctacatctgattcaggatgcggtagcccttgctcagagcgaggaagagcccgaggcagctgcccgcaagttaactgacactgccttcagccgtggcagtgcagacaacatcacgtgcattgttgttaaattccgtcatgataagacagaatctcctaaaatcgaaacaaacgccatggctgaatcggaacctgaaatgaaccccacaactgaactggaacccgaatcaaaccccagtactgaaatggaaactgaatcaatccccaaagctgaactggaatccgaacctgatgctatacctgatccaaaacctgaaaccgaaccagagaccaagggtgagaaagctggtgagtaaggtagcagccggggaaaggtgtccatactgttggggacatgtggaaacagatgaatataaaattgcttagtaagttgtgtggtttgtggctacctgtaacgtgtgaggatttgtgttttttggttttgtgttgcatcaaagcaaacatatgggccaggagatacacaaggatcataaaagaaagatcttgagaatctatcaatccaatgcaatcaaacatcttaacaataactaatatccagattaaaatgaagaccctcaaaatctagcaacatttaaacactgatgaagaaccaaaaccaatcaaagccacaaaaactcaactacgatcttcaagctctatctaacaagagataaacctaaactaaaccacaattcaccaaacttaacatatggttaaagagatacacaaggctcataaaagaaaaatctagagaatctatcatctaatgcaatcaaacatcttaacaataggtgtatccagatttaaatgaagcctcccctcgaaatctaacaacaatataatcactgatgatgaaccaaaaccaatcaaagccaaataaacacaactacgatcacagatcttcaaattctatctaacctaacctaaaccacaattcaccaaacccacaatcaaaactcccaataccatttgcatctcataatcactacgaacccaaaaaaaaaactaatgcacatttcattcaatgcaatcaatcaaaccagtacgagacccgcgaaaattgtaaccatttcaaaaacatttcaaacggatctacacacaaacggtacaaattccactaccctaaaatcaaacccaaatttcgccatcacagagacaccaaaagtgtga

SEQ ID NO: 149185 - DNA, 918 bp, Arabidopsis thaliana landsberg
attgagatattatgaaacgaaatcttctcatttatattatactttatttctcgattttgtattatattattcaagagtttcctcgaactttggcaggatttataaatgatatagtatttatcaaaatgttaaaatataaagtaggtggacaacattctttttcaatagtatcataccaaataataatagagttttgaagttagtttgtcttttgtttcttcttgtcaaaatttatctaactttgtgttttgctctcttttgatcacaaatgaagcggtcaaggtcaacggatacacttgcaaggactcaacacaaataacaccagaagacttctacttcaaaggcttagccaacattgccgccacaaacacctctaccggctcagtcgtgaccggagccaacgtagaaaagctaccgggactcaacactctcggcctctccatgtcccgcatcgactacgccccaaacggcctaaacccaccccatgtccacccacgtgcctccgagatcattttcgtccttgaaggtcagctctatgttggctttgtaacaaccgctggaaaactcatcgccaagaaccttaacaagggagacgttttcaccttccccaagggactcatccatttccagaagaacattgccaacagtccagcatctgtactcgcagccttcgatagccaattacccggaacacaatcacttgtcgcctctctctttggagctcttcccgacgacattctggccaagtcattccagctcaaacacaaacaggttaagaagatcaaactgagatacgcacccaagaaatgagtttgtttttgtttatattgtaaacactaagcaaagaagaatgaatcaatataaagtttgcaactttaaaactattatgagatgaaactaaagaactgataaaaagct

SEQ ID NO: 149186 - DNA, 1475 bp, Arabidopsis thaliana landsberg
ttactagaagtcagaagtgacacgttttataactctcttttattaacgagtgacatgtttcaattataactttcttttgtttttcctacgtcgcagcctcaagaagagatcgttctaccaaatgataaaaagtggccgtttcttctccgttaccccatttccaccttcggtatgtgcctaggagtgagcagccaagccataatgtggaaaaccctagccactgcagagccaaccaagttcctccacgtacccctctggatcaaccagggtctatggttcatttcagtggctttgatcctcactatcgccaccatctacctcctcaagatcatccttttcttcgaagccgtacgccgcgaatactaccatccaatcagaatcaacttcttctttgctcctttcatttctttactcttccttgccctcggtgtcccacctttcataattacagatttgccgcatttcctttggtacctcctcatgtttccattcatctgtcttgagcttaagatctacggtcagtggatgtccggtggtcaacgacggctctcccgggtcgccaacccgaccaaccatctctcggtcgttgggaactttgttggggccttgcttggtgcgtccatggggcttagagaaggccctatattcttctatgctgttgggatggctcattacttggttctgttcgtgactctctaccaaaggctaccgaccaacgagactttgcctaaagatcttcatcctgtcttcttcctcttcgttgcggctccaagtgttgcttccatggcttgggctaaggtcactggctccttcgattatggctccaaagtttgttactttatcgccattttcctctatttctcattggtacgttttacatataacttagctgtatatatattccttcttcagaaaagtatttactaatacaaattttccctttctttatttaataggctgttcggatcaatttcttcaggggaatcaagtaagattaagaaaattacttttattactgtttgatttttagttattcgctagctcaactttctcacacttttttttctcatagattttcgctgtcctggtgggcgtacacctttccgatgaccggagctgcaattgctaccatcaggtacgcaacagtggttaagagcactatgactcaaatcatgtgtgtggtcctatgtgccattgcaacgttagtcgtgttcgcactgctcgtgaccaccattatccacgcctttgtcctccgagatctttttcccaatgacctcgccatagccatcagcaaccgtccgagacccaaacagaatagccaacaccggtggcttgaccaactgagaaacgtaagctcagagaacatcgagaactacttgaaattcacagactccgacagcagtcagagtaatgatgtagaagcttgcaacggcaaaactcaagagagtgattcatcataaattggagaatcacga

SEQ ID NO: 149187 - DNA, 687 bp, Arabidopsis thaliana landsberg
tcattagatctgaattaacctattaaaaaacctatgatctttgttctaaggtggaaggaaggactgtgaaagctcagatatgggacacgggctgggcaagaacgatacagagccataactagcgcctattacagaggtgcacttggagctcttttggtctatgatgtcaccaagccaacaacgtttgagaatgtaagcaggtggttaaaagaactaagagaccatgcagattccaatatagtgatcatgttgattgggaacaagacagatctgaagcatctcagagcagttgccacagaggatgctcagagctatgcagagaaagaaggcttatctttcatcgagacatcggctctcgaggcattaaacgtagaaaaggcttttcagacgattctctcggaggtttataggatcatcagcaagaagtcgatatcttcagaccagacaactgcaaatgccaacatcaaggaaggccaaacaattgatgtggctgctacttctgaatcaaacgctaagaagccttgttgctcatcgtcttgaaaggctttgtttgtgttgcacttaaaaaaagccaaatatctatgagactttatttcaaggcttgcgttgtatttgttttctttcttttttctgttgttgataatataactcaaagataattttttatatcaattgtggagttcggaa

SEQ ID NO: 149188 - DNA, 1553 bp, Arabidopsis thaliana landsberg
cactatcaggtgaagcctattacgtttacttctgcagctattgccccaattactaccacaaagaatgtgttgagtctccttccgtgtttcattcctctgatcatccaaaacatcctcttcaacttctctggattcccgacatgtctttagaagaagaacgtgataaacgatgttgttcttgtaaacgtggcgtagacgcgctattttactattgctctatttgcgattttgcactccatatggcatgtgcgggaaatccaacatccccaaccattgacaatccaaaaaggcataagcatacccttcattactttcccaggaaatccggtctgttttgcgatgtttgtgcgttggtggacgattctgattacttatatgtatgtctcctatgtgatttcattgtccataaacgatgtgtctacttaccatatgtcataaaggtgtctcgtcacaatcatcgtctcacttttactcccaatcttccttccgaagagccaacggtgacggattgtggagtttgtcatgcaaagataaacgaaaattacggagaatactcttgcactaagaagggatgcgtttatgcagtgcattccagatgtgctatgcaaagtgatgtgtgtgacgggaaaaaacttgaaggagagcctgaagaagtatatgaagacactaaaatgtttgaggagaaaggcgatgggattatacagcatcagagtcatccacgtcaccaattgagacttgaaaaaatattccacgatgaaagccatcattgtcaagcgtgcagacgtccttcttatgatcatggtggtaatgtgtatcgatgtatgcaatgtgatgatttcatttttcatgaatcgtgtgcatatcttcctcgtactaaacaatttatgctacatgttcatccattgactctagatcccagttacaatttcatagattggttccaatgtgggaaatgttatcgttactcttgcggtttcagatatgcatgtgttcgtgtgccgtgtgacttttttccggtgttggacacactttgtgcttctatatgtgagccgtttgatcatcactctcatccacattccttgttcattactagtggtgaacacgaaagcaaaatctgttccatctgtcaatcatcggagccacaacctttaaattgtttgaaatgcgattttgttttgtgcttttattgtgccactcttcctcataaagcaaggtacaaacatgatgagcatttcctcactttttcttacgaagaagatgcaaatgatgagctttatggttgtgaaatatgcgaggaagatataaatccaaagaatgggttatatgcatgcaacgagtgcggagtcacactccacatcgaatgtttactagggagagatccgaatacgacgcctggatcattttcaaattcggtaggaacgttgtatattcttcccaacacttattcaactcgacctatatgcacaacatgcagaagacgttgtccgtaccaaataaagataaattcatcgggcggtccgtatatattctgctcttttgattgctatcaaaga

SEQ ID NO: 149189 - DNA, 2230 bp, Arabidopsis thaliana landsberg
  unsure (1)..(2230): unsure at all n locations
ggatctagagaagaaggaaactgaatacatgcgccgtcagagacataaaatgggaactgatgacttcgagccattgacaatgataggaaagggggcttttggagaggtagcattagttttattgtaaacttttcctgtttcttctcagcttttcattggtgtgcatatctacacatcatcttgatcgtcctgtcctgtgatgtagaattgttaaaaacatgaataccttccttgaagggcttgcatccatgtgtgctagaagcactatgcaaatatcttctgggaggatgtacctacctgcagtagttcttggattcgttgatctttagttggctagttagtggcctgtagggtttatgccatccgagaataaatacacgttttcttaaaaatcagattgtctttttgtagttttcagcataatatcatacagttagctcctggtgttgggatagcgcttaaaatttgtaatctcaatgcttatgtntgtttttcctcttgatgcaggttaggatatgtagggagaagacaacaggcaatgtctatgcgatgaaaaagcttaagaaatctgagatgctccgtagaggccaggtatctccttcaagctgcttttgtttgatatatctttgtttattatcgttcatgtttgttgaaatctgattctttttcaggtggagcatgtgaaagcagagagaaatttacttgcagaggttgacagcaattgcattgtgaagctgtattgttcttttcaagatgaagagtatttgtatcttattatggagtatctacctggtggagatatgatcacattacttatgaggaaagacacacttactgaagatgaggcaagattttatgttggggaaactgtcttagctatcgagtccattcataagcacaattatatccacaggtctagtgaagcaatcagctatctgagtaaatttgtagcgtatcatttttcttttttggtgttctgaccatccatttacttctccaatttgttacagagatatcaagcctgataatctgctactcgacagaagcggtcacatgaagttatccgattttggattatgtaagccactagattgtagtattctccaggaaaaagatttcgtagttgcacacaaccttagtggggctctacaaagtgatggccgccctgtggcaccgagacgtacccgctctcaaatggaacaattacaaaactggcagagaaatagaaggatgcttgtgagtttatcgttcttttcttgttctgagatttctacttgccagattgaacaaatcatcattaatttattcatcttatggaagtttttctcactgatatataagttttctgttcaaatacagcttattaagtgaaatgctatcaattgcaggcttattctacagttggaactcctgactatattgctccagaagttttgttgaagaaaggatatggcatggaatgtgattggtaggtgcagcaaatctgttgggtcttgttctgttttgtttcttcaactcaaaatacattgttgtcgataattttttcgggttttcttcctataggtggtcacttggtgcgatcatgtatgaaatgcttgtggggtttccaccattttattcagacgagccaatgacaacttgtagaaaggtaccaatcctcactttttgtggactttaactctgttctagacttctagtaatctcaaatttttgcattcgatttagttcttgatcttctaatgatacctctttggtaatatatgcacatctctgaatacttgttattgtttttaatgcagatagtaaattggaaaaattatttaaaattccctgatgaggttaggctatcaccagaagccaaggatctaatttgtagacttttatgcaacgtagaacaaaggattggaacaaaaggagcaaatgaaattaaggtactttgtgctttataattcgaagttcccgtgtctaaagactatcgataaatgcttaaataaacgctttctgctggtattttttgtaggaacacccttggttcagtggtgtcgaatgggaaaagttgtatcagatgaaggctgcttttattccccaagttaatgacgagctggacacccaaaatttcgaaaaattcgaagaggtaaaaactaaaagtgttcggatcacaaaaaccgtttgaaatgataaggcaacggtccaatgatgcgtatgcagctgttgatatagaaactaatat

SEQ ID NO: 149190 - DNA, 984 bp, Arabidopsis thaliana landsberg; identical to SEQ ID NO: 15706

SEQ ID NO: 149191 - DNA, 1958 bp, Arabidopsis thaliana landsberg
  unsure (1)..(1958): unsure at all n locations
gatcttcaaacatcttaacattgacttgatctctaatcatgtttttttctttaggatttaccagtgtgaagcctaagtatcttgttgctttanctgtttcttatgaacaaagaaaaaacatcgatgcttgtgtcaaaaaagtatgtctctagtttttgttctctttcccctttgcttctaatctttcactcttattaagctaatatcttttactctctcaatagttctcagataacttcaccattgttctgtttcattacgatggaaaaacctcggagtatgatgaatttgaatggtctaaacgggcgatacacgtcagtgtacctaagcaaaccaagtggtaacaaaacaaacactttttttttatctctcagtttccattgatctaaagctttaaataaaacgttttgaatatgtttctattgaaggtggtatgctaaaaggtttctgcatcctgatatcatagcaccatatgaatatatattcatttgggatgaagatcttggcgttgaaaacttcgacgcagaagagtaagtactctgcttcttttgataatataatcagaaactgttatgaaatgttttctacattattgcaggtacatcaagattgtgaataagcatggtctagaaatatcgcaacccgctgtggaatcaagaaaatcaatcacatggaagataacaaagagaatacccggaatcgaagttcacaagtaaaacaattaactcttgatataaactgtacaatgccatggtttaagtaaagtaaagatagtgattctttttcaaattctttgatcagagaagtcgaagagaaaccaggccgctgcaatgaccctcacctacctccttgtgcagggtatggatctcatttgtcaaaaccaatacaataagtattcatactctcttgatccattaagttttgcacggttccttatcaggtttatagagattatggctccagttttctctagagaggcatggcgttgtgtgtggcatatgattcagaatgacttggttcacggttggggtcttgactttgcgctaagaaaatgcgtcgaggttaacatacaaatacaacttattcacaaacgcgtataattttacaaaacgttttcgaaactaagaagaaacactttttaatgattcaataaacagcctgcacatgagaagattggtgttgtggattctcaatggatcattcatcaaaagattccttctttaggcagccaggttattaaatgatcaaactttatcttcctatactcaactacattatttactagcttctttgttcatagttttaactatgagatgatctctcaaatacattgatcagggaaccgcgcaggaagggaaaaccgcgttccaaggggtaaaacaactcaaccacggctattgtcttgtgttatatacttagaaggttcttgaacttagcgggttctagaccgagtatattgttaattactgaattatatacatgttttgatcaggtaagagagagatgtaaacgggaatggacaatgtttcagaaaagaatgacccgatcagagcagaagtatctgaaagaaattgcatctgcctcttcaaactctacacgtacttaaaccaaaagagtagaggaactgaataacaacctttagtgttcagatagcactttcagtaaaaaaaaaagagaaatagaatgttgatatgataagcacataagcaagcatacacacacaagacacattctttgaaaagaacaatatagctctgttctagaaacagttatactgtagtaacaaaacagttaataaagttcttaataaactcttcatttctataatatacaattgtcaatactaatctgtgttcatttcagattgtggcaaaataatttgagaaattgtagtatgctctcattacaatacattatgtttcttggttcaaagaaatgaccaaacctcgctcttatca

SEQ ID NO: 149192 - DNA, 2475 bp, Arabidopsis thaliana landsberg
  unsure (1)..(2475): unsure at all n locations
ggcggcggcgatgatttcgtcttccgtcgtcagctcatgaaactaaatctctcgaatctcagatttctacgtacccgaaaatcgttaatctcccagacgcgagcaatgactcaaaatccggatccaaaacctgatccatcgcaggttctagacgatatcctctgttcggagcagcgtgatgggcagattgaggaaacagtcgacacagcgccggcgagcttgggctctccaagtcgggtcttaagcattgatactagagtagagagagcttgggcacactggaaaaaactgggtagacccaagtatatcgttgctccaatggtggataactctgagcttccgtttagattgctctgccagaaatacggagctcaggctgcttatactccgatgttgcattctaggatcttcaccgagactgagaagtatagaaatcaggagttcaccacctgtaaggtaagatttcatttgattttggcgtttctcagagatttatcagttttgaatttaaggttttgattagattttaaaattgtaggaggacaggccattgtttgtgcagttctgtgctaatgatcctgatacgttattggaagctgcaaagagagtcgaaccttactgcgactatgttgatatcaatttagggtaagtacatttccctcttttcacatcttgtatgtnnnnnnnnnnnnnnnnnnnnnnnnnnnnnnnnnnttcactgttttaagttcgtgaactctgataactaagatagaatgcaatgatttgagttccaagtttctgggaacgatagagttcaatgagctttagtagtttgacacatgggctataatattcatatgaaatcatagtttggatttagtgatttgggtaccgaatgagcacagtgaccgcttgtaatttggtgattgagtaagaatgtttgggggattttggtttcaggtgtcctcagcgtatagcgaggcgaggaaattatggtgcattcttgatggataatcttcctttggtgaaatcacttgttgaaaagttagctcagaacctcaatgttcctgtctcctgtaaaatccggatcttcccgaacctggaagatacactcaagtacgccaagatgctagaagatgctggttgctcgctcctagctgttcacgggcgaacaagagatgagaaagacgggaagaaatttagagctgattggagcgcaatcaaggaagtgaaaaacgctatgagaatccctgtcttagcgaatgggaatgtaagatgcatcgaagatgtcgataactgcatcaaagagacgggtgttgaaggtgttctctctgcggagacgcttcttgaaaacccggcggcctttgctggnnnnnnnnnnnnnnnnnnnnnnnnnnnnnnnnaagaagagggattcgtcgatggagggttagaccagggagatttagttgttgagtatttaaagctgtgtgagaagcatccggttccatggaggatgattcgatctcacgttcataagatgttgggagaatggtttagaattcatccacaagttagagagcaacttaatgctcaaaacatattgacgtttgagtttctatacggacttgtggatcagctaagagagcttggaggaagagttccactctacaagaaaaagaagatagatactctgactccacaagactctccacaaagggtttagagagttgaaactatacgttcttgattcattgggttttatcatttatgttgtaacaccaaatcatcagtatccaaatactatagtggtattttaaacgaattgttgtacctcgaagagatattttgaaattttaattgatctgattgaattttcacatagtttaaaaagcaggaaaaaatatttaaaggtagaaaaacgtattattttacacaaactccttccgcgattgacggtgtcaatgaccaccgtcgtgtcggttggtttgactctccacagtccacaagattttagcgcacatttaactcaagccgatggagaagaaacagagcgtttcttcttacgaccacgacagaactgcgtgctgtttttatccatcttctccaacacgtagtgcgcaagcagatcattagattccacaagattctcccggcaaagaaactcatccccacaaagtctctcaacatctctgtaataatcatgaacaaacacatgcgtcttcggattcccgccttttttactccgagcaagaaccgccgccgtgaaaatcgacgacatcctccccggtacatcttcaccgtcgccacgtggtccatcaactaagatcacatcccaatcaacatcgtatacatgattcggcaaatcattgagtcctaatttacaatctgaaaagagaagattctgcactggacgacactcgttcctcgccgcttctttaaccgccgacacaagctcacgcgcctcacgagctttggtcgtgtacttgacatcgaagacttcgatctccggtg

SEQ ID NO: 149193 - DNA, 988 bp, Arabidopsis thaliana landsberg
  unsure (1)..(988): unsure at all n locations
acagattggaagagaggagacattgtctctttgattcttgagcttatttgggggagagaaagagagagcgagaggatctgatgtgtgtctcaatctcgcaagtctctagattgagaatccattcatttggaagttcttgctgtgaacgtgttcatggatggatcaagaacagctctagcttgaagctgcttgatgttagagcttcttctgttgatggtaaagcaagatggatcagacgtaacgtgagtacaactacacaaggtagtagaagcaacacaaagagcagtgtgttgggaggaacagttcctgtaaccaggattatagatgaaaagagtagaaccaaggtacagccttttggtaatcttcagcaacggcttgcgcaagataaagatctgtctaagctcctcacggttatagtctctgatcttgagacaactggtttgcatcggaaaaatgagcggataattgaaattgcagctcaggatatagctggtggtgggtacagcacatttcagactcttgtcaacccgggtgttgttcctataactaacgcacatatccatggaatcaggaatgatatggtctgtcgacccgaggttccaaggtatacatagtctttagataaaattgtatcatgtagagttcttttgaatttctgtgattagtttgtaacaaatgatggttgtttatgattgtgtggcttccattggatcaaactaatgatggttttgtgttggtggtaggnnnnnnnnnnnnnnnnnnnnnnnnnnncggtatgttgagagtcgacagaagcctggaggttatgtgatgttagttgcacacaacggcaaatcatttgacttccagtttttgatcaacgagtttaaccgttgttcttatgagattcctcataattggttgttactcgactcgctcccactcgctagagagaacatgaagtctgtagcgccccatactaaaatccatctgcttctatttcaatgag

SEQ ID NO: 149194 - DNA, 2451 bp, Arabidopsis thaliana landsberg
  unsure (1)..(2451): unsure at all n locations
aatcttttttgactagaaagtgaggattgtgttgacagataactaaaggtggatgcttgaaggttggtgttcaaacatatggaggtggactgtggtacacctggtttgatcgtgacttgactgttgcaggacgtgtgattcttaaagaagagaaagcaggttctgtctcgtattctcatcgccttgtcaggattgaggatcctatcatgaggattcctaccttggccattcacttggacaggttacctttaaatcattgctttgtattggaatacttcttagactctttttttgtcgtgtttgcgataaaaaaaacattatttatttctcagttactttatgtagagaaattaatattgaactttatgtacgtttcgttttgccttgcggacaggaatgtgaacactgaaggttttaagccaaacactcagacacacctcgttccagtactggcaacagctattaaggtgctttttctatgcttgctatgttgtccagcgtctctgctaaattttgtttcatctagtatggctaaagtatttgtttgcatgtcacccactatttgagatcagaacccatctccgtgaaccccttaacttttggcagatttatctatgaagtcgaaaccattgttgtcaagtttgtagcagacttgaattcttacttcctttgcaatttatttatattgtgtgatatatttgaaggcggagctcaataaaacgccagctgaaagtggtgaacatgacgaaggaaagaagtgtgctgaaactagttctaaatcaaagcatcatccgcttctaatggaggtccagttgaaatatataagctttatggttttagcttgaattttagatcttgttctggtttagtaaccaagtagtcctctttttaatttcttagatcattgcaaacgcactgggttgtaaacctgaggagatatgcgactttgagctgcaagcatgtgacactcagccaagtatactagctggtgcagctaaagaatttattttctcgggaagactagataatctctgcatgtcattttgctctctgaaggtacgtcctttacttttacttttagaggagaaaatagtccatggtctatatttactgatcttaactgtgccttagttggtttccacnnnnnnnnnnnnnnnnnnnnnnnnnatagttagtccatgcttcacatttcaagagacttgtgtttcaagcccaatttaaattactccaccttgtagatctttctgtgcaagtatgttaactcacatctagtgtaagttttattctggatcacaatctaagttgaacatctcttacaatttgttcttctctctgaatggaataaatctacccattatgctgctgtatattgatgaacaatgatacaacttcactgcaaccaactttccttgggtattttggttcaagaagcagtgttgttgacgatctatttcaaatatttgaacttgggcacatttacttatagatgcatcgtcatctggaagtgacttagaggatgaaagcggaataagaatggcggcactatttgatcatgaagaagttggctccaattcagcgcaaggagctggatcccctgtcatgattgatgctatgtcacacatcacaagttgcttcagctctgacactaaggtagcaaaccattcgagtgatagacattaaactgggattgtgttatactttatataattttgtttttgtcgctcattatagttcgcttgtttcatcgttacaggtgctcaaaaaagcgattcagaaaagtttgcttgtctctgctgacatggcacatgctttacatccaaactttatggtaatcatttcatctggcaatatttttttcatttccatgcacagaagttgatgtccatctttcattgcattttgatttcactttttaggacaaacacgaagagaatcatcagccaaagatgcacggaggacttgtcatcaaacacaatgcaaatcaacgttacgccactaatgccgtaacttcctttgtattcagagagatagcagagaagcataatctgcctgttcaggtatgatttgcctgagaaagattcaaaaaaatgttcttacttatttgcatattataaatgaatgtggacatgaatattgtaggattttgtggtgcgtaatgatatgggttgcggatcgaccattggtccaatcctagcaagcagtgtggggataaggacggttgatgttggagctcctcagctctcaatgcatagcatccgtgagatgtgtgctgcagatgacgtgaagcattcatatgaacactttaaagctttctttcaagagttcaactccccttggagccccaaactcactatcgacgttgaagagattcttaaatcttactgctgtctaagttggaactgaaaagatcctttgttaggaaaaactacattaataaaaggatttatagcc

SEQ ID NO: 149195 - DNA, 658 bp, Arabidopsis thaliana landsberg
caatctcaaagaacaagaaaatatgagaagactctttctcttctctctcctctttttattcttttactcatcctcctcctcaagatcttcatcagaatctcacatcttcatctacggaggatgttcaccggaaaaatacacaccaaacacaccttttgagtcaaaccgcgacactttcctctcctctgtcgtcacttcctcctctgacgcgtccttcaacagctttgccgtcggcaacgactcctcctcctcctcatcctcttccgccgtcttcggcctctatcaatgccgtgacgatctccgatcatcagactgctcaaaatgcatccaaacctcagtcgatcaaatcactctcatttgtccttactcttacggcgcttctctccagctcgaaggctgcttcttacgttacgaaacaaacgattttctagggaaaccagacacaagtcttaggtacaagaagtgtagttccaagagcgttgagaatgactacgatttctttaagcggagagacgatgtgttgtcggatcttgagtcgactcaactcggttacaaagttagccggtccggtttagtcgaaggttatgctcagtgtgttggtgacttgagtcctagtgactgtacggcttgtcttgccgagtctgtcggaaaattaaag

SEQ ID NO: 149196 - DNA, 1344 bp, Arabidopsis thaliana landsberg
tcgtttcgcggcaaaaaactaaacgatgtcgtttcgcgtacaatagtgcccttacgaaacgatgctgtttttgacggggctgatttagaaaacgtagcttttgtgagggttattttgtaatttatttttgtttagtttgtcacttcgccgtgcgcggcgggagagaacgctggcggaaaaaagaaatcggaaaatcggaaaattggagaaaccctaaatcgacgaaaaggagagacctttgaatcgaagcttggtgtgtttatactatgaagagtcaatggtctaattttcatcaggtttttcatctttctctgatcttagacccccaattccgaaccatctctgattctattcccaaactcgttgtttttgcagattgggagaaactctttcttagctgcttctactgtttacgtttcaaacgaattcaacttcttaaacacttctcttcttaatcgaagaagcttctgttttgcagaaggaggtaaattgcttaatttggttgtgtgttaattctaattgttcttgcatagtacatgaattggttcaagggtattgtctagatgattttttttatttgttgagaaacgaattgaatcgaaaaatatgagctttaagcttgatggtggtacaatggtaccttgtttgtttgaggagttttgctgatctctgtaatttgaaatttagatcgatccagctttgtagtgttgaaatcggaagcagagttcaacagtgcattgagtaaagctcgaggtaaataaacaaacagtcattggtttcttttgttaactacttcagaattatatgagttgcttagtatgattcagctctgctttatcttctcttgatgttattcatttttttcagatggatctttgccatcggttttctatttcactgccgcatggtgtggaccttgtaagttttagttccatgaaagcttctggatagtaaatcttttctacgtgtggcgttattaatttttgtatggtttggctctaggcaggcttatctctcctgtgatattggagctcagtaataaatatcctgatgtaacaacgtataaggtcgacattgacgaggtgtgtttgcatcattagcatgacttttgtaggtttatacaagtgtcatcatgcgaccgaagccatcattgtaaattgttctgttctgtggttagaagattttagagtatctgctatcaaatgccttttattagtcgatatgtcgaaccaaatggagaactcaactaatgttaagtctgagatatgttgctacattatgcttccaaaaactggttactgatatcacattctcaaaagcaacataagtcacgtagtagagaaa

SEQ ID NO: 149197 - DNA, 1743 bp, Arabidopsis thaliana landsberg
atgtgtatattcctctgtatgggagggaacagcacaacgtggatgaacacggctgtgttggtgacttgcatacgcaattttcgacgaaaccgtggtccggtctccgggatcttgaaaggatatgtcggtttaagcacagctatattcactgatctctgtactgctctgttctcaaacgatccgtcgtcgtttttggttttactagccgtggtgccttttgccgtatgtctcacggcggttttcttcctccgtgagatcccaccagcatcttccgcagctgaggagaacgaagagactcgttactttaccatattcaacattgtggccgttgttgtcgccgtgtatcttcagtcttacgacatcattggaatcaaaactggagtgttctctgttgctttcgcctctatacttctcttcctcttggcttctcctatagccattcctttccactctttcatcaagagcttgaactacggtgaacaagatgacttagaaggacggattcaagaaccgttgcttagatccgagatagcggcagcggagaaagaagtaatagttgtagctgcggtggcagcggaagaggaggagaagaagaggaagaaaccggttttgggagaagaccacactataatggaagcagtgtcgcccgttgactattgggtgttgttcgtgtcgttcttgtgtggagtaggaactggtttagcagttatgaacaatatgggtcagatcgggcttgcgcttggttacactgatgtctccatttttgtctccatgactagcatttggggattctttggtcggattctctccggtactatctccgagcacttcatcaagtaagtcactttactaacatagatcatcgtgacttggaatattcttattgatcactttacgcacacgcattcaaatgcaaatttattctgtgaatggtgatgtcagtttcctctgtttcacctttgctttgtcgctaaggcagagtatattactttcctcttccgttacttagaattgaatattttccatttacatgatatttcttttaacgatttttcaattaaagcttgacatgttagtttccatatggagaaatttccttgtctaacactagaccggtccaatagcttgtgcgggggaccataacatactttttgcgctaaaatatctttttagattttctttcgtctttatttgaaaactaaagatcgtgggaccttgaataatatttgctattgagactaatcttgaatatttgttttaactttataggaaagctggaacaccaagaccattatggaatgcagcagctcaaatcattatggccgtgggatatctactgatggctttagccttgcccggttcactctatattggttcaatggtggttggggtatgctatggagttcggttagcgataaccgtaccaacagcatcagaactcttcggtctcaaatactatggactcatctacaacatccttatacttaatatgcctctaggatcgttcctcttctcgggtctactcgcgggtttactctacgatgctgaagccacacctactcctggtggaggcaatacgtgtgtaggagctcattgtttccgtatcgtcttcattgtaatggcgtttgcttctatcattggggtcggtcttgaccttttgcttgcgtatagaaccaaggggatctatgcgaagattcatgcgagcaagaagactaagaaatctggtggtaatcttcgatgaga

SEQ ID NO: 149198 - DNA, 465 bp, Arabidopsis thaliana landsberg
tcacctatattctctaccttcttatttcagcacaaaccaaaaacataaagacagaaaaccaacccaaaagactttaccatggaatcacacaacgtgagcaacagcttgaacctagacatggagatggatcaagaaaaggctttcgactactccaaaagagctcaatggctaagagccgccgtgcttggtgccaacgacggtcttgtctcgacggcttcacttatgatgggtgtcggtgcggtaaagcaagacgtcaaagtcatgatcttatctggtttcgccggtttggtcgccggagcttgtagcatggctatcggagagtttgtctccgtttactctcagtacgacatcgaggtggctcaaatgaagagagagaacggaggacaagtggagaaagagaagcttccgagtccgatgcaagcggctgccgcgtctgcgttacgttttctttgggtgcgaatgtgc

SEQ ID NO: 149199 - DNA, 2280 bp, Arabidopsis thaliana landsberg
taaattctctggctcattgcaaaaacaaggcaagttatgactaatatatcttttttagtagaggaactcgtctcagcttcgattgtatatgccttgacgtttctctgtgcatccatcactgcaggaatttgtagattagagcagttgcaagagcttcgtcttagtcgaaacagatttgagggtgaaatcccactctgtttttcgagattctccaaactccgagttcttgatctatcatcaaatcacctaagtgggaagattccatatttcatcagtgacttcaaatccatggaatacttatcacttctcgataatgactttgaaggcttgttctcgttgggtttgatcactgaattaacagagctcaaggtttttaaactctcttccaggtctggtatgctgcaaatagtagagactaacgtttccggtggtctgcaatcgcagctaagtagtattatgttgtcacactgcaaccttggaaaaatccctggttttctttggtatcagcaggaattgcgggtcatcgatctctccaacaatatattatccggagtgttccccacttggctgctggaaaataacacagagcttcaggccctgttgttacagaacaactcattcaaaacacttacacttccaagaaccatgcgcaggctgcagattttggatctttcggtgaataatttcaacaatcaactccctaaggatgtcggtttgatacttgcgagcttgagacatttgaatctctcaaacaatgagtttctagggaacatgccctcctctatggccaggatggaaaatattgaatttatggacctatcttacaacaacttctcagggaaattgccaaggaatcttttcacaggttgctactcattgagttggcttaagctctcgcacaacagattcagtggcccgattattcggaaatcgagtgatgagacctctttgattacgctgatcatggacaataacatgtttacagggaagatccctcgtactctactcaacttaaggatgttgagtgtgatcgacttatcaaacaacttcctcactggtacaattccaaggtggttaggcaatttctttttggaagttctgaggatctccaacaaccgtctacaaggtgcaataccaccgtctttgttcaacattccttacctctggctcttggacctttctggaaacttcttgtcgggtagcttacccctgcggtccagctcagattacggttatatattggacttgcacaacaacaatctcactggatctattccagacacgttgtggtacgggctacggttgcttgatctgagaaacaacaaactgtctggaaacattccactgttcaggagcaccccgagcatcagtgttgttctgttgagagagaataacttgacaggaaagattcctgttgagctgtgcggtttaagcaacgtaaggatgttggattttgctcacaatcgattgaatgaatccataccttcgtgtgtcaccaatctatcatttggctcaggaggacatagtaatgctgattcagattggtatccggcgagcttgctctcaaactttatggagatatacaccgaagtatattacgagtctttgattgtgtcagatcggttttctctagactactcggtagattttaatgcccaagttgaatttgcggtgaaacagagatatgacttgtacatgagaggaacacttgattacatgtatggcttggatctgtcaagcaatgaattaactggtgttatcccagcagagctcgaagatctcttcaaactaagagccctgaatacgtctcacaatgtctagtccagtcatataccggatagcttctctaaattgcaggacattgagagccttgatctttcttataacatgttacaaggaagcattcctcaccagttaaccaacctcacttctcttgctgtcttcaacgtctcttacaacaatttatcaggcatcattccccaaggaaagcaatttaacaccttcgacgagaacagctacttaggaaatcctcttctctgtggaccgccaaccgatacaagctgtgaaactaagaagaactcagaggaaaatgccaatggaggagaagaagatgacaaagaagttgctattgacatgttggtcttctattggagtactgctgcaacttatgtgactgcattgataggtattcttgtacttatgtgtgttgattgttcttggcgtcgagcatggctccgccttgtcgatgctttcattgcctctgcgaaaagtaagttggct

SEQ ID NO: 149200 - DNA, 1572 bp, Arabidopsis thaliana landsberg
  unsure (1)..(1572): unsure at all n locations
tttctcaccagaaacatctctaattctcccgctgatgctctcagattctctttctccctcactcgcggcttcgcttcgtcaggatcgtacggcatcgacgtcgtcatcatcggcggcggtcctggaggttatgtggcgccgattaaagcggcacagctcggtcttctgtctacctgtatcgagtagcgaggcgctctcggtggtacttgtctaaacgtcggctgtattccttcaaaggtgattttagaaactccttttccgattaccttgattcgtcggaaattttctccgattttcattcgtctcctgtggaacttgctcgttgatcatcatttagattcgatctgaggttagattaagttcgaggtttaagaaatgattgtgtgatgatgatacttatttatttttcagatctgtttgtgcttgattcctcggaaatggaactatttgcctttgaatttttgtatatctgaaaatattttgttctcgttgcatatgctggatcacgatcctcgcattttttgttttgtgattgtgttagtctctgtttgagctttgattaatatatatgacataatctagtttagtttctgctgtattaggcccttcttcactcttctcacatgtaccatgaagcaaagcacgtttttgctaaccatggtgttaaggtctcttcggttgaggtagatcttcctgctatgttggcgcagaaagacacagccgtcaagaatttaacccgtggagtcgaaggtctgttcaagaagaacaaggtaaactatgttaagggctatggtaagtttctgtccccatcggaagtctctgtggacacaatcgatggagaaaacgtggttgtgaaaggcaaacatatcatagttgcaactggctcggatgtcaagtctttgcctggaatcaccatcgatgaaaagaagattgtctcatcaaccggggcactgtctctgacagagatcccaaagaaactcattgtcattggtgctggctatattgggctagagatgggttctgtatggggacggctaggatcagaggtcacagttgttgagtttgcagcggatatcgtaccagcaatggatggtgaaatccgcaagcagtttcaacgctcactagagaagcagaagatgaaatttatgctcaaaactaaagtcgttggggtagattcatctggagatggtgttaaactcatagtggaacctgctgaaggtggagaacagaccactctagaagctgatgtggtcctnnnnnnnnnnnnnnnnnnnnnnnnnnnnnctggacttgatctagagaaaatcggagttgagacagacaaaggcgggagaattctggtgaacgagagattctcgacaaatgtttcaggcgtttatgcaattggagatgtgattccaggaccaatgctggctcacaaagccgaagaagatggtgttgcatgtgttgagtttatagcaggcaaacacgggcatgtggattacgacaaagtccctggggttgtctacacgtaccctgaagttgcgtcggttggtatataaaaggagcagctgaagaaagaaggtgtaagct

SEQ ID NO: 149201 - DNA, 1640 bp, Arabidopsis thaliana landsberg
  unsure (1)..(1640): unsure at all n locations
atgggaggaagtagctctaaagagtcacctagaggaggtggaagtggtcgtaggtatgaacgtagtgtgtctgggagctcatcttattcgtctgcttgggaccagagcagctattatcagacaccaaaccatccatctgcgtctcctgtttcatcctataattctgggagacaaacaccgaagaatcttgagaggaagtattcacggattgctgataactaccgttccattgatgaggtttgatgatcactcttgtttttgtttgtttgtctcttaggtcgttgtgtcggtttgtgaatctctctattggtgttttgttgatatttcttttcttttaggttaccgctgctctttcacatgccggtttggagtcctcgaatctcattgttggtatagatgtcaccaagagcaacgagtggacaggttagagaatttatctcaatgttttagtatatgtttctttgacctggaagctgacttgggtgatttgatttaggggcgagatcatttggtaggaagagtctgcatttcattggaactactccagacccttatcaacaaggtatgtccatcattggaaagactttatcggtttttcatgaggataatttgatcccctgttatggatttggagatggtacaaaccctgattgtttttatgtagctgttaagttcctgtctagaatagattttaaggttggtttctctttgactatgcagctacaactcatgatcaggatgtcttcagtttcaatcccaatgatacatattgtaacgggtttgaagaagttctcatgtgttacagagagattgttccccagcttcgtctctcaggttgagtgagatgaataatcccttttcttctgcatgtcttctgaatcttgctgtactttttccttatagtttgctgcttctcttacaggtccgacatcttttgcacctatcatcgaaagggccatgacaattgtggaagaaagtggtggccagtaccatgttcttctcattatcgctgatggacaggtaaagattggaacctaattcgactagagaaagtatttcttgtatctatttgtgtttagttataatcattcccagacatttgtgtactgtatagttaccattggagcttttaactatgacaggtgacaagaagtgttgatacagataacggtggattcagtccacaagagcagcagactattgatgccattgttagagcaaggtaataaatactatttcctttgacgaaaatccaatttcaaactgtgtctctctaacttgtggtggattctgttgcagtgaatatcctttgtctatagttcttgttggtgttggagatggtccctgggacaccatgagacagtttgatgacaacatccccgctcgtgcctttgacaatttccaggtaataatatcaacatgtttctacaatagtgtagatagatcccttgtctttttcctggcaaatgtatcaatttcaaaggtttttgttgtctatttgaatcctttcagtttgtgaatttcacggatataatgtcaaagaacattgatccagcaagaaaagaggcagaannnnnnnnnnnnnnnnnnnnnnnnntgccgtctcagtataaagccaccctcgaactaggcttacttgg

SEQ ID NO: 149202 - DNA, 781 bp, Arabidopsis thaliana landsberg
atgcttcttattatggtttatacacagatgaatagggagaagttgatgaagatggctaataccgtccgcactggcggaaagggtacagtcagaaggtatagagctcttcctcactaatatcattattcagtacttaacatttactatatttgtgtcatgaaaccattcgatttttacttgcagaaagaagaaagctgtgcacaagaccaattcaactgatgacaagaggctccaaagcactcttaagagaaatgggagttaactccattcccgctattgaagaagttaacatctttaagaatgatgttgttattcagttcatcaaccctaagggtaagttatttttaaccattttgatctatacatcagaaccattttttcatgttactgatcattgttcctcctttgaatgttactacagttcaagcttcaattgctgcaaacacatgggttgttagcggttctcctcagaccaaaagtattgcatctcataatatctcttaatctctattatcttgtttcttcttcattgcatcttcactgattaatgtaacacctgttgcgtcttgcagaattgcaagatatccttcctcagatcatcagccaactgggtatgtaccatgtaactgaacagctcttaaatttttttatcatcgattctaaggtctctaactttatgttactctgatctctttcaggaccagacaacatggacaacctgaagaagctagcagagcagttccagaaacaggcttctggtgaaggtaacaacgcctcttta

SEQ ID NO: 149203 - DNA, 1639 bp, Arabidopsis thaliana landsberg
tctcgaaagttctcgacggattctccaacggcgaacacatggataacgccacgtcagcagcaatgggggcttgcgtggagcttatcgggctagccgttgatcaactcaacgaaacaatgacgtcgtccttgaagaactttgacgatctaaggacgtggcttagctccgtgggaacgtaccaagaaacgtgtatggatgcgttagtggaagcgaacaaaccaagtttaacgactttcggagaaaaccatttgaaaaactcgacggagatgactagcaatgcgttagcgatcataacgtggctagggaaaatcgctgacaccgttaagtttagacgacgtcgtttgttggagactggtaacgccaaagtcgttgtagctgacttgccgatgatggaaggtcggagacttttggagagtggtgatttgaagaagaaagcgactatcgtggtggctaaagacgggtcggggaaatataggacgattggtgaggctttagcggaagtggaggagaagaatgagaaacctacgattatatatgtgaagaaaggagtttatttagagaatgttagggttgagaagacgaaatggaatgttgtgatggttggagatggacaaagtaagactatcgtctctgctggactcaacttcatcgatggaacccccactttcgaaaccgccacatttggtaagtacatatatacaagtgattttttttgtcctaacgaaaagtttttgtgtttgtgtagcatacaaaaatactagtatattctataaaaaaaaaagaagattgatttatttttccttctaatgttttagctgtgtttggaaaggggttcatggctagggacatgggcttcattaacacagctggtccagctaagcatcaagccgtagctctaatggtaagcgcagacttatctgtgttctacaagtgcaccatggacgctttccaagatacaatgtacgctcatgcacaacgtcagttttaccgtgattgtgttatcctcggaaccgttgattttatatttggaaacgctgcggttgtattccaaaagtgcgagatcttgcctcgtcgtcctatgaaaggccagcagaatacaataaccgctcagggccggaaagatccgaaccaaaacacaggaatttctatccacaattgtactatcaagcctttggataacttaaccgatatccaaacattcctaggccggccttggaaggatttctctacaacggttatcatgaagtcgttcatggacaaattcatcaacccgaaagggtggttaccgtggacaggagataccgcgccagacacgatcttttacgccgagtacttaaattccgggccaggagcatcgaccaagaaccgggttaagtggcaagggttgaagacgtctttaacaaagaaggaagcaaataagtttacggtgaaaccttttatagacggcaataactggttgccggctaccaaagttcccttcaactctgatttttgatattttttgctggaaaaggctggtctgaaacatgatgcatggctagtcgttctttaatttgtttataacgaacatacaacattcccttctaaaacattttcttgtattggctttatttcaaagtgtctgaatttgtttctatat

SEQ ID NO: 149204 - DNA, 1620 bp, Arabidopsis thaliana landsberg
gctggagtttcgggtttggtctgtgtgtagctgctaatctgttaggcttgatagttttctgctcggggaaaaaattctacaagcatgacaagcctttgggaagtcccttcacaagtttacttcgtgtcatcttcgctgccatacgtaaaagaaaagctgtggtttccaccaacgagaaagactaccacagtgaatcaaagaaaacgcccacaaagagtttcaggtaaaaccacctcaaaaaccgccatttcagtctgatttttacaagaaagggactcgttgaggccatctaacgaatcctcgtgtatgcaggttctttaaccgcgcagcattgaaacaggatgatgaggttaattcagacggcacaattcacaatcaatggagactatgcagcgttcaacaagtagaagatttcaaagcagtcataagaatcatccctcttgtgttagctatattattcttgagcactccaatcgcgatgcagctaggattaacagtacttcagggtctggtgatggaccggagacttggccctcacttcaagatccctgcaggctctctccaagtcataacacttctctccacttgcctatttatcatagtcaacgatcggtttctctacccattttaccaaaaactaaccgggaagttccccacaccgattcaaagggtgggaataggccacgttttcaacattctaagcatggctgtgactgccatagttgaagcaaagcgattgaagatagtacagaaaggtcattttctcggatcatcatctgttgctgacatgtcagtcttgtggttattccctcctctagtcatagtaggaatcggtaaggaattggatccagatcattttattcgactcagaagtgagttccatctatttatgttcttggttctgtcttttggttgcaggagaggccttccatttcccagggaatgtagctctgtgctatcaagagtttccagagtctatgagaagcaccgcaacatcgataacgtcggtggtgattgggatatgtttctacacaagcactgctttgatagatctgattcaaaggaccacggcgtggttaccagatgacataaaccatgtaagagttgccaatgtttactggattttagtcataggaggagtcttgaatcttggctattttcttgtgtgttcttggctatacagatacagaaacctcaaggatgatgatcataagcaagctgcaaatgtctctcactgatctttaagctggagaaagaaagaacatgtcctttgttgttatcatttgcatttctttacagagagctttgtctgaaagtatctccaatttgtagccattgaaaaacagtttttcatatgtagaattgatttggaaatttgtggtaatataatcgttttgtttctgtgattcctgagtacaaaccagtaacacaattgatgttgagcttgtgatgcttctgtagtgcctaagataacaatcttgtgattctcgggctgctttttgatgttttctgtctttgacagagacactcatgacattagtgaatatttttgcaggagttatgattaaggaagatggtgaatctgaatatgcggaagacaaccattttaaaaaggaacag

SEQ ID NO: 149205 - DNA, 1447 bp, Arabidopsis thaliana landsberg
tgtttcgtgatgatcaaaaaaatggtccgtttcatgaacatcttgttatgttttcgtcaaccatcatatactctctaatacttaaatgttgttaatgtcacaaggtggttcgccaagcgattcttgcatcccgatatagttgcagagtacgagtatatatttctttggaacgaagatcttggtgttggtcatttcaatcctcaacggtaacgcactaaatatagaatgtgtgttcttttttatcttttttcatttctcattccaatcgttttactttagatatctatctattgtcaaagaagaggggcttgagatatcgcaacctgctcttgacacttcaaaatcagaagtgcatcatcctataaccgctcgtcaaaaaaaatcaaaagttcatagaagaatgtataaatacaaaggtagcgggcgatgtgatgaccatagcaccaatcctccttgcatcgggtaaacgcttttcgcatattccgtgaaatgttcttgaaactctctttctacctcattctccagttaacatgtaacttggatctgtaggtgggtggaaatgatggcacctgttttctctagagctgcatggagatgttcttggtatatgattcaggtaacatttgtgtagcattcgttttttgttccccgagtcgagaggattgggtttaatgctttcgtttgcgttgcagaatgatttgatccatgcttggggtctggatacgcagcttggttattgtgctcaagttggtttcttcttctaacttgttttgataagcccttacttccttcattgtacggtttttactaacatgttcttggttgcggatagggtgaccgaaagaaaaatgtcggtgttgttgatgcggagtacataattcattatggtcttccaacgctcggtgtggttgaaaccgcttcaagcgctttgcggaatgagacagactcgaaatcaacggtatgtgctactagtgttttctatatgtttcttgaagcagttatgtgttatgattttgtatgaaataatttggttgagatttcacaggaatcattagagtctcgtgaagtggataatagaccagaagtgaggatgaaatcatttgtggagatgaagagattcaaggaacgttggaagaaagctgtgagggatgatacatgttgggttgatccgtattgaaatccgagcggtttaagtaaaccgaatcgaaccggattcttttccttgttgagtgtgctttgtggtccattgtataccattattttggtacatagattttgttttacttcgagaaaaattagtgtatttatgtgttttatggaccacagtgtagatttaacattttggagcattatacaaaagtgtttttgtgctagcaaatatttgaagattataataaatacataaatatacagaagtgtttttgtactatcttttattttagaaacc

SEQ ID NO: 149206 - DNA, 1774 bp, Arabidopsis thaliana landsberg
  unsure (1)..(1774): unsure at all n locations
atggtggatctgatggagaatgtgaatttgggttttggtgataaaagacgcgtaggttttgcagtgaagagagaagagttagaagaggaagatggagaaaagagtgaagactccattgatgacctcttttcgaagcttccgtgcagaaatatttgactctgtgtagaaacgcgaaccgttacgcgtggataaggacgacgatgcataaaacgactacgttttgttaatcaaaacttaatatgggcctcctcgtatttgggccttttaaaagcaagtagcaataatctgaaacgaatcagagaagatcgaattttctttgaaactctgtaaactctgtttctgtaaagttgttaaattttgtcgatctggtaggaagaagaagtacaagagaacaagaaanagtcaattcctttcgttagtcggcgaattctagaaacgatgttcaatttctggtatgattttgcgaattttttgccatctgattcatatgttattgatgaaattgcgtgatccagacattaggtctgttagcgattaaggaaatcttgttgatgtgtagtttgttgagctataatgatatatttgaggtttttgaggtgaattgacaagtgtagattttgctcagctactgatttagggttcatagttactgatattaggtttacaatgatgtgctgtataaatgcacctttcaagtttatgaggtgatgtattatattaacttggaagctgagatagttagttgatgatgtttcttttttttgttgtgtacgtgaaggggatcaaaagaccaacaacaagggcaatctcgtcctcaggaagcttcttcacagtcgccatggtactcgccttctttagttagctcgccaagctcatcccggcctcaaagttcaggtcagatttcagcacaagtatcaccgggtgaagcagctggcattatcgtcttcttgaaagacaaaaggtttgctctttttgtttgtttgtttgttatccttctctcgagtgtgcgttttttttgtatgtcttctttttgaatagtgtatacttttctgtagcgtggatgaactcaggaagcttctctctgacaaagatgcgtatcagcaatttctgctctctcttgaccaggtcaaagtccagaataatgtaagtctctaaaacagtcagttgtttctggatagctaagagtattactattaattgtagtcctaagaatggagcttcgttagttatgtgttgatattattcattggtgctctttcaagtatatacattgatattgtttgaggaagcctttatcatggcgtcatcttctacatgttgccagtaattagagctttctggttctttgttatagtctctaaaacagtcggttgtttctggataaccgagggtcttatctgtagctctaagaatatgtagcttctttagttctgtgttgatataattcattagtgctctttcaagtctatacattgatattgtttgataaagcctgtatcatgtcatcagctttctggttccttgttatagtctctggacgttaattttttcgtgatttgtttctgtccgtcagatcaaagatgagctccgtagagaaacattgcagctagctagtaagtactctatggttcatgtaattctacaggaaactttagttcaatccagaaatctagaactttccatttgatcaaatgtaacaggagacaacttggagaaggagccacagataatggaaaacagaaaccaagtgtgtatcaagaaccaacttttcttg

SEQ ID NO: 149207 - DNA, 1954 bp, Arabidopsis thaliana landsberg
tttgatgctcatattcgagttaaatttgcgaatttgtacaccaactcctatttgtctccggttcgttgactcaacaaggagcctaaagatcgagtcttgaaaactcatccacttttgcttcaaacttgaaatagttttggagttggtccagccataacgaaattttcaattaaaaaaagtgacttgatagtctcctcccttcagcatgtatctcatggaggggattagtcaactcctcaattttctccatcaatagtcgtgagtccaccgcttatttttgagatccagcttcttcggtgcgatactttcttgtcaagagaatcccacaactccttctaagtcttgacattatgatacatattgttcagcatatcggaaaggcgactttggatgtagaaatcaccatattctcaacgtggatgctcccaagcgcacgagggtcagtgttatctgctaggagaataggtttattctcacgtgtgtattggctcagcttaagcactgtaagatagaaaaacatcttcttttgccacattttaaatacatttctgctgaatttgtcgggaaaagaccaattaaattaacaaatatgtaacaaatcgcacgtgggacccagttggcgttgcagcgcatcaatcctaacttctctcctgtgggctcttttggcccaccaggtaggttattggtgcgcttggcgttcctcgaacctaagacctctccctttaacaaccttctcacaggacaacctgttaccaactaatttgtaggtttcaccaggtaggttattaagtttgctaatgttccttatggtttctaataagtaattgttccacttttgaaagttcatatcttcgcaatggaatgttaagtgatattaacaagcttgttttttctttttttatcaatgttaagtatttgtaacattttcgaaattttggacagaagatacaaagatgtactaaaagctaaagaaaaagtgacaatctacaaactaaagtacaaatagcataagggaagcacaagcgataacccaaacactaatattctaacttaacactgagatgaaataaacactgaaataaacagtagcgtcccgagatgaaacactgatatttaaaagcttgttgacttgtatttattatgttgattgtgtttaatgttgcttcagatgttcaaacttaatgccgttctatcgtttggttagtgcaaccgtggctaaatacgatgtggttcaacttgtgagaggtgatgtttggaagattgcccttggcactgcatcaacagcttcgattattcttggtgcgggaactaaaggcaagcgctttgctatgcccaacacgaggataatgattcatcaacctcttggaggtgcaagcggtcaagctatagatgttgagattcaagctaaggaagttatgcataacaagaacaatgtcaccagcattatcgcgggatgtactagtcgatcgtttgagcaggttctgaaagatattgatagggaccggtacatgtctccgattgaagcagttgagtatggtttaattgatggagttattgatggagacagcattattcctcttgaacctgttcctgatagagtgaaaccgagagtaaactacgaggagattagcaaggatccgatgaaattcttgactcccgagatacctgatgatgagatctactaaagccaagctcgtctagaagcaggtgattgatcattttgactataactacgttctcgttaatatttacccatggtttcttcatcgtttgctatttagtggtgaagattgaataatgtttgaatctttattgtcaagaagatgaatgaacataaacctagttagactgttgtgatttccattaaaggagaaatctgacatttctttatattcagggatcttcaaatgtgactaagactagcagtttcgaggaaaagctcaatatcttctgc

SEQ ID NO: 149208 - DNA, 231 bp, Arabidopsis thaliana landsberg
ataggggtgatggtgaaggaaacattgttacaagcgctgagtacttgttttgaagctctaaaggatgcttgtaagggtgcatcatgcgactcggaattgtgtgcctctctatgtaagaagaaatccagcggcggtgttggtacttgtagaacaaagacgacacaacccagtaaaggacaaccagaatgccactgcaggttttggtgtaaatcagatggaagcccctacaag

SEQ ID NO: 149209 - DNA, 2987 bp, Arabidopsis thaliana landsberg
atgaccgttgatattatgcgtttacctaagatgggaagatcaaacggctatacaagaagctgcatcacaaggcttaaaaagcatggaacacttgattcgtgtcctctctaaccgtcccgaagaacgtaacgttgattgctctgagatcactgatttcacagtttctaagttcaagaaagttatctctcttcttaaccgttccggtcacgcccggtttagacgtggtccggttcattcccctccttcctcctccgttcctccaccggtgaaagtgacaactccggctcccactcagatctctgctccggcaccggttagcttcgttcaggcaaatcaacaaagcgtgacgttagatttcactagaccgagcgtttttggcgctaaatccaagagctcggaagttgttgagtttgctaaagagagctttagcgtatcttctaactcttctttcatgtcttctgcgatcaccggtgacggaagtgtctctaaaggctcttcgatctttcttgctccggctccagcggtgccagtgacttcctccgggaaaccgccgctttctggtcttccttacagaaagagatgctttgaacatgaccactctgaaggcttttccggcaagatctctggctccggcaacggcaagtgccactgcaagaaaaggtattgttattactccataatacattaatcatttgtttgactagcctagtagtagttaattgattggttcgatacggtctaaaccaatcggtcaacgtactcagtgaaaatatatcatgaattcagatttcaaaattcattttttgcctcaaatttgttaatcatgaacaagtctagtagttatattaattagtctcagtaaaaaataaagaatacaaatcggggtttaatactttgtagaccggtttggtactatctaaaccaatcggtcaatgtatttagtgaaagtcaacgacagtaacttaaaccaaagtgcacgcctgataaggacaagttagtgggtgctgtcgttttgtgtagagaaagtttttacgttttaaaagtctttgtctgaccgttgacttttgctaacctgatgcatgttcatgttagtcgtgtcagcgcacgttaaatcatttcactaattacaatgttttattatttaattaacagccgaaaaaatcggatgaagagaaccgtgagagtaccggcggtaagtgcaaagatcgccgatataccaccagacgaatattcatggagaaagtaaaaacaaaaaccgatcaaaggctcaccacatccacggtaactatcgtacaccatcgctgttatccaccgctgatttatttgtgaaacattacagatctaacggttgtgatttgctttgtcgatttcagggtttattacaagtgtagtacatttagagaatgtccagcgaggaaacacgtggagagagctttggatgattcatcgatgttgattgtgacgtacgaaggagagcaccgtcatcaccagtccacgatgcaggagaatataactcctagcgtgagtggtttggtgtttggttcggcttaaagaattaattagtttggtagattttgtaatattttgagaaatagaggggttggttttgtaatatttttttctataacaaaattagttttagatttttttagtagtcttttgaatggattttaatcttactaccgagaaagagattgacagaaaaattcttactacattttcataatttcttttttgatatatttagtggtgtcatgtaaaaaaataatgtttagcaaagttattggtatataaatgtgtaggcataagtatttaatgatatggttcgtaaagttaccattactctgtttgatctagttatgatttgtgatggttgatttagtggagggttagacttttggaatggggttgttaatgcaatgtttgactattatgtaagtttatagaaagtcaaaaagagatttcaatgagttgttgggagatattagatgtggaggttgtggaggttgaacaatatgaattaatgcggatttgagggtcaacgaaatcattatgatgtcggaagacaaataatttttggaacaatattaaggaacatttgcgctatggaacactttttaatgaaaataagttctcactaaaggtatgacacatatttgcagtgtttgtttatgcgtatttcaaagttttgataaatatgtaatacttggtcattgaatgctttttgcagtgtttgtttatgagtattttgaagttttgttctattggatgttttggatatgatattgaccctccagcttcggatcagattccttttcaaatcgattttgtgcttgtggttgttactagaacttaagacgattaagatcttcacatatctaatgcaactagtgtttataaagtgttgttacttggttgataatttgttgattgtggcttaaaaaggtcttatatatgggagaagaatactgaattctgtcgtaattttgagaagattggagaaagaggttaaacatctgacataacttaatttgtttaatttctcatacgatttatacaatttcaactgaactattttgtgtccatttagcatggaacacatgtttaaaaacgaattaatgtagattagacgcctatttatatggatagtcacttgtttgtttgagtttaagatatatttttatgtatttaaacgaatttacatatcagtttgagtttataaaataggaattaaggtttattgttatacatttaattgaaattatatatttgtttaggtttataaggtagttgttagggtttaatggtatacatctaaacatatccgttattttttctttacctgatacattacgtaatttatttaatttttacgaggggttttttttaaatttttttaacttaattaaataatattttttttcgttttgtcaacaagtgaaagtgaactgatttagtagtacttgagtatccagaaaattgccaat

SEQ ID NO: 149210 - DNA, 3372 bp, Arabidopsis thaliana landsberg
caaaatctatccttactacataaacgtgtcgtttgagatattaagaaagaaactacatgtcgttctaagaaaagaaaaacgacaaggcgttattcttggaaagagctcctccaacggataaatgaaagatcctctctcctccaacgataagagaaccacgagaggacacagcatctgaaatcgtacaagtatctgaagaacataaattaaaattctttactttgtaataatggcatcagagttttgatcggagaatctaaaagtctcgacttttcgaattttgttggccgccttcttaaggacatgaatctcgcggtggctagttttcgcggcaatttcggcgtcttgtcgcaatgcagctcatgttgtagtcttcagtttcagccttttgtagctgctacttccagtctcaattttgggcaaacaggaacatctcgaaggaagaaggatctgaagcttgaaaggtatattgttttattcatcttcttcttttgttaatccgtgaggcgtgagcactgctacttctttgtctacttattctggtggctttgaatttagagttttcagaaagagagagactttggttagagtgaccgagacgcaaacggaaccagaaggcaatgatgatgaggtatttgcttttgtaccaatgtggcttcttcttctagagactatgattctgtttatgatttttcctatgtggaaactttttcgtggtccattagaagtgttagtacatatacgcgtctgagttcgtaagttcttctttgcaggataataaagaaggcaaagagagctctgcagatgatcctcctacagaaattcctactgagttgaattcactgtcaacggttgtgaatgaagcgccgagcaatgaggaggaaaacaaagctcagttcagttctcaggtattgtcttcttacttggaaactaatgcatccatagtgaagttaaagcgcaatttgtaagtttaagtttgggtagtctagtaatttaaacttgaaagtaattgaatctaatttgaaaacattgcataacgtcattacacagctcaatagctagcattgtccatatgcgttgtttcttggttttgtttctgaatgtgttgtactctactgcatttggaataggacggtgataaattagaagttagcagtgggtctcctcttcctggtgtgaatgtaagtattatcatccatgttatttacaaagacgacagcataatgtaatctggttgtttatcttttcacaaaaagttgttgtgaacagccattacaattggacgattccatgagactccccaaggaaaccattgatattctcaggggccaagtatttggatttgacaccttcttcgtaactagccaagaaccatatgaggtgagtcagtgagaaactcatcagtcttttttcctaacgttattaccaactttgcttttaatgaaacataaatacgaggttctgaaattctcttattgttggatctcctgacgtttttgtccaatgttggtagggtggggtattgttcaaaggaaatctaagaggcaagcctgctacaagttacgagaagataaagacgaggatggaggtaacaattctgctttttgggtttcctttcttaactatgatcgttgacaagcacatgttgtgacaaagagtaatagtgtattgctcatcaatctgcagaataattttggtgaccagtacaagcttttccttctcacgaatcctgaggatgataaacctgtggccgttgttgttccaagaaggtccttagaacctgagacaacaggtatattgctatatacttccatgttaataaggatctctctctcagattattaagttttagctggatactacatataatttgcagctgttcctgaatggtttgctgctggttcttttggattggtggcattgtttacattgtttcttcgtaatgtgcctgccttgcaatccgacttactgtaagaacatcttgaacatgttttctctagaacatgttatgcttccaaatcatctaactgaataaaaaatttcctcccatacatgaatttaattgcagatcggcatttgacaaccttgaactgttgaaagatggcttaccaggagctcttgtcaccgctcttgtccttggagtacatgaactgggacacattttagttgcaaatagcttaggaataaagcttggtgttccattctttgttccaagttggcaggtgaagatgcgatgttctatttgaaagaaaaggaaaaagctttcagctgaaatttggttttttagacatttgatgaacatgttttagatggcagataggctctttcggtgctataacgagaatcaaaaatatcgtagccaagcgagaagatcttttgaaggttgcagctgcaggacctttggctggcttttctctaggcttgattctgtttcttatagggttactcgtgcctcccagtgacggcattggcgttgtagttgacgcatcagtgtttcacgagtccttccttgctggtggtattggtaagctttagctctcaatcaaatatgataaagtgttgcaggctgaagctggagagttaatcaatgtttaaattttgtttctttttctcttatagcaaagctcctactaggtgatgcactcaaagaaggaacttcaatatctcttaacccacttgtgatctgggcatgggctggacttctcatcaacggcattaacagtatccctgcgggggagctcgatgggggcaaaatagctttctccatttggggaagaaaggtaacactaattagaatgacttaaaaagcttaacaatgtcttatactattcgtctttgtgttcgagtccatttcccatagtagattgattaggtagtaatcagaattatatatgtctcctaatgatttcagaccgcaacacggctcacgggtgcatccatagcgcttttgggcttatcgccgttgtacagcgacgtggcattctcggggggggttctggatattcttcctgcagcgtggaccgattgccccgttggctgaagaaatcacggtgcctgatgataagtatgtgtctctaggaatcctagttttgtttctctccttgcttgtgtgtttgccttacccatttgctttcacgggcaatgaagccatgatgattggcttgtgaagtgactcatatcattacaccgcactataagaaatcagagttatagttgtaactttttgttttggtctctatgctctactttgacatctaaagttatgtttttgttcttgctctatatttttactctcatggagcagtttaggaaacaaaccaaatttctcacagaaatgtgaactaatattttgctaatcaagttattaattac

SEQ ID NO: 149211 - DNA, 805 bp, Arabidopsis thaliana landsberg
tacagcttgtggagcattacgagaatgtagtggctaccgatataaacgaagcacaacttcaacgagcaatcaaacactcaagaatcagttaccatcacactccaacaacgatatcagaagatgagatggtggatctactcgggggagaaaactccgtggatctcatagttgctgctcaagctgtccatttcttcgacctcaacgtattttacaatgttgcaaaacgtgttcttcgtaaagaaggaggcctaatcgccgtttgggtatacaacgatatcattatctcgcatgagatcgatcccataatgaagcgccttgtcgactctactctaccttttagaactcctattatgaatttagcatttgacggttacaagacattgacatttccttttgagaccatagggatgggttccgaaggaaagcctataatgcttgacattcctcataagctatcgcttaaagggtttatcggtttcttgagatcgtggcaacccgcaatgaaagctaaagaacgtggagttgagcttgttactgaagatttgatctccaagtttgaagatgcttggggtgatgatgatgatgttaaagatatattctacaaagctcatatgattgttggaaaactttcggtaaataattcatttacttaatatctatatagttttggtataaagttcatgttataaatgaatcattcgttatttatatataatgcaggcttcagatatagagcggcatagcaagagatttgaatcgaactgcgtagttacaacactaaaggatcataacaactcggctgtct

SEQ ID NO: 149212 - DNA, 1643 bp, Arabidopsis thaliana landsberg
  unsure (1)..(1643): unsure at all n locations
ttgttgtccaccagcttcagaaaaggcttgatactttctggactgtatgcacatcttgcaaggttcagtatgagtatctgcggaagtatgtgaataagaggttgtcatgtaagaactgccgaggtgcatttattgctgtggagactgggccggctcctgttagtgcatcacttcagtatgcgcctccatctcatacaacaagtaatggctatggaggtcatggctatgatgctgtttcacgcatgcctaccaattccacttatttcttaggtcagtatccagcacatggatatgaatatgttacaaatgagtcatatgactggagctcatatgtgggaacatctcctgngaatctggagtcaaaccgaatgtcttcagcatccaacggatatccttataagctcaacaatggagtagtctgtaaaggaagaaaaaaagtcaaagatgggtctaacaggacaagctcgatgaaaggaacagcctctgatctgatatatccaagcccacccaactggtctgctgatccttaagtgattaaagccagcagacctgataagaagaggaatgttggttttgggtcatctggtaatggatttgatgagaacattacattatcaaatccagaatcgaaagcaacaaatttggatgcaaagatggaacatgacttcaaacatcctgggaagagttatggtttaatgagacggtggtcttctacaacaggattggatacacggaagctactgattcacaaagctaaaacagatattaagcaaagactagagattatgagattggcttcagaagctgctgcgacagctacagaggacgcgactccccttgatgaagtaagtgcgtccttcaaggtgggggatgatgtatccagattaggaaaaaatgtttcttttggtcatccacctgttcggaaaataaacgggccaataacagttccagactccgacttccatgactttgataaaaatagattagaggagtgcttcgaggctaggcaaatatgggcaatttatgatgaagatgatggtatgccacgcttatattgcatggtccgggaagtactatctgttcaaccttttaagattgacatagcctacttgagctccaaaactgacatcgagtttggtacaatgaaatgggtgcagtatgggtttacaaagtcgtgtggacatttcaggatacgaaactctgacatagttgaccatgttaacattttttctcatcttttgaaaggcaagaagacagggaaaggtggttgtgttcgaatcttccccacagctggggagatttgggctgtctacaagaactggtcactgaactgggacggatcaacaccggacgaagtgaggcaccaatatgaaatggtcgagattcttgatgagtatactgaacagtatggtgtgtgcgttacccctcttgttaaattagagggctacaaaaccgtgtatcacaggagcacaagggaggacagtaagaagtggataccaaggtgtgaaatgttgcggttttcacatcaagtgccgtcttggtttcttaaagatgcaaccagcggctttcccgaaaactgttgggacttagatccagctgcaatccccgaggagctgcttcacatcggagcaggaaccaattga

SEQ ID NO: 149213 - DNA, 791 bp, Arabidopsis thaliana landsberg
ttttggatcgggtcaaatctatcaacatgtcttatttcaagttcccacacgacgtaaccgggtcggatcatcactcccactcccacctagatttacacccggatccggctccggcaccgttacaacgagctccttctcttctggatcgggtcaaatccatcaacatgtcatacttcaaattccagcagtataacccggaggagaatgattatgctcatcacacagaaccgacccgattcgaaagtattccgacccggatgggtcgggttgacccgattgatatctcaaaattcagaatcccggaagaagatcaaccaaccggaaccggagtgaacagtcaaattaacccgcccggtttaactcgagctccgtctatcttagaacgggtcaaatccattaagctatcctccttctacagatccgacccggatttggatcaaaaacaaaatccggatccggttcttcacgaggagcacaagcatgtacgaagtaaatcggaatcgaaaaaaccggtgaagaagaagaagaaagcttcaacgaagatgacaaaatcggctagcgagaaatcaggttttggtttcgcaggaagccatgcggaagcgccggagacggtggaatccctcgaacggagaagaccagatacaacgagagtcgaaagatcgacgtctttcggcgacggcgaagatggcgtcgacgcgaaagcttcagatttcatcaacaaattcaaacagcagctgaaattacagagactcgattcgattctgaggtacaaggagatgcttaaggcccat

SEQ ID NO: 149214 - DNA, 755 bp, Arabidopsis thaliana landsberg; identical to SEQ ID NO: 18572

SEQ ID NO: 149215 - DNA, 4664 bp, Arabidopsis thaliana landsberg; identical to SEQ ID NO: 37961
  unsure (1)..(4664): unsure at all n locations

SEQ ID NO: 149216 - DNA, 899 bp, Arabidopsis thaliana landsberg
aagcgaggatcgtggagtatcttgttttcatggtttgcgatccgagaggttggttgttgttttctcctatgaaaaagaaatggagggtgggacctaaaatgccctgtgacgagtgcttcaaccacgcggataaagagtctttggctgtagatgacgagcttttggtcttcgggagagagttgtttcagtttgcgatttggaaatacagtttgaggtctcggtgttgggtcaaatgcgaaggaatgcatcgtcctcgctgcttgtttgcatcgggaagcctcggtgggattgctatagttgcgggaggaactgatatgaatgggaatatactagcatcagctgagctttatgattcttcgtcagggagatgggagatgcttcccaatatgcattcacctcgaagactatgctcgggttttttcatggatggtaagttttatgtgattggaggcatgtcgagccctaatgtatcagtcactcttggagaggagtttgatcttgagacaaggaaatggaggaagatagaaggaatgtatccgaaggttgacccgagcagctcaatctccaccactagctgtatcgggtaacaacgtagcgattcacggcttgagtactcaaccaatatggttaagaagtatgataaggtgaagaacaaatgggaagtgatgggaaggttaccgccgatggtggactcgtcaaacggttggggactggcgtttaaaccgtgcggggatcaattgttggtgttttgtgggcaacgaggtcctcatggcgagggcattgtggtgaattcttggtgtccgaaatcgggagctaaagatggaaacttggattggaaagtgcttggagttaaagagaatgttggtgtgtttgtgtataactgcgcagtgatgggttgc

SEQ ID NO: 149217 - DNA, 471 bp, Arabidopsis thaliana landsberg
cagtggaccaaatgtaagaaacgatccaaacgttcgagatctgatcttcatcataaccaccgtctcactgaggaggagtatctagctttctgtctcatgcttcttgctcgggatggcggcgatcttgactctgtgacggttgaggagaagccgagttataagtgtggcgtttgttacaagacgttttcgtcttaccaagctctcggtggtcacaaagcgagtcaccggagtttctacggtggtggagataatgataaatcgacaccgtccaccgccgtgaaatctcacgtttgttcggtttgcgggaaatctttcgccaccggtcaagctctcggcggccacaagcggtgccactatgatggtggcgtttcgaactcggaaggtgtggggtctactagccacgtcagcagtagtagccaccgtggatttgaccttaatattataccggtgcagggattttcgccggacgac

SEQ ID NO: 149218 - DNA, 1020 bp, Arabidopsis thaliana landsberg
ttaccgatacttccggtgcagaaatcctctgatgtagtattcgtgaagcagctggtgaactggactttgccggcgttgcagagaaatggcgttggagaaggctggaaaggattcctctatgctctggaaagtctttacgacaaagatggtgcaattaagaagataaagagattaaatatgtatgatgatgaaactctctcagtaatctattgtggtgggttcacagtagagactgatgtcatggcggtaggctggaaaatgttgcttgtttgttcattattgtaaaaactatgatactgcagtaaaatcctttggaatgattagacatatgatcatgaaagcgacatgtgtgattaagttagtaaacgtttttataaaggaacctgtctagcattttattcacaataaaagaatgaatgaatcatcaaaatacaaaagaatgaataaaattagaagacaaaagttgactttcatcgaacaatcaaaacttttccacacctctcaatagacagagagaggctatgaccaactgtatcccttaggaagcttcagctccatgtagaggttatctaagtcaaaagctctgtttcaccaactctaaataaacatcgtatttttcttctgagtgctactaattcagttcccactttcatcatcgtcagctagacatttcaggttaatgaatgcttcaagagcttctctcatccaccaattctgacatacttctcttgcttcatccaaacttacccatctgcgttgtctcatttccgcctcaggccatcgctcgaactcttgactgacaagcaaagcaaacatatacccatcgtgaattatgctatgtcttttgcttttgtattgccatttcccaagcttttcttcgagctctcctgttacacccgcttcttcgatcgtctctctcaaagcagcttcctccattgattcatccgtctcccaacctccttttggaaataacattcctttgcccttttgagcactgacaagaagaacttggattacttg

SEQ ID NO: 149219 - DNA, 1385 bp, Arabidopsis thaliana landsberg
tacatcgccggtccgatcattgcagtgtactcgtctatgtatgatcttcaggtgatatctataatgttggttggtcatctccgtgagcttttcctctctagcacagccattgctgtttctttctgcagcgtcaccggtttcagcgtcgttgtatgtctctttcttgatctttctctttttcttttttattagcttaagattctaaattgtggttgtggtaatcacacagtttggattggctagtgcgttggagactttatgtggtcaagctaatggagctaagcaatacgagaagcttggtgttcatacttacacaggaattgtctctttgtttcttgtgtgtattcctctctctgttctctggagctacattggtgatatactttctcttattggacaagatgctatggttgctcaagaagctgggaagtttgcaacttggctcatacccgcgctctttggttacgctactttgcagccgcttgttcggtttttccaagcacagtctctgattttgcctttggttatgagttcagtctcttctctctgtgtccacattgtcctctgttggagcttggtctttaagttcggtcttggaagcctcggtgcagctattgcgatcggcgtttcttactggctaaacgtgactgttcttggattgtacatgacgttttcttctagctgtaggaagagtcgcgcacctatctccatgagtttgtttgaaggaatgggagagtttttccggtttggaatcccatctgcgtctatgatttggtatcttaagcttctcttttcatgcctcttttggtttagtcatagagttgttgacatgaatcttctttggtgttgttggattagcctcgagtggtggtcattccaatttctagtcctgctctctgggattttgccaaatccgaagctagaagcctctgttctctcagtctggtatgtttcctttaatcttctaaagaattggttctggaatggaatattatcatacaaatcaggggctttcattcttgtttaacagtctttcaacacaatcctccttgtaccaaatcccagagagtctcggcgcagcagcaaggttctttcttcctgagtttcccaattttgcaatatggagctatctatctaaaactttaaacccttctttatgttgtggctgttgtagtacaagagttgcaaacgagttaggagctggaaacccgaaacaagctcgaatggcggtttacacagcgatggttataacaggtgtagaatcaataatggtgggtgcaatagtctttggtgcaagaaatgtatttggttacctattcagttctgaaactgaagttggagactatgtaaaatcaatggctccacttgcttctttatcggtcata

SEQ ID NO: 149220 - DNA, 1735 bp, Arabidopsis thaliana landsberg
acatttcgttgcagaaaacatatacttttccgacaaaacatggaagatgttaatcaggagaagaagaaagtacctccaatgtctgaaccagaaagatccacaccgattaaggtaacaatatcaagaatctttatcttaaacttgaaccaactttttgaaacatcaacactacaccatgttcttgattttagtttattgaaatcttgataagtcgaatcttgtgtttaaaatgttttttttaagtaatttagagctatgtcccctcgagtccaccttctggtgagcacaaggctttgcttttttgttgcagactacagtaggacagtatcgtttctgcaagtcatgtgttgaaggaagtagttgcaggacagtgaggtcaagaaccaagcttatgaacgttttgatagaacgtggaagacctcacgaggctcaaactgttttcaaaacattggcagagacgggacatagaccgtctttgatcagttacacaactcttttagctgcaatgacggttcagaaacagtatggttccataagctctatagtctctgaggtggaacagagcggaaccaaacttgattctatattcttcaatgctgttattaacgctttctctgagtccggtaacatggaagatgcggtgcaagctctgttgaaaatgaaagaacttggtctaaatccgactacgagtacttacaacactttgattaaagggtatgggattgcaggtaagcctgagagatcatctgagttactggatcttatgttggaagagggcaacgtcgatgttggaccgaatataaggacgtttaatgtgttggtgcaagcctggtgcaagaagaagaaggtggaggaggcgtgggaagtggtgaagaagatggaggagtgtggagttaggccggatacggtgacttataacacgattgcaacttgttatgtgcagaaaggagagaccgtgagagctgagagtgaggtggttgagaagatggttatgaaggagaaggcgaaaccgaacggaagaacgtgtgggattgttgtgggagggtattgcatagaaggaagagtgacagatggtgtgaggtttgtgcggagaatgaagcacatgagagtggaagcgactcttgtggtcttcaattctttgatcaatggctttgttgaagtcatggaccgtgatggtatcaatgaggtaactttaacactcttgttaatgtcttttactcaagaggttgaattggtaggtaatcaaaaaatgaaagtgcaggttcttaccttgatgaagaagtgtaacgtgaaggcagatgtaatcacgtacagtactgtgatgaacgcttggagctcagctggatacatggagaaagctgcacaagtgtttaaagaaatggttaaagcaggagtcaaaccagacgctcacgcgtacagcattttagctaaagggtacgttagagcaaaagagccaaagaaagcagaggagcttcttgagacattgatagttgaatccaggcctaacgttgtgatcttcaccactgtgattagcgggtggtgtagcaatggaagtatggatgatgcaatgagggttttcaacaagatgtgcaagttcggggtttcgccaaatataaagacgtttgagactctgatgtggggttacctagaggtgaagcaaccatggaaagcagaagaagttttgcagatgatgagaggatgtggtgtaaagccatagaattctaccttcctgctc

SEQ ID NO: 149221 - DNA, 3362 bp, Arabidopsis thaliana landsberg
agctcattccttttgaatccacagcggtgtggtgtgaaatttccacaacgttctaaagaagcacccctgatgcttgaaccaccacctccagtgacacagtcttcttcctcttcttctatgaatttaatgtccattggctcatttagaaggcttgacgaaactatggctacagaaattgagagcttaaggtaagcttttttctttctttctttcgcaaacaaccaatcatttctaaccttaattatttttagttacttgcattgttgattgattgtttcagcttatcaagccttgaatccatgagaaatgtgatggatcttgtgaatgacatggttcaagccgttaatccttctgataaatcagtatgtgtggaattaatcactctgtttcaacaatacttaaatctctctaataatatctctggtttggtaaaatatatcatttttcatatgcaggccttaaaagatgagctaatagttgatctagtagagcagtgcagatctaatcagaagaaactaatccagatgctcactacaactgcgtctgtcttctccacctttctctactacatcttcttcttcttcagctttacttgttcttcttaccaataagacatctgttctgccttcttcttgcctgcagggacgaggatgttctggcacgtggtctcgagctgaatgactctttgcaggtagtgctcgctagacacgacgctattgcctctggcgtctctcttcctttgttgttgcaggccccagagccaagagagacaagctcttccctcaagacttgtggtgctgctgctcttgagtctgctgactctgagtcttcttcatcatcatcgagcagtgaaagtgaaacagatgaagtggaggatgttaaagatgactttatacagctagccaaaaggttaaccattcactcactaactcaaacacactagtaccttgccagtcacaaactagtttatagacgacattctcgaatttgcaggcatgctctattaaatgccctacacagcgatgaagaagaagaaacattgcttctaggcaacgacaatgaaaaaacagcagaagcagaagccaagacacagtgcaaagatctagctttgttcgacacaacaacaacaacaacaacaacaaccaccaagtcagagcaggatattattgaacttctcagcctaactctgtcaacaactgctctgccctccccacaaacgcaaccgcagacgcagcacccatcgttttttgctgatgataatattcttatgaacagctacgttgtcccctgggcacagtcccaagaagaaccacaagtcccaaaaatgactcagtttgctccatcaggacctcagtttcagccatggcctctgcagcagcaacaaccgtattcatacggttatcctcagccacaatggagcggtggccaagtaaacagtaatgacacaacattctggagccaaggaggcaatgagaatatggtctttgagagaaacttgcaagtctcaaactcatttcctgctagagccacgggcacatccggtgctgctactgcggctacagtggacgggcagccgcagaggccatatgttcctccatacaaattgtttgaagatcttaacgttttccggaacacagatgggggcgttaggagtagcaaataaatatgttgtaattaggatataataattccaaaagacattcaaattctattagaaattgacaaagataactaataagactttcaaagtgaggcaaaaatctttggaaacataatatatttgataaggaataaatagttgaagttgacacagaatgactactatttacaaagcatttacatgcgtaaattctatttggcaaagcctcctcaattagttttgcttggatcttctcatcggaggctagttaatcaattctataaataacacctaattttaccccaactccatattcactttgcatttgattaacttactagttgtcatgatctatcttggtaattgtgtgttgtggtgggtgtataaggagacgaaggagccagcagcccctgcggctaacaacatctggtaagggtgaaaggcgaggcaactgactgggccaatctgttggcccatgaaggaagtgtggtactttatgatcccaagttgctctcctttaaggctgaacacttttattagctgttttgctgacccgctcgctatgattggagcatgtctatgaacacccaatgctgtcagtgatcctctatgcgcgtctatagtcaggtatgtctcctttggtcttctcagatccagaaactgaatgtcacctgcttgtgatgcgctcacaatctgagacaacaaacatgtcaagtgagtaactaaatgccttttgtactgactggcgagaatcagagatttgggtgtgtaacctttgctggatcgagtccaggctgaaagctgagtccaactactttttctactcgctgatgaggccgagtggcgcacacaagactatacattggagaagtgagatttcttctactcttgaactaataatctttgttactatgtttaaaatccaaaggtgagagaattaaacaagctctctaaggtaacttacaagtcaggtgtgcgaacgtcgtagagtcttacagatccatccgcaaaaccagcagcaagttgactcccatgcacttgagaagccgactgcaaataaacacacacatacaaataaagagactcatcaagcaagatccgactagtccttgagatcctgtcttcatttagacgaaaagaagatctagatagtatctatttgtaacacagatatccaagtttgcatatgctggcttacaagggctgtgacgctgcacccggattcaaagggcatagatttgacgagctgttctttatccaggtcccaaaccatgattgataacgattccccagaaacatactgtagacaccaataatgcgtcaaatacaaagtagataagtttcacaactccaaatataaaatgatagcatgttgttaatggagtggccatataccaggtaacctgactgttgttgccagtccacgacagcgttcaggccacttgcaccaggcttctgactttggattgacgaaaaccctgtgacaagtttttgtctaccctttgttgcgtagtctttccatatacggactgatccatcgcctacatgagatttcagaaccacaagtaagagcttttaacagccatactcaatcaataactaacttgcaaaagacgctctggaaagagttggaacattacaagaggcaacaagtagcagcgagtcatcaagttcattgacaaggcagagatttgaaattcctttgtcaggaaaatcgttattg

SEQ ID NO: 149222 - DNA, 564 bp, Arabidopsis thaliana landsberg
aagaggaaacaaagcaagcaaaaaagagttgccatggaagctcttattgcttccacttccttcttcgtccccatctccaactcttcctcctcacacattatcaataacagattcttcccttcattttattctcccaacttaaatttcgggacttttcggaaaacttccttgtcatcatcacacctcgtcttctcatcttctgcaatttccgcaccgccttcttctactgttcttactcgaaacagctattggatggtgttattggataaacctccgcattgggtttcttccaaatcagccatggtagattattatgtcgagattcttgcgaaagtactgggaaagtgggttctttttcattgcttgtttgtttcttttgagctttgtgcttcaactttctgcttactattggtactgattctgttgtttgcagcgaaaaagatgcgcaagtgagtatatatgatgcttcctttgatacccatttcgggtttggttgtcatatcgacgaagatgcttcacgacagctcgctagtgagtattctatcacagagagtttcagattct

SEQ ID NO: 149223 - DNA, 4240 bp, Arabidopsis thaliana landsberg
tggcggagttgccaaagttcttgggaattatcattgagtttagtttagagatttcgtctactttttacttttattttgttactcacgcgtttcttgttttcttgttttctatgtttcaggtcaatgcctaggcaaacaaggagcacacaatagaaggagttgatcaacttgtctgttcttgagttgggaaaactcgaacgcaccaacaacaaaactcagagattagcaatggctaacagagccatcagagctgatgaggaaggagtttgagagatgaggatgggcaagcctacaatgaggcttgtcagagattggatgatcatgtacttatccaccctgaggacgccaatgaggatcaggcgcgcctcaatgcacaattagctgccagagatgcagcagggctcagtgtcgagcgacaccaactaggtgtcgatcgacaccttcaggaccagaacgaagatgcgattggtgtcgagcgacacaacagaggtgtctatcaacaccaaccccagattcctgtagttattcttccatctgcggaaccacgtcgtactcttggggatttcaacaggccggacctattctatgctaatcgatcagtgattgtaatcccactttttcagaggaacgactatgtttagcttggctactttgctttacttggccagcatcctttccatggcttgtctcatgagcagttaatggacaacatcaagcgttttgaggaccttgttttgagcagcaaagctaatggagtgtcaaaagactatctactgaggaagctcttcccttattcacttgctgcggaagccgcttcttggctgaaacaactaaatgcaggttctctcaagacatagagaagcatcaagatagccttcttgaacaatttctacagtgatgcttagtctgtggagttgagaaagaagctgtctaccttcacacaaggtccagctgaagctttcaaggctgcttgggttcgtttcaaggagtaccaacgagattgtccacatcatggtttcagtgaggtacaacttctaggtaccttcttcagaggagttgattggagataccagatggctctagatgcagcaagcaatgataacttcaatacacgttacccagctgatgctacagccctgatagagaaccttgcttgcagcaacagtaccaagaatgctgattttgagaggaagaagattgctggagctatttcaagaaatcagatggcagaggtgaatgctaagttggattcagatcataacttacttacagagaagaagcatgtccactttgctgctgaggcataaaccattgagcctgagcctgagaatgagttagaggaaggagtcttctacatagatggtcagggatacaggaagtttgagagagtaagttactattgagcctgagcctgagtcagaggaaggagtttccgtgaattcaatcctaaaatactgcaattgatctcttatttgagagagtagttctaggtaatttgaaccataccatatacaactgggaccgtgcaataaacaagagagttaggatagactttgaagcaaagctgaagaatagaatctgcgatcaaatctgtcgctggaagggaaagtggatggtgaagggagatgaggcaatgccgcagtggcttgatcctgaggtgtgggctggtcttgttaggtattggaaagatccgaagttcagagttaaagagtataaaaagttggcaagctcgatatcatgatccaaagggcctcggcatatctaaacaccgttctggccagacctcttacaaagctcggattcgaaaacatgtaagttaagtctcaagtctcataccatttcttaatctgcaatgttataatgataactgaccttatatttttcatgtgctttagtgtgagaagaccgaagaaacgactcctgatttccttgtgctcttagatgagacacacagaaaagctgataggactttcattgatggaaagtcccaagagatctacaaggaagtgtcatccaggatagcagaggaagagactcagctgtgttctggggagagttcagagagcattgcttcaggtggattgtctgttcaagccatgaacatgatttatacccatgtaagctttgtcttttaattcattatagtttttgttggattaattgaatttattgtcttaactgctttgtatttgcgttttgtgtatggtgtttgaattgctttgtatttggctgttgtgtttttggtatgagattctcgtgatattaggcgatattgctttgtcttttgagatgtgtcattttgtctgaattcctaatcatatatgttctaccacttacatatgattctttttttttctgaattgcattatcttttgagttgcgtcattttgtctgaattcctaagtgtttatatgttttaccacttacatatgattctgtttttgtctgatatgtctgaattgcattgtcttttgagttttgtcattttgtcggaattggtttgtctgatttgcaggttgctccgagaaagaaacgaaggatttatggggttggatctctgcagtttgaatcatcctcagcccatagtggtccaccccttcctcgggatgatccagctttactctctgagaagttggttgtggctgaagcttgtattgcaactcagactgagaagatcaatagcttcgatatcctgtttgactatcttgctgagaaagatccagctttagctgccattcttcgatgtggttccttgacacagactagaccggttcgcgcaaatgaaccacctgtagctacagctccggaacaacaagccaatgagaagacagctgctgctgctgccctagctaaccttgcaacaagatcctctacatcattagtattttgagaacattgtctttctcttttttccttgtaatctttttagaacatggtttcaaacattggcattgtagtatacattttagataatgataatttcagtttcttcttcttcttgtgtctttatttaagaagcaaaaataatctctaatcaaatcctaattaattaggtaattagagtctaattaaccaggtaattagagtctaattaaccactaatcaagccttaatatatcaggaaatcagttgcaaaatactagcaaatccatcgcaaaagaaaagaatcgcaaatccctcgcaacagttgcgagggaagtactagaactgtagttgcgtgtgttgcatgggaattgctacatataaccatttgcgagaagcgatttgcgaggaactcgttttcctcgcaaatcccttgcgtatagctgtttgcgagggattagcgagtaattcttccctcgcaaaacgactgttttcttgtagtgtctcttcatcctcgtcttcagctccctcgatcttgatcccttgaagaaaaataacataagagatcctaaaatcaaagtccccatttatctcgaaatatgtaccaggactaaagtcaaaagagtttggtgatgagttacttctcatcctcagaagtctcgaacagcttcaatcagattctcgaggagcacaaacggtttcaaatagatgaataaaaccatttgacaagtaaacgtcaatttgttgctaggtccattttgatctttagttctcatgtttgtttcttcgctaataacataaaagagctttatttgcgaaattgataaatttagatggaattttgagttggtttatgggtcaagcacggcggtgaatctcgttatgctattgtgtacgctttaataaaaaatatttgagtttgtttatgtggccaccaaataatatctccttgaatactcacccaaattataaattatctatagttttttgaaccgaaaaataacatttccaccagagttatctataaaactaacttaaatctcttcaatcaaaattttcgtatattccaccaaaccctcctaaatctttaattgaatactacttctttagatgtgtcacccatgttatgacatatacctgtattaataacctttggcaaagagaagtgcattaatctagaattgagaatttctaaacatgaatttacaagacaatcaagggagctagatgcattcactttcagctctagtgatgtagcatctactacttgccttttagagcaagttgcagcaaaatgtcccttcttatgaaatcaataacatgttggttcattcgattttaaagaatcataggacggaccttgctttagtccatcatc

SEQ ID NO: 149224 - DNA, 1936 bp, Arabidopsis thaliana landsberg
aaaactccataaagctcaaactttttctcattctctctctaaacctaaaatctttttcacactcttcttcatgttcaagcaatgggaaacctctgttctttgtttactccgccaaaacccgtgaagaaaagaaaacccatcacaaaaagacaatcttccatcggagcttcttcttccgggtcgggtcttaatagtaaccgttggaacaatcgggtcagatcatcttcttctagaagagacaacaagttcgaagatgctatgattcaagaacacgctcttgctgctgctgctgttttgttccgacagcaaaaccggtgggggaggatcgttgccgtttgatcggtctgcttcacaacgttaccaaggttcttgttcgaagaagaatcagttgcctcgaagctctagttcgaggtcaaggtcttctacggatcctctgttacaacctcatcagtttcttaatcaggttcttttcttcttctttattcttacttttctttttttacctcattaaagatatgtcttaattagttttcttacttggcattaaatgaaattttatagtatagtttcttgaatttttgttggctcaacgtattaagtggttacaaatcaatgtgagtcttgaaacttgctgactttatatttgtttcattggttattgttaatggtgtgaatgttgtgacaatgagattatattatagaggatgataagcacataaccagagtaaaccggtgtcatagaaaagagatgtggtcttgttatggctccttaactaatgggattgtattctccacgatcttagtagtggatttagtggttagtttctttcttatttttgtgtatttaaagacttcaatgtcaagttaaggaattagacttgaaaattgacaaaacagagtttatctctttggtactttgtgtgttcttgtgttaagacaaaacacatctctttggctttgaggagggaccacctatcagaggattttgatgattttgatgttgaaactatgatcataatcaagattctaacttgaaaccttttatagttacttaacattttagccaaacatgcccaaatatagtgttttgagaatattctcacctaatcatacattttcttggagttcatattttttctcgaagttaaattcttttttttttactgatctttgagtagggtataaagctagaggacttggaaacaaaccattttgtccttgttcatggaggtagttttggcgcttggtgttggtataaaaccattgcacttcttgaggaagatggttttaaagttaccgctatagacttagcaggttgcggtattaactcgattaatataaatggcatcgctagtttgtcacaatatgtcaagccacttaccgatattcttgaaaagcttcccataggagagaaggttctgtttctctttgcattcatcttttactcctttcccttttatttcgtctttgaaaattggtaaaatgtattatgtaaacttgtaggtgatattggtcggtcacgattttggtggagcatgtatatcttatgctatggaactctttccttcaaagatttcgaaagcggttttcctcgctgcagcgatgttaacaaatggtcaaagtacactcgatatgttctccttgaaggtttgctttctcatatatattcttctcatgtttcaagctttgttccgcgccatagtgatttcgattacaacacactttgcaggccggtcagaacgatttaatgagaaaagctcagatatttatctacacaaatggtaatgaaaaccctccaaccgcaattgacttagacaaatcacttctcaaagaccttttgttcaaccaaagcccttcgaaggacgttgcattggcttctgaaacaaaaaggtcaattccatttgcgccggttcttaaaagctctctctttgaaatg

SEQ ID NO: 149225 - DNA, 2493 bp, Arabidopsis thaliana landsberg
  unsure (1)..(2493): unsure at all n locations
agttttgtctgtgtccgagtggttgggaggtcgctagcccgagggaggttgaggcgatatatgctggttgtgtaccagtgatcatatcggataattattcattaccattcagtgatgtgctgaattgggattccttctccatacaaatccctgtttctaggataaaagagatcaaaaccattctacaaagtgtctctctcgtaagatacttgaagatgtataagagagttttagaagtgaagcatcatttcgtgttgaatcgtccagctaaaccctacgatgtgatgcatatgatgcttcattcgatctggttaagacgacttaatcttaggcttggtacatagtatacaattttttgttatgttgcgaagaaatattaagtgtctaagttcatatgagttactactagctttgtattctttccataaatttgcaaagttctctcttgtaaaaatatatacaacaacaaacacaatatcaaagattttcttattaataagagaaacaaagcatttgttattcttgttaattaatactaggtgatcacccgcgctacgccgcagttttttcgatttttttgtattgtttaatttaaatataatttttatttatctaatcattcactcatgtaataagcaattacttttagtattgaaaaaaaaaaattctaacaacattctcaacaatgcatcacacacataattcataaacaacgtttgtcttaaaccaatttaacagaaggtagtgttagattctaagaacctaagaatttgatgataaagctctttacgtattctttaccctcagtgatttattatatacatataatttaagagaatataaaaatcaatttaagagaataacttactcaaatcattaagtaattcacgactattatacactcgttagtttggattacaaaaaagaaaaaaaactttgagtgtgagaaaactattaaaatggttttattgaaatatcatgtaatattaaaacaaatttagtaatagtacaattaaatatgtaaaataaaataataaatttttcattaacctataaattagaagttgaagagcttacattaattatttaatagacacatgtcaaatgctaaagtgatgatgtgtcaatcatatggagagagttgaccaacttttcatatatatgattggtaagaaaagttgtgtgtggttgtagttgtactacaagcttagtagaaacaaaagtattattgtgtaaagcatattgtatttttatgtattaaaatacagaagaaacgtgatacaaaatttggcgttttccactaaatcaaaaagtgagcaccattgtaatcgatgaacagtagaatttttgttttttctttacagttgaataatataatactaaatactaatgaactcaaatttttacatgtgaattttatgtttgttacatgttataaactcagataaaaggtttcgctatggaaacactaaaacgaagctcaaaagtatggctacaagagcttcgttcaaacctaaacattttctggggaacaatcgaatccgaaatctccaaaaacggtgccgcttcatatatcttccctctccaacgttgcatcttcagtttcctctgcgcctctctcgccggcgttgacgcttccgtatcgccggacatcgctgagaacggttggaaaacaatcaatacttggcttgcgttgcaagttattcccactgctaaacttggcgtagttcctcagcctcttgaagagattttacttcatacttggccttatccttctctcttaatcgccggaaattacaaaaagctttacaatttcatcgacgagaacgccggagattgtctccggttaggtcaagaagaattcgggttgacccgagatgaggctattcaaaatcttctctttgttttaggttttaatgcctacgggggcttttccgtcttcttaccttctttgatcgggagaataaccggcgacaattccggtttacaggagaggattagaaccgaagtcaggagagtttgcggatccgggtcggatcttaatttcaagacggttaacgaaatggagctggttaaatccgtggnnnnnnnnnnnnnnnnnnnnnnnnnnnnnnttccgctgcaattcgcacgtgcgaggaaagattttcagataagttcacacgatgctgtttttgaggtcaagaaaggtgagcttctttgtggttatcagccgcttgtgatgagagacgctaatgtttttgacgaaccggaggaatttaaaccggaccggtatgtaggtgagaccgggtctgaattgctgaattatctctactggtctaacggtccacaaaccggtaccccgagcgcgtcgaacaaacagtgtgcagctaaggacattgtcactctcacggcttccttgctcgttgccgatttatttctccggtatgatacgattactggtgactccgtttcaataaagctggtggtaaggctaaataagtaaagattgat

SEQ ID NO: 149226 - DNA, 2053 bp, Arabidopsis thaliana landsberg
aatgtatcagcaggaacggaagctctgatttgatcctacaatcctacagtgaatgtatcctttcagctctcgatagtatgtacgattagtgctatgcattggcattcattagattaaagaacatcagtccactgaactttggcattgatgtcatactgatggtttttaggttttaagtagggcagcttccaggtcagatgaaactgctgtatcagacatgtcaggtgcttctgttcgcatacatcaaggtgcggaggtacttcttctgtcaatctctcggaatgatttttctactaggagatgtcatctaaaaattctttaacttgagcttccttgcgctgtgaatatttcaggatccttatacttttaatccatatcataaagcagtcagagaaccatttgactactacatgtttgtccatacatacatccgtcctcttattgatttcaagtaagctggaatatgcactcatagttatcagattttattcataactgaatgtaattagaaagcaatatcgtttggttagtatcattggatcttccagttttcttcttgccatcaagtgttcatctactaacaacccttgaatatgttatgcagaaattcgtacgttggaaatgcttctatattctctgagctggaagacaagattcgacaggtcatcttccctctttcttgtgctctagttaatgctgtttgctttcatcaacagttaaagttctttccattcaggattttaatactcaactgtttaattacagggacacaatatcgtgttgatatcaaaccatcaaagtgaagctgatccggctgtcatttctctattgcttgaagcacaatctcctttcataggagagaacattgtgagccttcgagccttgttctgagctattatacgctattgtctctgttcttatttgtttctttggttgcagaaatgtgtggctggtgatcgagtcatcactgatcctctttgtaagccgttcagtatgggaaggtatcacgagctttcatttgcaatggtatgctacctgatgggctgaagtgtaatcttagcaaccttgtatgacttccgggatttctactgctttcaggaacctcatatgtgtttactcgaaaaagcacatgaatgatgatcctgagcttgttgacatgaaaagaaaagcaaacacacgaagcttaaaggagatggctacaatgctaaggttaatggaactaaatagcgagtgctcttatttgatctcataggaacagaaattaaaggaaaacattgatgtatagtctgctaatgttgatgaaccctgtaggtctggcggtcaacttatatggattgcaccaagcgctgaaagggaccgcccgaatccttctactggggaatgcgttccctgtaagttatttgatggaatacagagatcttatctgagtctggtagatatgcaagtactaatctagtaatgttcaggcaccctttgatgcttcttcggtagacaacatgagaagactggttgaacattctggcgctcctggacatatatatccaatgtctttgctttgctatgacatcatgccccctccaccccaggtattgattgttttcttctctctgtctctcttctccgttttgggctaactctggttgactttcctctcatcatcacttcattgtgcatctgccaggttgagaaagaaatcggagagaaaagattagttgggtttcacggtactggactatcaattgctcctgaaatcaacttctcagacgtcacagcagactgcgagagccctaatgaggtctgtctgtaacactcagcacaccaatgactttagtttcaagatcgagtaattcatcatgcatataaatacattcttgtggtatggcaggcgaaagaagcatacagccaagctttgtacaagtcggtgaatgaacaatacgagatcttaaactctgcgattaaacacagaagaggagtagaagcatcaacttcaagggtctctctgtcacaaccttggaattagtctctcgttttagggtaacactttcaaaactca

SEQ ID NO: 149227 - DNA, 729 bp, Arabidopsis thaliana landsberg
  unsure (1)..(729): unsure at all n locations
aagatggtgaaatgacattgatagctcgtgttactgatgggttacctctagtgaggggctcgatgatggacgtgantaccggattcnagatatgtataaacaacaggtcaaagctttgtttaagaatctgtccagaggtcaaaatgacgcttcaagaatgtccgttgaaactggcccctatgttttccagtatccttaacctctggttttttcttcattccttattagttcagtttctgctgcaaaagtttgttgattgatagatataataaggattgtagaaagtttactttgatttacttaagattcacacttttgacatccttgtacatttttaccagtttttggcttagtacacgtttcaatcctcttgcattatgtttgaaatctacgttgtcatattagtatgcttgtatctcaaagctaaagtttaagaaagaccnnnnnnnnnnnnnnnnnnnnnnnnnnnnnnnnnnnnacatcatagaaggacgtgtttgctacttgacaatgtgtgaccgctcttacccaaagaaactcgctttccaatacctggaagatctcaagaatgaatttgaacgtgtcaatgggcctaacattgaagcagctgctcggccttatgcctttattaaatttggtacgtgtactgtagatttttctgtacattcagaatctaaaaaacatacctctctggattcactctttttccactttgccttggtttttgct

SEQ ID NO: 149228 - DNA, 424 bp, Arabidopsis thaliana landsberg
gaagaagatggaggtagaaatccgacatggaatgataaattgaaatggagagcagagtttcctggctccggcgccgactacaaactcatcgtcaaagtcatggatcatgatactttctcctctgacgatttcattggcgaagccacgtacgtatatcacataacatgatagccctaaactatacataactgaaatcgaaaagaaaaaaaggatatggactaatcttgattaatggaaatgaataaatagggtacatgtgaaagagctattggaaatgggagtggagaagggaacggcggagctaaggccaaccaagtacaacattgttgactccgatctctcctttgttggcgagcttctcattggagtttcttactctcttttggttagtttctttttactttttactttcttttttttaact

SEQ ID NO: 149229 - DNA, 997 bp, Arabidopsis thaliana landsberg
ctctcggccacgtacactctcaaggcttcgttcactgcgacgtcaaggcgaggaacatcctcgttagccaaagctccatggtcaagttagccgattttgggtcggcgttcagaatccacacaccgagggctctgatcacgccacgtggaagtccgctttggatggctccggaggtgatcagacgagagtaccaaggtccggagagtgacgtctggtctctcggctgcacgatcatcgagatgttcactgggaaacccgcttgggaagaccacggaattgactcgctgagtcgaatcagtttctctgacgagttaccggttttcccctcgaagttgtcggaaatcggccgtgatttcctagaaaagtgtctgaagcgagacccgaatcagaggtggagttgcgatcagcttttgcagcatccatttctctctcagtgtcacaactcatctccgactgagtcatctccgcgttgcgtacttgactgggtcaactcggggtttgacttagaagaagaagaagaggaagtagggagatcagaattcgaagacgcggcgaaggcaataatttgtaatttggcgacgaccggaggagtaatttgggagtcagatggttgggtggaagttagatgccacgcttcggaagaggaagggacaacaatggaatattcgggatccacaagggtagaatcggaatataacacatcatcggatccaaacgatgacgtggctggtgactcggcgataattgacgtttctatgtctcagaatttaccgcctggaaacgggggatcggcggcggcgctgccatatgaatttgtggtggttttacatttattaatggaaattatggtttatactacatgtatctttagggaaattgttctcactatgtatttgttgtatcagtataatcaaagcaataaactcgaaacgttgtcttttaatcacagcctcaagttttgtttgtttgcacatgtgattcggatcggacaaaacta

SEQ ID NO: 149230 - DNA, 3891 bp, Arabidopsis thaliana landsberg
aaaaaaaaacacactacaaagtctctctccgccgccggaaaaatggttgagccagctagtccagattccgacgaagggatctcgctgctcgagtttcacggtaacggtgaccgttcctggcagttaaatttcgatgatttccaggtttcaccggaacacaaggagaagaaatctccgagtaaactacacaactgtcttggttgtttgggtaaacaatttgctcctcctctccgcatttccattttcttatcgtcttcttcagtttcaatctttagcagcagctgataacatttgaattcggcctcctttgtttgctatctttagcatttttgattcttcaaagatatatttttactcttgttatgaagttgagatttagttgaatcttggtattgattagtcgagtttattaatcctgatctttgatttttgtctctaatcatgtagtgtctacaaatatgattttgtgatcaaatatgattttgtgaagagatcaaatatgattttgtgaagctatgtgtcttggtgttttcaggtccggaagacaatgtggcagattattaccagcagcaagtagagatgcttgagggctttactgaaatggatgaacttgcagaacgtggctttgttcctggaatgtcaaaggttagcctaaatgaggctactacttgtcacatttgttgaaaccatgatgcatttgttcttattgattgatacttttctgaatttctttgtgttttgtgtacataggaagagcaggataatttggctaaaagcgagacattggcgattagaatatcaaacattgcaaacatgcttctttttgctgctaaagtctatgcttctgtcactagtggctctttagctatcattgcctctacattggactctcttcttgatcttctttctggcttcatcatctggtttaccgctcttctctatgcagacactcagcccgtatcagtatcccattggcaagaaacgcatgcaaacactggtttgtatcatccttttaaagactaatgcacatgatctgtcttccattagtatatttctattatatgttatgttagtgaatcggagtaagcaagcatgttttgggatattgagatctctgagcaactattaacgccttcgacaagtcaataaagtttttccgatttctcaatatgtgatttttggttcaaatcctttcagggaatcctagtctttgcatcagtgatggcaacacttggattgcagattatcttggaatctcttcgcacaatgttatccagcgtatgtctgaatcttgatcacctagctttggtctagagctttgagagtcatacattattctcgaaatctctttcatacagcacaaggagttcagcctatcaaaagagcaagagagttgggtagttgggatcatgctgtctgttgcagtggtcaaaccgcattgggttggactgtgcagaatggttctgatttgttgggaagtcttcactacgatggggtgtgattgaaaatatggtctcagtttttgagctgacatgactacggccagtgccagtttttccattgctaaataacgggtttcagcgtctatcaacgttttactaacgtaatagatcggtttttgtccttcatgatcttttctcaccaggacaccgcttatcgcggttcgggagactgccgtgtacaggtacaacggttctccttgttcaggttttgtgagtatgggtggttcaaacaggtatgctttcaattgtttgaaggcttgctcgcagtcctcattccaatcgaactttttctcctgtcggaggagctgatagaaagggacgcgtttgtcggtagacctggatatgaacctgttgagggcggcaatacgaccagtcagtcgttggacctctcgtgccattttttggtgatggtatttcgatgaaggttgcaatctgcttaggattggcctcaatgcctctttcggttactaggtatccgaggaattctcctgatgggacctcgaaagagcatttctcgggatttagcttcatttcaaatttgtttaggattttaaagcattctcttaatcgtgggatgtcgtccttttcgtaagccaatttgaccaacatgtcatcgatgtaaacttccatcgtgttcctgagctggtcggtgaactttctgttcaccaatcgttggtaggtagctccgtcatttttcaaaccaaagggcattactttatagcagtaagtgcctcagtccgtaatgaacgccgttttttttttgtcggtaagtatttagttgtacccagagaatgtgtccatgaagaacaatgcgaccagtcaatcgatatgcgggagtgggaaacagtctttaagacatgcttttcaggtctgtaaagtcgatgcatactttccacttcctgtttttcttttttacgatgactcggttagcgagccaatcgttcagagctttggtccttttgggacctagcttgcgacgtttatgttttataggtcggtaggtcggatcgacgttgagttcgtgtgaggttaactcgaggtttagtccttggaggtttgcgcttgaccaggcgaagctatctttgttttccttgagaaaggttgtgagatcttctcgtaccgttagatcgaggtcgtgacctattccaacgcatcgtttaggatctgattcgtctatgcagacctgcgttatcagcgatattcgagttccacgttgagacgggtccaaggatctgactgttttcatttccgcgagttcgtcctctatcattagtaccacgggatcagcttttttgatatcctcgtagctacccatgtagcattttcgggagctgcgttggctgccgtacacgactgctatccccttgtaagaagggaatttaatgcattggtggtaggtcgatgggacggctttcatgacgtgtagccatggtcttcccagtattacgttgaaaggagctttcttatcgaccacgaggaagttcgtgagttgtcttactccccgtgcgacggttgggagctggatggttcctagggaaaaggtcgtatctccatcaaacccggtaagtggcgtttttctgccttgcaactcggaatcgaggtgccccatttttttgaaggcgtcgtagaagagtacgtcaactgagcttctcgtgtcgatcattatacgggagagttcgtagttgcctacgtcgattcggatatcaagagcgtcattgtgaggtttattgaggtcagtggtttcactttcccagaatgtgatctggtgatcgaggccggtttgttttaggagaaaactagatcatggtcgaggaacgaaccaaaatactaagtaggaagaaagagaaagttcaagctaaaccagctaggtgagctggacaagctggatgaactagctagctaagctatgtgagctaaaccagctggaagactggctagctcagctagttgagctgactaacagctcgactaagctcggtgagcggagtactgacccagatgggtggtccggtcagctgacactcgagctggtggactgtggtaactcacgggtgaagaggtgtcttcggatcggatcggccagacggatcggattggacagaccgatctttggacgggtcggatgggacaggctgatcgtcagacggaacgagtcggacagaccgatcgtcggatgggatggatcaagaaaagtgtttgaggaagcacaaggataagtgcatccgaacacacccaagggtcgcccatggatgcaatcttaccggtaaagggagaaagcaccaagaatgggtaaggaacgtgattcaccatataggatcaatatcgcggctgccttcatgtatctatctcctcagccatggtgaaaccgatcgaagatcgggaagaccaa

SEQ ID NO: 149231 - DNA, 725 bp, Arabidopsis thaliana landsberg
atgcagacagtggttcctctcaatacatgggttttaatatccaacttcaaagtagcctacaatatccttcgtcgccctgatggaacctttaaccgacacttagctgagtatctagaccgtaaagtcactgcaaacgccaatccggttgatggggttttctcgttcgatgtcttgattgatcgcaggatcaatcttctaagcagagtctatagaccagcttatgcagatcaagagcaacctcctagtattttagatctcgagaagcctgttgatggcgacattgtccctgttatattgttcttccatggaggtagctttgctcattcttctgcaaacagtgccatctacgatactctttgtggcaggcttgttggtatgtgcaagagtgttgatggctctgtgaattatcggcgtgcaccacagaatccataccctagggcttatgatgatggttggattgctcttaattgggacaactcgagatctcggcttaaatccaagaaagactcaaaggtgcatattatcttggctggtgatcactctggaggtcacatcgtgcataatgtgactttaagagcaggcgaatcgggaatcgatgttttggggaacattctgctgaatcctatgtctggagggactgagagaacggagtgtgagacaagtttggatgggaaatactgtgtgacggtgagagaccgcgattggtactggaaagcgtgtctacc

SEQ ID NO: 149232 - DNA, 1595 bp, Arabidopsis thaliana landsberg; identical to SEQ ID NO: 62189

SEQ ID NO: 149233 - DNA, 740 bp, Arabidopsis thaliana landsberg
gtttttgggtgtttatgatcactcagctgggcaagagagatttaggacgctaacaagttcgtattacagaggagctcagggtataattatgggtatgtctcactcttaatgaacacagtactttgtcatccgtgatccctttaagtgacctggaattctccaattgtgtagtatatgatgtgacacggagagacacgttcacaaacctatcagatatatgggctaaggaaatcgacctatactcgactaatcaggattgcattaagatgcttgtcgggaataaagtcgataaggtaagatcatctcgtctctccgtcctccatgttgagtgtctataatgttgcatagcaattgatctatatgtaatttccaggagagtgaaagagctgtttctaaaaaagaaggcatagactttgctcgggagtacggatgtttgtttctggagtgtagtgcaaagactcgggtcaacgttgagcaatgttttgaagagcttgttcttaaggtagttaaataattcacacttttcactgtgaggatgtgtatatatattaacctttctttatctgcagatattggaaaccccgagtcttactgcggaaggttcgtctggcggaaagaagaacatcttcaaacaaaatccagcgcaagccagcagtacttcgtcgggaaactgctgctcgtcttagacatggttttacagtttatgacacaaatactcgtgctcgccgtcatgttcttga

SEQ ID NO: 149234 - DNA, 1241 bp, Arabidopsis thaliana landsberg
ccaagaaggggctgcttttttttggcagcccctatgtcccaatggatatcaagcggttggtctatatgtcactacttctcctataaagccatctttaagtcaagaatctataagctgcgttcgatccgatcttacggaacagagtgaaaccgatacatgggtttgggggacagaagaaatgactctgtctagtttgagaccggccaacagaggaacagaagcaacaggtgtacacacagggacattcagctgccagccattgaacatccctcctccccctcctctgttttgcttgaaaaacacaaaatttgacttgtctagcatgccaagccataatcaaactaccgttttgtttcaatcgtattctccttggatatatttgcatccagatgaagattttatttcttcctctgtcgactggtttttctccaatggtgccctgttattccagaaaggcaacgaatccaaccccgtccctgtgcaaccggacggttcaaaccttcctgcagggcggttcaggatgatggaggattgtggttagactatccggctgataacaacgcacaggaatgggtgaagaggggagacttacgacacaccaaagtgtatctacacatcaaaccaatgtgtggaggcactttcactgacattgtcgtgtgatattctaccctttcaacggcaacgcccgcctcaagtttttattcttcaagagcctgtcgctgggggatatcggcgaacatattggagactgggaacatgttacgttgcgcatcagcaacttcaacggagagttatggcgagcatacttctctgagcacagtgggggaactctagtggaggcatgcgatcttgagtttcaaggtggaaacaaacttgtgagctactcgtctcttcacggacacgcaatgttttcaaaaccaggacttgtgttgcaaggcgatgacggaaacggcataaggaacgacatggcaagaagtaacaaattctttgacgcaggtgttgcttatgagctggttgcaggaccggggattcaggagccaccgtggctcaactatttcaggaaatggggaccacttgtcccacatgacattcaaaagaaccttgaaggtatcgcaaagtcattgccgggacttttgcggaaaaaattcagaaatctgattaacaaaatccctcgtgaagtgcttgaagaagatggtcccactggacccaaagtcaaaaggtcttggaccggtgatgactaa

SEQ ID NO: 149235 - DNA, 977 bp, Arabidopsis thaliana landsberg
ttctcgctcaatgggaagacccacttttgcttctcgtctcaggtaccgtgccatcactagtgcatatttccgtggagccgtgggtgcactcctagtatatgatgtaactcgccgtgcaacatttgagaacgtagatcggtggttaaaggagctcaagaaccacacagatccaaacattgtagtgatgctggttggtaacaaatctgatctccgccacttgctagctgttcctacagaagacgggaagtcctatgcggaacaagaatcgctctgcttcatggaaacatctgcccttgaagctaccaatgtggaggacgcatttgcagaggtgttgacacaaatttatcgcatcacaagcaagaagcaagtggaagctggtgaagatgggaacgcctctgtcccgaaaggtgagaaaatcgaagttaaaaacgatgtctctgcgctgaagaaactcgggtgctgctcaaattgaagcctttttttgttttcactgttgagagagaattataacccccatggtccattgtttgattatgtccttgttttgtaacactatcgacatttgtatgagttttagaccatacactacataatgtttatttaactttatttcaagaattgttggtgaaccaggctcaatatgcatcagttaagcagaggaatctggatctaaaatgccgacgttcatcttcgatagttggatcgtcgctctccttgtcctccagttttgattctaatttcctctgtctttgtaatcttcaaaatccaaaaccacaacttcagaaccgggtcgggttgcgttatgttgtcgggtttaggtctcattttgtcactaaactgcaagcgacgccgttcctttagagaagaagaagaagataggagcgagcgagcgagcgagcgattagaagaagaaatgatggaggaaggaccaacagctcccaagacgcttcgaatggtctacttcgtcggaaacgaaa

SEQ ID NO: 149236 - DNA, 2650 bp, Arabidopsis thaliana landsberg; identical to SEQ ID NO: 71037

SEQ ID NO: 149237 - DNA, 1205 bp, Arabidopsis thaliana landsberg
gttgttgttttggctgaaagcgatgggtacatacctaagttctccgaaaactgaaaagttatcagaagatggtgagaatgataagctcagatttggtttatcgtctatgcaaggttggcgcgctaccatggaagacgcggttagtcaaaacataatcttatattttccttgttgattagtatcaaactacctgactgatcacatctcttgcttcaattgtagcatgctgcaattcttgatcttgatgataagacatcgttcttcggtgtgtatgatggccatggaggtacgaaactactgtctctactccttaatcatattctagggtgaatttaagttttagagtctttttcagttggtgttacaaatctgctagaattgcaaagattttagttgcttagatctgtgtaatatacttttggtacatttttcgatgtttggttctttactggtgtaggtaaagtcgttgcaaagttctgtgccaagtatctacaccagcaggttatcagtaatgaagcgtataaaactggagacgtcgaaacatctcttcgaagagcattctttaggtttattttctatttgacattcttgtatagtaatttacttttacaacaaatgttccacttaaaagcgtttcattgtgaatattgtagaatggatgacatgatgcaaggacaaagaggatggcgagagttagctgtacttggcgacaagatgaacaaatttagcggcatgattgaaggatttatatggtcaccaagaagcggtgacaccaataaccaacccgatagttggcctcttgaagatgtaaatcttttcatatacctgctttacttggcttcttccgtattctgtacacgattgagttgggacctcttacctatgtctttcttcttatacagggtcctcattctgatttcacgggacctacctcggggtgcacagcgtgtgtagctcttattaaagataagaagctctttgttgcaaatgccggtgactcacgttgtgtgatatcaagaaagagtcaggcttacaatctttctaaagatcacaagcctgatcttgaagttgaaaaagaaaggatattgaaagctggtggctttattcacgctgggagaatcaatggaagcttgaatctgacaagagccattggtaagcgtggtttgtttcttttacaaattcacacataaccaatgttatttgac

SEQ ID NO: 149238 - DNA, 1081 bp, Arabidopsis thaliana landsberg; identical to SEQ ID NO: 12030

SEQ ID NO: 149239 - DNA, 3107 bp, Arabidopsis thaliana landsberg
aaaaaacagattatgactcaaacccttgttcgatcaattctagtctaatgcctagcatctctggctacatcagaggttttgaaaatcagcccatgaatgtaaataagacttaagttggaagaaccgtaccactagccttttggtgtgtcttctctacaacatcattagcttcctcaggtcttttcaccgggacttcctttgctggagaagctgctacaaaaccagagcatgactcgaaccatggttcacactgaacaacttacacaagtgagcaaaggaaaactaatcaagaaacaatgaaaccacgagatgcactaacctggcttttcttcggttgaagaaggatcagacggtttagcacatggagtctctgcattattgataagattacatacttagaaccacatcaacataaacctaaagtaaaatcttcattgaaaacaaaacagatacataaaatactcttcctctattggttatacaatctgcaatgaaattagcaattcaaaggtcacgaggtttaagctaagtaataaaactagagacactcaacgaattcaattacaaagtccaaaactttaaggtctaactcagaaactaacatcaatcaaggaactaattccaaatcctaactttttacgaatttcataaagagatcaaaagaacttacctttgtgtatcttgaaacaacccaatgagcagctgcaggcaagccacagaaaccaagtaagagacaatgacaaagatgacttaacaagccaatgatgaaacgaaagaaaacctatgtaaaaagagagagagacgaagaacacttactaaggaacaagacaagaaggacacttgtatttggatacaaccttctcgcagatttcgcatgtttgagtagctcgaggacacatctctcactctctcacaacgagcacagcgattcaggggaagagaaaaacctcaatcaaggaggcaatggggtttacacttgcctcttcagaaagaaaggaagcccaatgggcctgaaagcttttttatttatgtcattgatttgtcacggaggctttttgactctgctttttgtgaattcactgttgagaagcgccggagaagatgaagctgaagcaattagaaggcttgttgggtgatcttgaacagttctccaatcctaaagtatgtgaaaaatattataactttgaatactaaagattgatttcgtcgaacaaactcttttgattttgattttttgtgtggcaggtggaattcgagcaatacccaactggtcctcacattgcttctcgtatgcttttcactgtaaaatccgtcttcctctgctctgaagtttattacttttgttaatttcatgctttctgtgaagtgggtcttcactgtctaatctagaatatataacaggctagtgattttctcagtgtgtggatgttagatttatgtagtctgagttgttttgtgatgcttggttttgttcctgctgtcttagaagaagccttaagtgtgtatcctttgtttaggcagagaattcatatggagatataactgataaggtcgttgcggattttggttgtggctgtggtactttaagtgctgctgctgctcttctagatgctgcgtgagtataatcatctttgcctcactcttctattcaatctctgtggttatctaatctctttattgcttcagaacaggtctgtgattggattcgatatcgaccctgaatctcttgaaacagcaacactaaatgcagaggaacttgaggtttttttgaaattcttcttcttttatgtaaatgagttttcttttggttgtatagcaaataccattgctataattggtttgttttgtaggtcgagatagatttcgttcagtgtgacatcacaaagctagagttaaaaggtacaatcctcctttcatttcagttcattcaacgaaaagaagattctaccggtaacatttttgtggctctatgaatttttttaggtacaattgttgatactgttgtaatgaaccctccatttggtacacgaaagaaaggagctgattcgatttggtgatgatgatgtctatgtttgagtaggtcagctactgttaggcttatcgatggccaacaaaacatggtaaatgtgactcaaattcttggaagtgtagctttgattctgcacagtaggactcataaatttccagtttgttttgctctctatagcttggtttagtgtctaaagacgaagccgttcgaatggctgatgatgctgaacttgatctggtatgtgtttccattgaaatgctcttacttgtggacattagctatttggtatatgcaatggtttttgtatgatatgagtcagaactcgaatcagtgaaattgagctaatagatggaagattgaactagaatcaaagcaaatattagaagatatgctctgataccgtattagattaacagaatttggataagagttgtgaatgatttatgttattctcttcttcaagaagaagagaatgtacattgttatatataaaattctctttactaagcaaatcagaacttcataaattaatttagctacaccgagtctctagtgtaactaaaccaaccaactataaatgattgattgtgttggttttcaggttatactatcgcctgatgcagatcctccggttgttaaaatgatggactacaggtaaattatctcaaggatgataatttgtatcatatacattgtgtagaggaagtttcaaggagaatgattctttttcctttttgcttcattatcagtaaatacagatatgagcagcaaaagaggaaaaaggaacagcagaagaaaagtattgatcattcttctctgcttaactggagataatgttgaaactataagtgtgtatactgtgtcgtattttacatgaatggattgtgtaactgaagctttcttcttatgtcagctactcgaatggacttgaaggagcttaaaatggggtgatttgagccattttcactatctcttttatctgtgtcgttgtgatgcttttgtttagaaaagcttcttctcaaaaggtttttgtattttgtttctccggtagttataacatcgatcagcagaagtattc

SEQ ID NO: 149240 - DNA, 1369 bp, Arabidopsis thaliana landsberg
  unsure (1)..(1369): unsure at all n locations
ctctttttttttttttatgtatgaagatatanactttattcatagtgtatagtgttagacgttttaagatgatggactactttctttcttggttttgtgatgcagaacatgggaattctctgttgcattgtatatgatccacttgtgccaaactctctgcttctcgctgccatttatggggctatagaatctggttctactgcaatctttggtcccattgtggggcaatgggtcgagggaatggactacgttaaagttcttagactctggctcctgttccagaacctctcctacactattgctggtggtgcagtcatcaagttgttgctagtttctgatcttaagtcccggaatctcccggtgtttgcaatcttgattgtgttaacgaatcttgctggcgccattggagttctttcgactcttgctggcaccattctgatcgaacgagactggtaaatgtctagactgtatatatttgcaacacatgaatgcaatcttatgtatagtgtcatatttgcaacatgtgtttcttttggctcttttggcaaccaacagggctgtggttatgtctgaaggtcatccaccagcagtattgacaaaaatgaattctgtcattagaggcattgatttgagctccaagctactgtctccagtcattactggtctgatcatcagttttgtctcacttaaggcttcagcgatcacttttgcagcttgggctactataacagcttgggttgaatattggctcttcatttctgtgtatagcggtgttcctacaataacacgaagcaatgagagacggatcttgcgttcccggacaaagcaagtagaaggaagagatgcacctgtttctgtttctattgttccgggaacagaggagggttatactggaaaccctccgtctagaaccggaatcttggtgatactggatagaatatccaagtcctcttttgttggcgcatggagaatttatttcaatcaagaagttgtcctccccggggtttctctagctctcttgttcttcaccgtcctcaggttccttttctctttatctatatgtttaagagtcctcagatgaacatgcatatcctaccgattatgtggatcattgttgttttatttaccaccttgacacagctttggaacattgatgacggctacattgcagtgggaaggtatacctacatatatcatcggtataggcaggggaataagtgcaacggttggactagcggctacattagtgtatccgctaatgcaatcgcgtctctcaactctgagaaccggcctctggtccttctggtctcaggtatatcaacttgaaaacacacctatggtttgattcatctgattggttacaggttat

SEQ ID NO: 149241 - DNA, 768 bp, Arabidopsis thaliana landsberg
agatatgatagggatgttaaatggcgaacaggagttgacattatacacgttccatgtagaagtgcggataatttcaatatgtcgatggtcgtgcttgatcgagcattctatcaagctaagaaacgaggtgtaagaatccgcggcattataatctcgaatccttcaaatcccatgggaagcctactgagcagagagaatctctatgcgcttttggactttgcccgtgagaggaacattcatattatatcaaacgaaatctttgctgggtcagtccacggagaagaaggagagtttgttagcatggctgaaatagttgacacggaagagaatatcgacagggaaagagttcatatcgtgtatgacctttcgaaagacttgtctttcccggggcttagatccgctgctatctactcgttcaacgagagtgttttatccgcttcaagaaagctcacgacgctctcacctgtctcatctccagcccaacatttgctgatatccgcaatctccaatccaaaaaatgttcagagatttgtgaaaaccaacaggcagagattgcagagtatctacacggagctcgtggaggggttgaaagagttagggatcgagtgcacaagaagcaatggagggttctactgttgggctgatatgcgaggattgatttcatcttacagcgaaaaaggcgagattgagctgtggaacaagctcttgaacattggcaagatcaatgtcataccaggatcttgttgtcactgtatcgaaccaggatgg

SEQ ID NO: 149242 - DNA, 1598 bp, Arabidopsis thaliana landsberg
gagatggaggtgaaggttagaagagatgagttggtaccctttgtagcaatggctataatggaagcatgcacgattgctctaacgataatggcgaaaacggcgttgacgggagggatgagtccttttgtgttcgttgtttacacaaacgcttttggatctattcttcttcttccattttctttcttctttcacaggaatgagaggtcggtccacgttcagtattttatatcatagtatatacatgttattactaatcaatcttggttcttttctgatctttggtttgtatgatgatattttatacttgcagaaccgaacaatctatcttctcttggccactcctcgttcgtgttttctttctaggtttcaccgggtgggtacataatctatctttattaattaatgttttcttaggaagttatcatattgattatgagtcgcagaccagattcttacgtactaatattattttgcaataacagtaactacgtggtcctaaaaccaaatcaaaagatgaggtccatgtttcgaaaatctatacgtacatgtatcaaccactaattggttggatgaatattctatgacatggatttgcgacgtcatgcatattcaaaaagatacaaaaccgcgtgccgtttactcggttataaaataaacaactaggcctaatatgttctattattttccacatcctgacgtttctttgggagcggcgtataccacacaccatgtgttatttgtgttaaaatagaaatacaaacttgtgtgacgtatatgttggctcatataataatatactcacttgtgagaacacacgcatttgcatgcattgaacgtacataaaatgttattcatgcatatgcacatgcactgattatattgtaacattttaaatatgtgaaggatatttatgttccaaaacttggcatttgtgggactacgcttcagctcaccaatagtcgtatgtgcaatgggattgcaaatcccgtccttctccttcctgctctctattcttctcgggtaagacatctctcatcaccatggcaaactctccacataaattatatgaatgttttcaagtatataataaatatctaagcatgtgtagaaggagcaagttggattggagaaacacgagtacgagggctaaactgatgggaacaatagtctcattaagcggagcttttgttgaagagttgtacaaaggtccattcataagaccagcttcgtctgcttccccaaatcgttttcttaaatcagtccctaaacttttggtctactacaacctccccgacaattggtttctcggctgtatctttttggccgtcgctgttttttctgtctctctattcaatgttgttcaggtactcaatcatccattatggaaaccatcgttatccttatgcatgttagttacctttgaggttaaatatatttcttgtttttgcatgtctttggcagacagggacggtaaaaaagtatccacatgtgatgaaagtggcttcgttttacagcatagtcgggacgatccaatgtctactattctcgttatttatggaaagagaccttagtgcatggaagatccaacctaacttcga

SEQ ID NO: 149243 - DNA, 1068 bp, Arabidopsis thaliana landsberg
caaattacagacagagaagagagagatcactatggctgtcggagatgatgatctggagaacagaatgtcggcgaaagatcgaggaatcggaagcagaggcggtgatcggaatcgaatcggaccaccgcctctgccggtagccttgtcgtcgtctactgaatttggcgataacgcgttgtcgtcgcggtggacgtcgtggcttgttccgatgttcgttgtggctaacgttgcggttttcgtcgtggcgatgttcgttaataactgtccgaatcatttcgagtctcaccgtctcagaggtcactgtgtcgccaagtttctcggtagactctcctttgagcctctccgaactaatcctctctttggtccatcttctcacacgtacgttttctaaattttgtatcgatgttgatttagggttctaaatactagagaatcacgttttggttctgtttctcaagtttgtcggttactaaatcgaaatttactggatcttgagatgttgaaatgatgaagttatgtgattgagagtttgagatacaagattttgatatgattgtgttttggttgatatatacttgaagattggagaagttaggagcacttgagtggagcaaagttgtggagaagaaggaaggttggcgtctcttgacatgtatatggttacacgcgggtgttattcatctcggagccaatatgttaagccttgttttcattggtattcgtctcgagcagcaatttggttttggtatgcaatttgggtggatttagtcttcattcttctagttgtgttattctgttgctagaaatctgaatcttggtttcttgaaattttcagttagaatcggagttatatacctattatcaggaattggagggagtgtattgtcgtcgttgtttatcagaaacagtatctctgttggagcttctggtgctctttttggcctccttggctcaatgctctctgaacttttcaccaactggacaatctactctaacaaggttaataccaatctgcttttcatttcaaacatacaaatcactccatcatgttggctcatgtgtctgatc

SEQ ID NO: 149244 - DNA, 1453 bp, Arabidopsis thaliana landsberg
ttacctcaaaagccaaagaccaatgtctaattcaaaccaaccacttctttccaaaccaaagtctcttaagcacaagaatctatgccttgtcctctccttcgtagccattcttggctctgtggctttcttcacagcccaattaatctccgttaacaccaacaataatgatgattccttattaactacgagccagatttgccatggagctcacgaccaagactcatgccaagctctcttgtccgaattcacgacgttgtcgctctcaaagctcaaccgccttgacctattgcacgtgttcttgaagaactcggtgtggcggcttgagagcacgatgaccatggtgagcgaggctaggatccgctcgaacggtgttagagacaaggcaggtcttgctgactgcgaggagatgatggacgtatcaaaggatcggatgatgagttcgatggaggaacttcgcggaggaaactataatcttgagtcatactcaaacgttcatacttggctgagcagtgtgcttacaaactacatgacatgtttagaaagtattagtgatgtctccgtcaactctaagcaaatagtcaagccacaactcgaggacttggtttctagggcaagagtggctctagccatctttgtgtctgtcttgcctgccagagacgatctcaaaatgatcatttccaatcgcttcccgtcgtggctaactgctcttgacagaaagcttttagaatcttctcccaaggtaataaaaaatcattttcaattcttatacttcaattaataaatatggccaatatatttctaggaaagaaaaagtttcggttgtaatgtaacaaaaaattaacttttacctatctttcgtcattcaaactctaaacactttgaccttttactagacacttaaggtgaccgcgaacgttgtggtggcaaaagacggcaccggaaagttcaaaacagtgaatgaggcagtggcggcagcaccggagaacagcaatacaagatacgttatatacgtaaagaaaggggtttacaaagaaactattgacataggaaagaaaaagaagaacttaatgcttgttggtgatggcaaagatgcaacgatcataaccggtagtttgaatgtcattgatggatccaccaccttcagatcagccactgttggtaatataacatttttctttcatttgtgtcttttaagttattacattcttgtatccgaagaacttaaaatattgctttgaaaacatgtacagctgccaatggagacgggtttatggcacaagacatatggttccaaaacactgcagggccggcaaagcaccaggctgtggctctacgagtgagcgctgatcaaactgttataaatcgttgtcgcatagatgcgtatcaagacacgctctacactcacacgttgagacaattctaccgcgacagctacatcaccggtaccgtagaa

SEQ ID NO: 149245 - DNA, 2334 bp, Arabidopsis thaliana landsberg
cagaggaaacgcggcggaggaggttttacgactattttcccttcacttcttcatcttcttcctgcgccgcttttcaaacctattcgaccagacaagctcggaaatttcatattccatgggtaagacgaagttaaaacctgtggaggatgtgaactcggaagtggtggacgaagttgagaaagcagaggaagttgaggaacagagaaacgacagagaacaagaagaagagcaaaaagaagaagaggcaactaaaagtttcgaagagctagggcttgattctcgtctaattcgtgccctaactaaaaagggtatagagaaaccaacccttattcagcaatcagccattccttacattctggtaatgataatagaaagtctctaccttttttttgagtttcgtggctacttatataatcttgggactgatgatttattgtctctgttgttcttatataggaaggaaaagatgtggttgctagggcaaagactggttcaggtaagactttggcttaccttttgccattgctccagaagctattttcagcagattctgtgagcaagaagaagcttgctccttctgcatttattcttgttccatctcgagaactatgtcagcaggtttgttttggaccattgtttaatatctctcctactttcatttatttcagtaattgatgggaaatcttgtttgatttggaaaaatacaggtttacacagaggtttcatcgcttattgagctgtgtagagttcagctaaaagcagtgcagttgactagtagcatgtctgcatctgatatggttagtattgcatttctcatcatgaatgcattccattgtttttttctaattttgttttgatgtttcatttgcagcgtaatgcattggctggactgcctgagattcttgtctccacacctgcttgtattccgaaatgttttgctgccggagttttagagcccactgctgtcagtgaatcactttcaattctggttcttgatgaggtatgatatatgtgcttcaattataatagtggctttgttagaggttgttttagtagtcactcttttaagtggaagtctcatgatttgattttcttggaagaacatgtagtttaagcatttcttagtggttatatctatcatgtttttcctttattcctcctctctttgagagttgatgttgataatatttttgttatcaggcagatcttttgttgtcatatggatatgaagataatctaaggtcggtaacatcaataatcccaaggcgttgccaatgccttcttatgtcggctaccacaaggttagacatatatcgataataatgattctgtttagactcatatttttctccgaagtttgtcttgcatggttaactgaataatatttttgcaaatttttagctctgatgtcgaaaaattgaagaaattgattctgcacaacccaatcgttttgaccttgacagaagataatgacaaggaagaggccgtcccaagtaatgttcagcagttttgggtatgattcggtcgcttagatatttttataagttcacatttctgggtctgattaatgattataagtgtattatcttgtcttagatctcttgcagtgctcaggataaactgcttcacattcttgctctcttgaagctagaggttgttcagaagaaaattctgattttcatcaatacaattgacatgggattcaggttgaaattattcttggaaaaggtaacttgtgggcacctatacgagcattccgattctaaaaaccgtacctgtaataataatattgaattagtcttttgttttgtttcttccagtttggaatcaagtctgcaattttaaacggggaattgcctcagaattctcgacttcatatccttgaggtacatcaccaagtcatgcacctagatttagtttttccggaagcagctgcgtttcataattaatcagtgtatatttttttgtatacagcaattcaatgcaggacttttcgattacttgattgcaacggatgataatagccagactaaaaaacaaaaggaagaggctaaaggtgaggctaacaaggagaacaagaaaaataataagcgtagcaaaccaaagctagatgctgagttcggtgtagttaggggaattgatttcaaaaaagttcacacggtatgctacttgacttttgctaagggggttctcttttctttgtttttgtactctatgctgcttgggataattgaacgaatccttctttttctttgctctatactcttaaccttcccttaaaccttttttatgcacaggttataaattttgatatgcctcaagtggtactggata

SEQ ID NO: 149246 - DNA, 1535 bp, Arabidopsis thaliana landsberg
atggacctgaaagaatcagtaaatgatcaatacgacatcctggagaacctgaaagggtcagttgggaacctaaacgacatcattctgaggttaactcagcacgttatcgctagcaccgccgggaaaacctcgaacctcgtcttctcgccagcgttaatcaacgtcatcctcagttttgtcgccgccagttctcccggagacacagacaccgcagacaagattgtctctttacttcaggcttcttcaaccgataagcttaacgctgtatcctccgagatcgtcaccaccgtcctcgccgacagcaccgcgagtggcggcccgacgatatcggcagcgaatggcttctggatcgaaaagactctctatgtgaaaccttctttcaaggatctcttgctgtattcatataaagctactttcaaccgagttgactttcgcaccaaggtactctctttgatccaaataaacctaattcccttatatagttactaggtattatcttatactaacattaacatgattagtttgtatcatgtatgtaaaactggtttctatacaaaatcactagggattggactaatatattgaaaagtgtgcttagacaaagtatatacacaaggcttttgtgaaatcaaatcacagatgttgatagctagcttctctgtttttgtttgtattgtttttgaaaggctgatgaagtgaataaagaggtgaattcatgggttgaagagcagacaaatggactcatcactgatcttcttccaccaaactctgcttctcctttgactgatctcatatttgctaatgccttgtttttcaacggaagatgggatagtcaattcaatccatcgctaacaaaagaatccgactttcaccttcttgatggaaccaaagtacgtgtgcccttcatgaccggtgcccacgaagacagtcttgatgtttacgaaggtttcaaagtcctcaatctaccgtatagagaaggacgcgaagacagtcgtggtttctctatgcaaatctatctccctgatgagaaagatgggttgcctgctgtgaggtttttagcctctttacctctagctttcttactcacaagcacacaactactaacttgaagcattaagaactgacttgaagaatgttgagcagagactgaaacttaaagaaaaagttatgcaaagatagagaagtgtttaactatgaagatgcagagaatgagtgtgatgcagagctgttaaagaagaatgatgcaaggctggaaaaacgaacacacacggtttaacgagttcggaacctcaacgtgaggaacctacatctcgccgggaaaaatcccggaatccactaaaccacttcaagattacagctttgttctctcaccctctctaggaacttacaaagctctctctctcttatgttcactctgttttcccaaacccttagccttacacttacttctctctcacttgtctcactcctctgttacagagtcaaaacaagacaaaacttgtggtccttaaacttggtctccaagctggtctctc

SEQ ID NO: 149247 - DNA, 2000 bp, Arabidopsis thaliana landsberg
aaccagggacacctcagtcgcctagatttgttggtctctctgattcagtttctttgaagcaggctcttagggatcgttgcatttccaaggcgtcggaaatggctgctcagaaacggttgtcgaaatctgctgctgcatctccgagggtctcagaagccgacaggataaagagtttgtataaccaagtttcgaatgaatctactagcagcaggtctgggcttgttcctgtggacaagggtaaaggaagtttggttgagatacctttgatgcctgtaaacgataaaccaagctcttcaaagagcgtacctcaacggtttgaatatccttctaaccccatttctgagatatctcaagctggaaccagtttgggattacaaggagttggaaatcaaatgcgggagattaagctgttgcataaatccaacaaatctgggtcttgtcttagttctggcagtggagattatgagatagagttagatgaaaatgttgcgtctccttccactcatgcatttgttgaagatgatgtgatagaaatagacaaacatgttacctcactgccttctcactctagcaagaaagttaatgcgacggagcttgacaagaatatttcctcatctgctgtagactcagagcagaaagggaagttggacgatgcacctaattcagggacagagaagggcaaaacagtacggaaggtaacaagaatgattccacgtcccaaacaaccgaaaaagaagattttgcttaagaagaagttaaaaatcggggtggtgtcagcaacttacccaacaaaagacgatgacgaaattgttccttccttggactctagtgtcaataaacttctctgccagagatgtcactgttcgttgaagagcaccagcatcgataacaacccaccttcatatacttctagtcataatcctaaggtttgttcagatagtttgagctctgtttcaaataatgttggtaaagaagctcatcaaggatctgacgagaactcctctggctcgtgtaatgtcagtcaaagctctgaagctgacattgtcataatgaaacaagatgtttcctctagcaataatagtggaatcggtgcaatggtagaaaaagaaaccgagaatccgacttccagtgagaaattcgagttctctctaagttcaaaagatagtcttggggattatagcaggagcacaagcatgagtgaggagagtaatctgagccgatttagctgtgggaataagcctcacatgtcgatggatgtgagatgggaagcgattaagcatatcaaggttcaatacggctctttgggtttacgacacttcaaccttctgaagaaacttggttgtggagatataggaactgtctatctcgccgagctgattggtacaaactgtttgtttgccataaaggttatggacaacgagttcttggcgagaaggaaaaagtctccccgggcacaagcagaaagagaaatacttaaaatgttggaccatccttttcttcctacattatacgcgcaatttacttcggataatttgtcttgtctagtcatggaatattgtcctggaggagatcttcatgtcctcagacagaagcagctaggccggtgtttccctgaacctgcagcaaggtaaagatttaccttttccatttcgtgtctagcttatttaatgtactgaaaattgattgtaaaattttgtttctgtagattctatgtggccgaaattctccttgcactggagtacttacacatgcttggtatcatataccgagatctgaaaccggaaaacattcttgtccgtgaagatggacacattatgcttacggattttgacctctcactccgttgtgcagtgaacccgactcttgtcaggtcaaacttctccacctggtaaagatcccgcaaggatttcaggtccatacaacacatccaactgcatacaaccattctgtatcaccgcacccatcccgccaggtttcgtgtttcagccctagacatcaaa

SEQ ID NO: 149248 - DNA, 1016 bp, Arabidopsis thaliana landsberg; identical to SEQ ID NO: 55681
  unsure (1)..(1016): unsure at all n locations

SEQ ID NO: 149249 - DNA, 3030 bp, Arabidopsis thaliana landsberg
  unsure (1)..(3030): unsure at all n locations
agctccgtgatgaagaaatggttagcaatcgcagcgacggtggcgataattgcaataatcgttagacaaggcacgacacaatacggatggaacaaagaggcggcgttggaaaagctaaaggaatggtcagatcggctcgggatttgggcgattccgacgtatgtagcggttcacacaataaccttagctctttgtctccctcacgccgtattctttgaagctggtgcttctatgctctttggtttccttcctgctcttctctgtgttttctctgctaaagttctcgccgcttctttctccttctggatcggcaggtctgtttctgaatttggcaatccatttctctgttatgtgatccaaattgatcactttggatcgtttgtttgtgtatgaatttgatcgaaatggtttggatttagatcaaggtttatagctaacacactctgcgttagtttatcttatagttttgtgaatgcttaagctttttagatggagatggtttagattttcgagtagtgcaccattgttggaaaccttatgcagaacgtttagcatgataagaggaacttttgtgtagagaaatcgatctcattgttggttatcagaggaaagtatcacctttattagctgagaagatgcatgtcgttagaacttttcttaaaagttttagatgcatgtcttcagattctacaatggtgtgtggatgagattggttcttgtcttgtggatgtgatggagatgtatgaacgaaccgttagatgcttgtcatttggtacttaacatatttgtggatatgcttgagctggagaatgatttgcaattttcacatttatcacttgggagaacagttgacattctctgttacgtttttatgtttccaggtttgtttttaagagttccaccagagctacagggtgggcgcatagcaacaagtacttcaatattctctcaagaggagttgagcgcgatggttggaagtttgttcttcttgcaaggttctcgcccattccttcctatgtcataaactacgctttggcagctactgaagtccggtttgtagctgattttctgttccccacggttattggctgcctcccgatgatcctgcagaatgcatcagtcggtagcctcgctggtatggctgtggcttcagtagctggaaaacagaaaagtcaggtctggggttatgttttcccagtacttgggatactgtcaagtgttctgatttcattgagaatcaaaaagtactcagctggaattacagaggcatcatcagatacctctgctaacagctctagtttagcttcatctgaaactgcgaatcccgcttatggaaccgatggatccaagaaaagtgagtgatgatacaaaccatgatggtggtttttcatcgccggtattacactttggttggtttgcagctatcagattctcaacatcatggcttatttgggacgagttaggcagtatcttaatagtaacaaagctttagtttttgtagttcttaagttaaaagctttgaacaaaacagtgttattttctataccagacacaaaaactgtgtcgttgtaataacacttaccataacattttctttcagtgtatgtttaaagccgtttatatggttgaagcaatgtgactaaaatttttgtagcattgaaacaagctatatttgcattgctatggtcttgttttgtgaccaaaagacttagatgcagagtggatataactttgctaaatgtctgattttgtaaataacttgtgaagagaaaatctttatttggtaagagttgttttctcaatgtagcagtttactcatcattttcaaagttcaactctcatataacacaaagaggttagacagtgcagatgcttatggttgagaagctttacctaacaatggtacaaggcggttttgttgggatcacatgtgaagttaggcacatggattcgttcttggagttggtacaaggacttcaaaaagacaacgatgatgtataataaggacaagttgactatgtctctctcttttatcttaacattctaaattaggatttggtaaactgagagcagttaccttttgatgaatctcttcaagtataaaaaccctcaccattttactactatctcatcttaaaaaccctcgagttacacaaaaatggctatctcaaagcttattcctactcttgtgctctttgttttgttctcttttgatgttagtgttgctcatccaggtctaggatttggatggggaagtaatagtcccattggaggatctttttactcaaatctttacccacaattttaccagttctcttgtccacaagctgatgagattgtcatgacggtgctcgaaaaagccatagctaaagaaccaagaatggcagcatctttactcagacttcacttccacgactgcttcgttcaggtaaaagtatctttacctatttttgttttccctttatgtgtctcttatgcttaactcttatacactacactttttgtgtaaacagggctgtgatgcatcaatcttgttggatgatagtgctaccattagaagtgagaagaacgcgggaccaaacaagaactccgttagagggtttcaagtaatcgatgagatcaaagccaaacttgagcaagcttgtcctcaaactgtctcatgcgccgacattctagctctagctgctcgtggctcaactatactggtaaaattaagagacgttcaagagaaactattggctcagttatgagttatatttattgaatttgtggttcaatacagagtggtggaccatcatgggaacttccactagggaggagagactcgaggacagcgagccttaatggggcaaacacgaacattcctgcacctaactcaactattcaaaatctcttaaccatgttccaacgtaaaggtttgaacgaagaagaccttgtttccaaatcacgccgagctcaacatgtatttatcttttgtatcaggagtaaattaggaaaccaaaccgagaccgatttcttaaanccggattt

SEQ ID NO: 149250 - DNA, 1198 bp, Arabidopsis thaliana landsberg; identical to SEQ ID NO: 50898

SEQ ID NO: 149251 - DNA, 1728 bp, Arabidopsis thaliana landsberg; identical to SEQ ID NO: 8678

SEQ ID NO: 149252 - DNA, 814 bp, Arabidopsis thaliana landsberg
agagaaagaagatggcggttaagcacaagattcaacagcgacttgggttgcagaaggaagccacaagaagcttgacacaagacattggaagtaagtcgatctagctattaacaccaatacataacatacttttcaaaaccagctattatcaccaatgcaaaccatactctttaaaaatgcgtatgaaagctactcggcttcctatgaaaacttatatatctgtattaagcaacaccaacattgtctcaaaggggctagagatcatgggagatccaatgaggaaggaagtggggatggtaagaaagaaaatcgagatggcaaatcgagaaatcaaatctttgtctcagagctgccagaagaaggtttcatataatcagtctttattaacaatcctgcttctttttacctgtacaactcttttatatccatcaacactcaccccagatgataaataaatgacagaaaagggtatacaaagagatacatgaggctttcgacgaaaagaacaaagagaaagcacacccttgtttcaatcttaatggaggtaaatcaattgtagcctatcccagctctgattctctaagacttttagctttttgtatagttgtgatgctgatcgcaatctcggtgatcttcttggcagctactagctgaaagtgaaagagtaagggtgaagaagctggaagagatcaacaagactattgggtccttgcgataatcaattctaccttttacatgggaactgtttgaggttctggatcatttatggattaaagttcctctactgaagtgtgagaaaaggtgtaaaagaatg

SEQ ID NO: 149253 - DNA, 1057 bp, Arabidopsis thaliana landsberg; identical to SEQ ID NO: 11139

SEQ ID NO: 149254 - DNA, 2868 bp, Arabidopsis thaliana landsberg; identical to SEQ ID NO: 28017
  unsure (1)..(2868): unsure at all n locations

SEQ ID NO: 149255 - DNA, 969 bp, Arabidopsis thaliana landsberg; identical to SEQ ID NO: 60471

SEQ ID NO: 149256 - DNA, 1150 bp, Arabidopsis thaliana landsberg; identical to SEQ ID NO: 61308
  unsure (1)..(1150): unsure at all n locations

SEQ ID NO: 149257 - DNA, 2650 bp, Arabidopsis thaliana landsberg
actcctttctatagcagaggaggccctagcagagttcctttccaaggctacaggaactgctgttgactgggttcagatgattgggatgaaggtaatactttctggcctgaatactcttaaagttgtataatctgatttctgttctttagttgtgtctgaagatgaagttgtttatgattatttgatgaaccttcattgctggtgtagcctggtccggattctattggcatagtcgctatttcgcgcaactgcagcggaattgcagcacgtgcctgcggcctcgtgagtttagaacccatgaaggtaaagagtgcgatttgttacgttctggcttgtgtttataatcattagcttacgctagtcttgatttgaaaacaaatataggttgctgaaattctcaaagatcgtccatcttggctccgagattgtcgaagtgtggatactctgagtgtgatacctgctggaaacggtgggacgatcgagcttatttacacgcagatgtatgctcctacgactttagcagcagctcgtgacttttggacgctgagatatagcacatgtttggaagatggaagctatgtggtgagttcttgaatctgctttttctgttatgtagtttctgttttaatacttttgtcttcactcactgtcttcaggtttgtgaaaggtcgcttacttctgcaactggtggccccactgggccaccttcttcaaactttgtgagagctgaaatgaaaccaagcgggtttctcatccgtccttgcgatggtggtggttccattctccacattgttgatcatgttgatctggatgtaagtgacaactcgaatcggttcataacacttcagttctctctttataatatgatcatgactttgttttttcggttttgcaaggcctggagtgtccctgaagtcatgaggcctctctatgaatcatcgaagattcttgctcagaaaatgactgttgctgtaagttcaaatacctttatccaaactgtatatgacctgaacgacttggtatgctgcaatgtttcttaagttcggagtcttatttcaggctttgagacatgtaagacaaattgcacaagaaacaagtggagaagttcagtatggtggagggcgccaacctgcggttttaagaaccttcagtcaaagactctgtcggtaagtatctactttacttaatagctttatcaccaagagtttcttttattcttattctaattgttcaatatggatgaactttcaggggtttcaatgatgctgttaatggttttgtggatgatggatggtcaccaatgggtagcgatggtgcagaggatgttactgtaatgataaacttgtcccctgggaagtttggtgggtctcagtacggtaattcattccttccaagctttggtagtggcgtgctttgtgccaaggcatctatgttgcttcaggtacatgtcttaaggatttgataataaaaaaactaatattctgtttctgtctgtttctaactaacttgcatctttttttttttgtttgaagaacgttccacccgctgtgctggttcgattccttagagaacacccatctgaatgggctgattatggcgtggatgcttatgctgctgcatcgctcagagcaagtccttttgctgttccttgtgctagagctggggggttcccaagtaaccaagtcattcttcctcttgcgcagacagttgaacatgaagaggtacttttatcaaagaataacacagcttcactttctcctctctctaaatacgtgttatagtcctgaaacctttcttggttacttgtttcagtcacttgaggtggttagacttgaaggtcacgcttactcacccgaagacatgggtttagctcgggatatgtatttgctacaggtttgacttcatactttaactccaaagtttctatgctcctttgttctcttcatgacattttggattcttttttgcttttgtctagctttgtagcggtgttgatgaaaatgtggttggaggttgtgcacagcttgtctttgcccctatcgatgaatcatttgctgatgatgcacctttgcttccttccggtttccgtgtcataccactcgaccaaaaaacaaatccggtaaaaagaaaactgtttatgataagaaatttgatatcttgaaattgacacagtcctttttcttttattcctgtatgtaacgttacagaatgatcatcaatctgcaagtcgaacacgggatctagcatcgtccctagatggttccaccaaaaccgattcggaaacaaactctagattggtcttaacaatagccttccagttcacgtttgataaccattccagagacaatgttgctacaatggcgagacagtatgtgaggaacgttgttggttcgattcagagagtggctctagccattacgcctcgtcctggctcaatgcaacttcccacttcccctgaagctctcactcttgtccgttggatcacccgtagttacaggtactcttcttagaaccttaatctaaagacttgtaacaatatagaatgtgcttatctcatttaataactcaataaaacctttttctccgatgttaaagtattcatacagaagcagatctgtttggagctgattctcagtcctgtggaggaaac

SEQ ID NO: 149258 - DNA, 2564 bp, Arabidopsis thaliana landsberg
cactgactgaatgaatgcttgatttttgaatcttaaaattacctttgcaggatagaactgactttgagctggtaacacttccggctcttgttcctgttctgagtactgcttcaggagatacattactgctgcttgtgaaacatgcagatcttattactaacaaggtaaagttgatcaattctatacaatactggcttatgtttttcttaccctgcacttgtttgtttctgcttaagttcttctgattggacatagtatgatggaatgaaggatgtatgtatacaatatggttcactttaacaacacatcaactcgatattatagtcttttgtgctgtcataacctgatacatgcagatatagtcagatacatatttggttgtaaggttccacgttgaagatacacagactgttatttgtttctggatccagttgtacattgaaatcaatatcttttttctaatgcatatagggtgagatccttactcggcttacgtttatgtcaaacttttcagactgatagtgagcatcttgtatcgcacgtcctccctttgcttctgcgagcctacaatgataacgatgtccgcattcaggaggaagttcttaaaagatccacatctgtggctaagcaactcgatggtcaggtgatgctcaatgctttgttttaatgttttattggaataatatgtttttctccgagaagagtagaatcaatttttgatgtatggctttgtggtattgcagagtagtgtcggttaattatgctggatgagttcttctaattatcattttttccctgtctttctttatttaggttgtgaggcaagcaattttgcctcgtgttcatggcttggctctcaaaactacagttgctgcggtatgttatgctttgttagattatctcagctcgagttgcttctaataccagtgtctttaatagcttgagaaagaaagagaaaatgaacataactgatcccagcttcttataaataattgactggaatgtacttgttgcgcaggtcagagtaaatgctttgctctgcttagctgagttggtgcaaacgcttgataagcctgccgctatcgaaattctggaaacaattcaacggtgtactgccgtagatcgttctgcaccaaccctaatgtgtacccttgctgtggcaaacgcaatcctcaaacaggtaggattcaggtcaaattttctccttaatgtttgaaatttgaatgtcttgacttcccctcgttttgatatgtggtatcgttgtatctcattatctgcatttttcatcattgttttctagtatggagttgaattcacagcagaacacgtgcttcccctgattataccacttctcactgcccaacaattgaatgtccaacagtttgccaaatatattctatttgtcaaagatattctcaggtatacctccgaccaatcccgtcctgtttccaagttcttattccccttataactgcatactgttgtaattgtttttcaacatctggtttgtctatcctctggtcactgaacaggaaaatagaggaaaaaagaggagtaacagtgaacgattctggagtcccagaggtgaaaccgcattctgctgccaatggacttcagtttcagtcatcaacccaaatacctgagaaggttgcttctgcagccaagagcagtcctgcatgggatgaagattggggctccccgagcaaagattctgctgtgggaaatcctgcttcttctcgtcataacacaaacgatcagtttaacaaatccacagatcagtcacagccatcgatcatgtctactctgcccaacaagacaacagcgccaacaacatgccctgcaggggacattgagtggccttcaaggcaatcttcatgcctcactgctccagcttctgatattcagacacaactaaacacaggaacatcattggcttcgggtttcgatgagttagatccgtttgctaattggcctccacgtcccaacaatggtgcttctgttgcttctaccggtctcaagaatggcgctgcatccaattttagcaacaatttaccaggcggcacccattttcagacagctaacaatgacaactgggcattcagcagtgcctccttgtcttcgctaaaaccaccccagcaagggaatcaaggtatctctgcaaataatcaagatccactcaactctttcggtgtaccaaaacagagccaaggaatgccatctttcaccagtggttcatacaacaaccagaagccagcagacatcagttccatattcggttcaagcaaaaccgaaccgtccgcaatgaaactcgcaccaccaccttcaatagcaatgggaagaggaaggggtagaggtagaggtggtactggcacatctacctcaaagcccagtggttcacaaccatctctattggatctattatgaccacagttcttggtgttgaacctcttcgtgtggtgttggtgtttggtcgtgtgattaagagaagcatatacacatggagattgcgctccgtgctttgtgatgcagagaaaactgttcagaaaaatggagatgttatgtaa

SEQ ID NO: 149259 - DNA, 2936 bp, Arabidopsis thaliana landsberg
  unsure (1)..(2936): unsure at all n locations
aggcgaattgctggataggatattatccaagttagtcagcatctctcactactctttaatctattaccggtggaatcgtaagaaagaacctaccttctcattattgatgctttcctttttttatttttcaggaaaggtaatcggtactccgagaaagatgcagccgttgtcgttaggcagatgctcaaagttgcaggagaatgtcatctacacggtcttgtacatagagatatgaaaccagaggtacattctcttgcttatacctcttaggatgtgctttttgtttctaataataaatcttctgcttttgctcctcctccaatttcttgcagaactttttgttcaaatcagctcaactagattcgcctctaaaggctacggattttggtttatcggattttatcaaaccaggttagtactagctatcaaaatccacccaagcaaagtaagtgttaagagcctattctgttgatttctgtgataaacaactcaatccttcacagggaaaaggttccatgacattgttggtagcgcctattatgtggctcctgaggtattaaagcgcagatcagggcctgaatcagatgtatggagcattggtgtgattacgtatatattactttgtgggaggcggcctttttgggatagaactgaagatggtatatttaaagaggtgtagttgaaaactttctttcactggatttctatctatagcttttcttatttctttctcacttccttactaatatgtactatatgaatataggttttaagaaataaacctgacttcagccgtaaaccttgggcaactataagtgacagcgccaaagattttgtgaaaaagttacttgtaaaagacccacgagcacggctaactgctgcacaagcactatgtatgctttcgagtactaaagttagtgattttttcatgtgcggcggattctttgactaatgctattttgtctcttgcctttgtagcacatgcgtgggttagagaaggcgggaatgctactgatatccctgtcgacatttcagttctgaacaacttaagacaatttgtgagatacagccgtctaaagcaatttgctttaagggtaagttaaatgaggaagttgttggatggataaaaacaaagtgatccggacatgtctctaatgctttgtgtctccttctggcaggcgcttgctagcacacttgacgaggcagagatctctgacctcagagatcaatttgatgcgattgatgtggataaaaatggcgtcattagccttgaagagatgagacaggtaaaagctcatgatattttgctttaagaacattactagttaaatctaggcatgatcagttaatctttatgcatccatttggccttttttctacaggcacttgccaaagatcttccttggaaactgaaagactcacgagttgctgagatccttgaagcggtagttatatttttgttttccattgcaattgcatctctgggggtatcagagggagacgtagtttcataatgagccgttgtgtacttgtatctttgctggtcacagattgatagcaacactgatgggttagtggacttcacagagtttgtagcagcagctctacatgttcatcaactagaagaacatgattcagagaaatggcaggtaaggtcaagagcagcttttgagaaattcgacctagacaaagacgggtacataacgcctgaggaacttcgaatggtaagctgaactaacctcttatcaatattctcgtacggtagagtagatgtttaggtaagtgggtgatgaaacccaatttgtttgtgaatcctcagcacacggggttaagaggatcaatagannnnnnnnnnnnnnnnncagacatagacagagatgggaaaataagcctgcatgagttcaggagacttctaagaacagcgagcataagttcacagagagcaccaagccctgcaggtcacaggaatcttcgatagtatatactagaagaggagtaagtaaaggatacagaatgtaatttgttgggatgtgatatgtcttatcttcttatatgtaatgttggttgtaagataagtggggtttttggcgtttgtagtgataagtaagtaatactttggttgtttaaggcgcagcaaaacaaagagagaaagtggagtgagaatcccattgatgaaatatgagagagctcttaaggtgcactagatgcaagaggccacgtggcattccctgaatgggggacaaatccaattttaatggttgggcaccaaaagaaacatagagagccagctgtaatttcgattctaccatatattttgtctgtttccatttttcttataatattcgttttgagagcaccaaacaaacccttttctatgagtattttccagccaggatctgagtggctccaacgaatttagtaaacaatgattgattaaatgtttattaagggaatatctcaaatcttattggatataaaaaataatgaaatcatcggaggtgacagtggtctataaatgtgtgcattttcgcaggttcggtgaatgtaaatgggtgagtctctgaatttgactagtcacgtttaaagatactaataatattagattatgataacttggtttaaaattagaaaggttgatgaaaagacactaaatccgggatatgtttatcaaaatgcatatggtatgtcttcttctttggctttttctttatttccgaagatgggaaaagtcagtaaacaaggaggggcataatagtagtttattacagtaatcagcggcagtaacacaacagccgcgtttgacattttctgaaggaatcattcgtccgtcgtcgacccatcttcttctctccaatggagtctcctcttcttcttcttctttctctttcttattatttccgatccagtcaatttctcggtttcgtaaacccagttga

SEQ ID NO: 149260 - DNA, 1396 bp, Arabidopsis thaliana landsberg
tctccatgctttagggattttgaacaaagtagcaaaacaacaaaaaatagaattcgaaaaaaacgaagcaaaaaaaaatccacaaaaaaagatcaccggagaagtttcattgatcttcatgtattctgattggcttcaatttgatctcttttctttctctctccttttgcttccttcctctgttttgttttcctttaaccatctcccaaaatactcttccctttaacgtgggtccttcaatctttttgaaggaccccgccattgtcaatcacctttcaaagggatctttattctttttggttttaggctttttagattattgaattgattttgaatgataatcatgatgaattgttttccgtgtttcacttcacaaaagagcagaaacgctccatgcacgacgaacgagactaacgatgataacgttgaacacgacgaattcagaccacctggtacgtttttcaaatttagaaaaaaaaatatgttagctttcttatcacggaactgtgaattagaaaacctattttctaaaaatgttgtttggggggtttgtttggtttcagttgttgcgacgacgaaacggactgaagaaagagaacctgcagagcaacaaccaccggtgaaaacattcaatttccgggagttagcgacggcgaccaagaatttccggcaagaatgtcttttaggagaaggtggattcggtagggtttacaaaggaactcttcaatctactggccaggtttgttaccataccaaagttcaaacctctggatacaattttcggagattttctttgaagttgttttctattgctttgtgagtgtagttggtagctgtaaagcagctagacaagcatggattacatggtaacattgagtttcaagctgacgtcttgtcattggctaaacttgaacacccgaatcttgttaagcttataggatactgtgctgatggatatcaacggcttttagtctttgagtatgtctctggaggttcccttcaagaccatctttacggtataattgaactcctttcacaatgttttatggagatacctttacgcttggtttagaggctgacaatgtatttgatatgcagaacaaaagccaggccagaagccgatggattggataacgaggatgaagattgcgtttggtgcagcgcaaggattggattacttgcacgataaagttactccagcggtgatataccgagatttgaaagcttctaacatcttgttagatgctgagttttaccctaagctttgtgattttggtctgcataatctagagccaggaacaggtgatagcttgtttctttcttcccaaattatggatacttatggttattcagcacctgagtacactcgaggggacgatctcactgcaagtcagat

SEQ ID NO: 149261 - DNA, 1018 bp, Arabidopsis thaliana landsberg
  unsure (1)..(1018): unsure at all n locations
attttctgacatgtttaaattcaaaagaagagtcagattcatccaaaaataaggtaaaggttttatgagtttcttgctcaacatttatcttttaaaactgatgtgcataggtaaagaaatgtgtctaaggaaatagttaagcttctaagattgcttaagtagtatgcaatgtgttggcttatgagatagaaaatcatgatatttcttttctcttagagcaccgcttaattgttgtttctctttcagggaggaaaccacgaagccatgggcgacgaatggcttaaaacaggaaactgcccaatagcaaaatcatatcgagctgtaagtggtgtggcaccacttgtggcaaagatcctgcaaccccctccaggcatgaaatttaaatgccctcaagcaatagtcacagctcgagcagcgatatcaaaaacacctttcgccaagaacctccgtccacaacctttaccagctaaagtactagtgatcgggatgctgggcatggcgttaaatgtgcctttaggggtctggagagagcacactgaaaagttttcggcatcttgnnnnnnnnnnnnnnnnnnnnnnnnnncattcataggaatactgagaaagtcagtgttgatgcctaaaacagctatggtattcaccatagcagcatcagttttgggacaggtgattgggtcaagagcagagaggcggagactcaagtctgtagctgagaagaagttgacattggaggtaccaaatccgtcttctgttgaagcagatcagatgcaatttgccggagtttcatcagatggaagatgcggtgataaagtggtgatgaagtggaatcccatgatgcttgatgttgcaagccctgtgtcttccggagcagctactgttgtctgctaaaaggattttgtaattctcttcgaggatttatatatataattgtttttcttgtatttttttcggctgattgtatttaaaaagtatcttaatgtttgagaaaaacaagaataaagccattttttaacctgtg

SEQ ID NO: 149262 - DNA, 546 bp, Arabidopsis thaliana landsberg
aagaagattctgcagttttaatggtcactttgtggtttgtataatggcgtctgggacagtgggagggttgtctcaggtatatagtagtgcaaaaaggattctactaagagctcgggatggaatcgagaagttggagaggttcgactctgatcctaccgacctcgcttcctccgtgaaacgagacattaccgaggttcaatctctttgttccaatatggacggtctctggcgttcgatccctgtcaaatcccagcgtgatctttggagaaggtgagtaagtttagatcatcaaaatagactgaagtagtggttaaactcttgagcatttggatttttttgctgtaggaagactgaacaagttggagaagaagctgagtatttgaatctaagtctagagaagtacatgtcgaggaatcagaggaagatgttggaagctaaagagagagcggatttgttaggtagagggagtggagaaggagctcacattttgcaaatatttgatgaggaagctcatgctatgagctctgtgaagaactcaaagagaat

SEQ ID NO: 149263 - DNA, 548 bp, Arabidopsis thaliana landsberg
  unsure (1)..(548): unsure at all n locations
cagacaaaaaaaggatatcttacttttgttttttgtttgttttccagacctataatggttcaggattcgaaaaaggaaataaagattaaaaaatttattcataaaggcaattagatctcacatgccaaaactaaatttttgtaggaatccaaacaacattcgagattttctcttataaatagagatttagttgatggcctcctcacacaaactctttcatagactttagatcatcaccatcatattactcaaagcaagaatgtctgttgcagagatcttcgagagagtcgacaaaaacaaagatgggaaaatctcatgggacgaatttgctgaagcgattcgcgccttttctccttcaataacatctgaagaaatcgataacatgttcagagagattgatgtcgacggtgataaccaaatcgacgttgcggaatatgcttcttgcttgatgcttggtggtgaaggaaataaagaggacgaagacattgntatgaaagaagcttttgatttgtatgacattgatggtgatggaaaaaatatcgcgagtg

SEQ ID NO: 149264 - DNA, 2214 bp, Arabidopsis thaliana landsberg; identical to SEQ ID NO: 28378

SEQ ID NO: 149265 - DNA, 1054 bp, Arabidopsis thaliana landsberg
ttccgggccggtctttatcccacccgttggctcggaggggcatttcggaggtggtgggtccggtacgttgataagaaattacggtttatcggcggacattgtaattgatgcccatatttgttgacgcgaatggaagctttcttgaccgacaaggcatgggtgaagatttcttttgggctatccgtgaaggcgaaggatcaagcttctctgttgtcctgtcatggaagattagattgcttgatgttccgtcggtagtaacggtctttaaagtcgtgaaaacatcggaaaaagaggctgtctcgatcatcaacaagtggcagtatattacggataaggttcctaatgagcttttcatcagagctatgctacagaaggaaaccgaggtttatgcttcgttcccgggactttacctcggtccggtaagcgatctattagcattaatgaaagataagtttccggaattaggtcttgagattggaaattgtagagaaatgagttggattgagtctgttctctggtttataaaaggagaatcaatggaaattcttgcgaaacggaaacgaacgtcaagatctttcaagggaaaagatgatttcatcgaagaaccgatacctaaaaccgcgattcagtatatctggaaacgattcgaggcgccggaggctcagcttgcaaagatcatactcactccatttggtggcaaaatgagtgaaattgcggattacgaaataccattcccacatagagaaggtaatctttatgagattcaatatttagcttattggagtgaagaagaagataagaacaagactaatactgaaaagtatttgagatgggtcgagagtgtatacgaatttatgactccttatgtttcaaaatctccacgaagagcttatgttaattttagagacattgatttgggaatgtatcttgggttgaatatgaagacaaagtacgaggaagcaaaggtttggggagtgaagtatttaaagaacactcccgatagattggtgagagttaaaacagtagttattgcgatggatttcttttgtgatga

SEQ ID NO: 149266 - DNA, 939 bp, Arabidopsis thaliana landsberg
tttttgaatcgaattttgagatttttgaaggtgggcatctgtgaaattgtgatgagttcggcgaatttgggagatttgaacaaggtctgggaaataaaggctttgaagaggaaacctagagaagatgaagcgaggaagattctggagaaagtagctaaccaggttcagccgattatgactagacgaaaatggcgtgtcaagcttctctctgaattctggtaatttaaagggtttttgtcaatttgtctatttataaaagttttgaatcgataagtggttgtggaagaatgattgaaagtattgttttttagggttcatgatgtttgttcttgatttcgaaattgcagcccaacaaattttttgcttttgggggtgaatgttaatagaggtgtgcaagtaaaattgaggcttaggagggtaaaccatgatttagatttcttatcgtatcatgaaattctcgacaccatgctccacgagctttgccacaacgctcatggtcctcacaatgcaagtttctataagctttgggatgaacttcggaaggtatctcgatttactctgttaaaaatgtttcttatctaggaaatagtactggctattgaagaaaacttatttgaaattttgggtactttttttatttcattacacatgcttcatttgtttgtgcaaacagtgattaactaattccattacatctaggaatgcgaggagttgatgtcaaagggtattacagggacgggacagggatttgatatgcctggtaagcgtttgggtggactttctcgtcagcctcctctatcatctctcagagcaactgcagctaaagcagcagaaaaaagagtgcgtgcgggaactcttttaccttcaggacctcatcgtcttggtggtgatagtagcatcatgtcagatcttagtccaattcaggctgctgcaatggct

SEQ ID NO: 149267 - DNA, 659 bp, Arabidopsis thaliana landsberg; identical to SEQ ID NO: 7665

SEQ ID NO: 149268 - DNA, 1969 bp, Arabidopsis thaliana landsberg
ccacattcacctgtaatgtacgcatatctgattgtagaggttgaccaagcccaactttttgtagataattctaaagtaacggtggaggtgaaagatcatttgaaaaacgcagggatcgaacttagaccttacgattccattcttcaaggaatagataggtaagtacttgattgtccatgtccatttatgaacttcagaaaaaggaatttccctcactttgagttttctcagtttggcagcacgaggagctcagctcttgatggatccatcaaccctcaacgtagctatcattagtacctacaaatctgcctgtgaaagatattcgaggaattttgaaagcgaagccaaagttaagacaaagtttactgatagctccagcggatatactgccaatccttctggtatttacatgcaatctcctatttcgtgggcaaaggccattaaaaatgatgctgagctaaagggaatgaagaattctcacttgaggtaaagaaagccattgcttttacgatattttcctaatccaactgcctttataggattcaacttttctctggaagattttggtttcttttgtactttcaaatgctaagtatcttaggctgaccaaatatatatggagaaatgctgctgctctagctcatttctggaaaattttggtttctttttttcctatgtatgggaaatgtctttggctgaccacttattttatgcagagatgctgctgccctagctcatttatgggcttggctggaagaagaagtgcataagaatgcgaatctaacagaggtcgatgtggctgacaggcttcttgaattccgttcaatgcaagatggttttatggatacaagctttgatacaataagtggtatggttattgtcacccttgttggtggaacttgcttcttaacacatagtcaatatacagccagtgagtgatatgtattcctttcctctaattacccatgcaggttccggtgcaaatggtgctattatacattataagcccgagcctgagagctgcagtcgtgtagaccctcaaaaactttttttgctggatagtggcgctcaatatgttgatggaacaacagacatcaccagaacagtacattttagtgaaccttctgcccgtgaaaaggaatgtttcactcgagtcttgcaggtggaatatttggctcttcttttcctcatcatttttgatgaccattgactacctatattgaacagacgaacctgtatgggttgccttgtctgattggtattttggttgtagggtcatatagctcttgatcaagccgtgttcccagaaggtactcctggttttgtattggatgggtttgcacgctcttctctatggaaaattggacttgattaccgccatggtactctattctatcttttgactcttcttcccagaacaacttttttgtaaggaactcatattactctgatattttgcctgccaaacagggacaggacacggcgtaggtgctgcactcaatgtgcatgaaggtcctcaaagtattagctttcggtatggaaacatgacccctcttcaaaatggcatgatagtaagcaatgaacctggatattatgaagaccatgcatttgggatccgaattgaggtgcgactttgtcaccagtccatgacagtttttataggatatataagatttaggtaacaattgtatggtctgcttttgcagaatctccttcatgtgagagatgctgaaacaccaaaccgctttggtggtgctacataccttggatttgagaagcttacattcttccccattcaggtacagagtgacgtatccacttataaataattcgcgtctctgaatctaactctcatttttctggtcaagggagcccttctggttttcttctagctaattgatttgccttacatttgatctcacacacttctcactcaccaaaccatgcagacaaaaatggttgatgtttc

SEQ ID NO: 149269 - DNA, 560 bp, Arabidopsis thaliana landsberg
taaaggcaaagaaattgcattaccaagcagacaacttgataatcttttatgtttctatatttaatcgatttggtgaatatatttatgcaacacaggaacttggaatcgctgccatacatgtgaaactccgtgccactggtggtaacaagaccaagacccctggacctggtgctcagtctgctctaagagcccttgcccgttctggcatgaaaattggtcgcattggtaaaacagcagcaatcttcaactgtaattgtttaattgcatctttgattgaataaatctctgacattgttcttgttttcctcagaggatgtgactccaatcccaaccgacagtacccgcagaaagggtggaagaagaggaaggaggctctgagttatttggcctctcgttggatctccttatgtagctttctcaatgtttcattttgttttttcttagtttgaaaagagttttggaattactatgctttgttatagtctcaactctgaacagcttcggatctttttctgtatgaccataagatattcaaaaattggtagtcattttatctcaca

SEQ ID NO: 149270 - DNA, 2225 bp, Arabidopsis thaliana landsberg; identical to SEQ ID NO: 35476
  unsure (1)..(2225): unsure at all n locations

SEQ ID NO: 149271 - DNA, 1143 bp, Arabidopsis thaliana landsberg
gcagttggcataaattgggggacagaagcgtcgcaccctcttccgccttcaaaggttgtagagcttctgaaatcaaacggcattgtcaaagtgaagctcttcgatgccgacccaaaagttctccgagctctctctggttctaatattggtgtcactatcggaatccaaaattcgatgctcaagagcttgaatgcatccgtaaaggtagcagagagctgggtacatgacaatgtcactcgttacttcaacggtggaaacagagttcgaatcgagtatcttctttctccttctcttctgcttatccagttatatatatatagatttaagatttttaagctggaatttaacttatggaatttgaatgagtcggatttgtttcaatgccaaattgccaatcttcttattgtgaaattatcattaaagaaaagaattgattttcaggtatgtagcagttggagaagagccatttctccagagctatggcaatcagtataagccttttgtgattggggcagctatgaatatccaaaatgctttagttaaggcgaacttggcaaatgaagtgaaggttgtagtcccctcaagctttgattcctttctttctgaatctggtcgaccttcttcaggacactttagggctgacctcaacaagacgatgattgaactcctctcctttctcacaaagcaccactctcctttttttgtgacaatctctcctttcctaagctttcaccagaacaagaacatctcccttgactttagcctctttaaagaaacagcaaaggctcacaaagacggacgtaaaacctacagaaacagctttgatctaagctatgacacacttgtctctgcattgttcacaattgggttttcggaggtggatatcgttgtgtcaaagatcggttggcctacagatggagcagaaaatgcaacatcactgactgctgaggcgttctttaaaggactgatagttcacttggagaaaaagacggcctctctcccgcgtcctcctgttgaaacctacattgaaagtctcttggacgaagatcagagaaacttatctgctgggaactttgagaggcactggggagtgttcactttcgacggtcaagccaaatacaatttcagtttcaaccataagaa

SEQ ID NO: 149272 - DNA, 1140 bp, Arabidopsis thaliana landsberg
atgttaatcaacgaatcacgagtgtcctgattacttgagagagcttataagaaagactttgacattgacagagaaaccatttgggatcggtggtgttcttgcgtttcctcatgatttgaacattaagacaatcttagaagagaaagtggctgtcttgcagctttattggggtgattgttcacaggagcttgtggatgatgctcactttgccggtgtcaaagttattcctcaggtaactaattttgtatgtttaccaaaaggaaggaacttgtcttatatttattgcttagttaacttttgaaaggtggggaatgtcgaagaagctagaaaggctgttgctgtaggagtagacgccattattgtccaagggcatgaagcaggtgggcatgttattggcaaggatggtctcttttcattgttgccaagagtggtggatttagttggggaacgcgatattcccgttattgctgctggaggaattgtggatggacgcggttatgttgcagctttgtcacttggggctcaaggggtctgtctaggcacaaggtgtgtgctcttcttttgttccacatgttctcaagtttgatattagctttttgttgggctgagttttttagaatcttcgttttcttagatttgtggcgactcatgaaagctatgcacacccaatatacaaaaggaagttgattgaatatgaaaaaaccgaatacacggatgtatttggaagagcaaggtggcctggtgcgcctcaacgtgttctggagacgcctttctttgatgactggaggtctcttccggctcatgagaatgaagttaaccaacctattattggacgttccatcatacatggcgttgtaagttgtgtcatttgcatatttctttttttaatgagatttctttggtcttgcactgatgattaagggagcttcacattcattataggaaaaggagataagaagattttcaggaacagtaccaaacatgacgacaacaggcgacttagagagtatggctatgtatgcaggccaaagcgtaggccttatcaaggagattttaccggctggagaggtagtgaaaagtcttgtggaagaagctcaggctctgatcctccaaaagttcaacaatgctactactacatga

SEQ ID NO: 149273 - DNA, 4238 bp, Arabidopsis thaliana landsberg
tcagccgatacagcagcagcagctctttccagtaagaccaggtcagcctgtgctaataacatcatcccgcaggctgtatcagtcccgtatattcaaacgaacacgattctcacttctggttctactcaagcacagccaaatgcacctccaatgacgggctttgctacatctggacctccattttcttctccatatactgtgagcttctgctttttttttgtattagttattcggataactttttatatatgattcgttttcactttgctggattcttgttcctgcagtttgtaccatcatcttatcctcagcaacaaccaacatccttggtccaaccaaattctcagatgcatgtagctggcgtccctccagcagcaaacacttggcctgttcctgttaatcaaagcacatcacttgtttcccctgtgcagcagactgggcaacaaacaccggtcgcagtttccacagacccagtaagtgactacgtttactgatcacagatatgttttggtgacttgtattgatgcctagacctactattaatcatgaaaccatctcttactaaaatgcgaatcatatcatgttgagttgtattatcatataaattgtgacaaccaacatatgtcttctgccatttgtagcatttcaatctttttcgctgtattattttgggatagtgtttttatctgaatcgagtgttcctcagctttctccgaattctttagacttagtaatttcatgtacttcctctggatcgttacttaggtcaaactctgattaggtttgaaaacgtaaggttttgatctagagaatcgtcaaactctttgaagcctcaagaagcccctagcacaaattatttcagaaccttgtcctatttatactcaattactaacttgctgatgtggcatagttgatgaactcttatcgaactcatttgtctagtcttaatgtatgcaattgtagctaaatgtgcttgttggattttggtaacagggaaacttgactccgcaatctgcatctgactggcaggagcatacatctgctgatgggagaaagtatgctactaaactattatttcagatttaggccaaatatcttcctacatgtcactctttgtactgtagatttgtgttcatgcagttccaatttgaaattgattacttttagttggaaattgtttgtaagcttctcactttttgtacctttcataaggtcttccatgcttcctttttttttgtttgtttttgtttttccatgcagatgtctgtttcatggttttgggtctaagaattcgctttatctgatatatacttatctttctaggtattattataacaagcggacaaagcaatcaaattgggaaaaacctcttgaactgatgacaccacttgaggtaatacttacaaagtagtctgtcttctaagatgattttcattttactggttgattaagcttaccaggcttttagttggtgtgccacttcactagtgatgtaaatggttgcagctttgtctggaacaacgttgtttaatttgtatatctttttcactgattcagaaactccatggtaactgtggagatatttattaagactgctacgtgctcatctgaaagcagctttcactttattgaaacaggctaccgatgcttttctgtttctcatttcttttttttttgtgtaaatcggtgtcaactttgtaggcagtttggggataatttgctaattttttatgctcgttggattaagaatctcctgataatccttatttcgtttttatattaagatcaaatataccgtatctatgcatgattttacagtttctaaaatctctttctgcagagggctgatgcatccactgtatggaaggaatttacaacacctgaaggaaagaagtatgcatctttaaatttcatttagtctttgtatcatgcttattctctattgttgcaactgattagttgttttaatttacgcagatattattataacaaggttacaaaggagtctaagtggacaattccggaagatttaaaggtctacctatttatctctctctcatgcacattccccaatgcaaagcctatgttaaacctgggtagttgttgtatgcagttagctcgggaacaagcccaactagctagtgaaaaaacgtccctttcggaagctggatctacccctctatcccaccatgctgcatcctcgtctgatctagcagttagcactgtgacttctgttgttcccagcacatcttcagcacttactggacattcttcaagccctattcaagcgggtttggctgtacctgtcacccgtcctccctctgttgctcctgttactccaacatctggtgcaattagtgacactgaggctactacaatgtactatttttccttgggaagttttgtttgatgtttatacactctgtcaagcctttgaatttaactgttgtgcctatcataacagaaaaggcgataatttatcatctcggggggcagatgattcaaatgatggagctacagcacaaaacaatgaggcatgattttaattttcctttttacaattacttgccttgattctaaaagtctattcttttgtattccgtttacctgctttctacttcagcttcatgaggtcaataataacttgtacaagttattggaagacttatgttcaataattactatacgtgtgatgatgtggtggtgtcgttaatatttatggtctagcgttacaccttggtatgctttctaattattttgaattttttgttaggctgagaataaggaaatgtctgtgaatggaaaagccaatttgtcacctgctggtgacaaagcaaatgtcgaggaacctatggtatatgctactaagcaggtactttcttatcctaattttctcctcctgatatctctcatatctgtaccataatgttttatttgccattcatcaacttttgcactgttatttttttctaggaggccaaagctgctttcaagtctcttttggaatctgtaaatgttcattccgactggacatgggaacaggtaatctggacgcatacgcaagtatttgtgtcactgatccatatggcctgcattctctccctaaccttctatttggttcattgctgacctgatccatccccttatagacattgaaagagattgttcacgataaaagatatggtgctttgaggacactcggtgagcggaaacaagcgtttaacgaggtatatagtttcttagttcctagctataatatgcaaatgcattttaatagcctgtctatataatgtaatgcagacttccagtctttatttgtgatgtaattattttattttaagtagctttttgcttacatctgattgtcaaatattttttttcagtatcttggccaaaggaaaaaagtggaagctgaagaaagacgaaggaggcagaagaaagctcgggaagaatttgtcaagatgctagaggtatgtactaaaggagtcagaagttagtgtttggtttgattagtgtgactgattagctgattatgttatactaatattgacctcaggagtgtgaagaactttcatcatccctgaaatggaggtgtggctttcagttaattacaagatctttggttcatgtctttattttatatgtgacatatgtgctaatgggaactattccctcaccagcaaagcaatgagtttgttcgaaaatgatgagcgttttaaagctgttgaccgtcctagggatcgtgaagatctttttgacaattacattgtggaacttgagaggaaggtaaccatcagactttttcggggagctttcgttttcatttgttgatttggctctttgattgtttggtgtgatactttgctctgctaagcaaaacaatgcatgcctatgaacatgaaggcgttggacaaagttttttttttttttttggttattacagtccaaatagttttcgacctcagtatgatcacaagagacatgtcatatttacggcgaagcaattatttgggtgggcatttagattgtggctgagataagatctggtgcaccagcatggtggctttaaagcttctatagagaatatcgtttgttgctttgtagaagaggcaaattcattgtgtttgaattgacattatgaatcttttaatctgcaggaaagagaaaaggcagcggaggaacatcggcagtatatggcagagtatcggaagtttcttgaaacctgtgactatatcaaa

SEQ ID NO: 149274 - DNA, 853 bp, Arabidopsis thaliana landsberg
tacttttagggagaggatctgagtagcaatcacaaggtgagaaatacgaagagttttctcgttactcttggctgcagatgcgggtgttcgaactggagttcagtggatgtcggctgacgacaagagaagaagctctggtctgaagacgatcaagactcaattgagtttctctggagatctaagctcggagatgaagattcatcaacaacaactagaagcaatgctagagcacaggaagtctctggaaatattcggagctcctcttatagagaagagaatcattcagaagaaatttccatgggaatactcgagctctgcgaggaaagaagaacatggattctctgtgaagtatgaagaagaagaagatgggagtgtgagcgatgtaagtacggatctttttgagattgagagcttaacagggaaggcaaagccttttcttgcaaggcaaggaagtagtgatccagactcaccagatggttatgcaccaagtgaggtaagcatacaatggagtgtagtgacagcaagtgtagcagatttctctgttatgtcagaatgtgctacgagtcccgtcaaaaagaaccggtcttttcagattcctcgaatccctatcatggcaaaatcaaaccgagaaatcgcgcctcagagacggaaatctagcagtagcggtttattaatgggatgcaagagtcataaatctgtcagagtttctggtgattcatacacaagcatgaacagaacaccgagctatgttccaagattccctgtagaagctaatccaacaagcactgaaacaagaaggaggatcagcagtagttctgtttctcacacgcaatcgccttttttgtatacttaa

SEQ ID NO: 149275 - DNA, 1859 bp, Arabidopsis thaliana landsberg
tttcttctcatattcatactataagagcacactagaaactgtgggtggtttagcaacaacaaattttgaagtttgttttctcatctatctaatttttgcttgaagcatgatttaccacttgaacgttttagaataatacaaagttattttccagaatattgctgttggtctttatcgatatctcagctttgtttagtatctttgtggcattgtggctgatcgtcctcctttttgtctcagcttagctgttcgtgacctctcaaacttggttaagccagaagatattgtcgagtccgaacatctcgtaactctccttgcagttgttccgaagtattcccaaaaagactggctagcatgttatgagactttgaccgattatgtggtaaatttgttgacttgctaggtttattgaatagaccagtggtaacactactggtttgacgtaccgtgattttaatcaatttatcctaacttgtttcaggttcctaggtcctcgaagaaattgtttgaggataatgagtatgccctttacaccgtcactctctttactcgtgtcgcagataatttcaggattgctgctcgtgagaaaggattccaagtgagtattctgttcaagttcctgatattacctctagagtttacgtagaagttaaaaatgattacatgctagtaggagtgaaatttcctacgaactgattgtattcatggtgcaagttcagaaatttggtttagattcaaagatttgttcatcatatattgtacaccatcctcttctaggtccgtgattttgaacaaagtgttgaagcacaagagactcgtaaacaagagctagcaaagttggttcaggatcaggaaagtttgagaagctctcttttgcagtggtgctacaccagttatggagaggtaggtatctacacattgctctgaatagatattctcttgtaatacaatacctgaatctgttttgatcatcggtctacatctgtaggttttcagctcctggatgcatttctgtgctgtgcgtacattcgctgagagcattatgagatacggtttacctccggcgttcttggtaaattaggactccaagctatgctattttagagaattcctctaccctactatctcccttaccaaattactttctcttgtctttccaggcatgtgtcttatctccggctgtgaaaagtgaaaagaaagtacgctccattcttgaacgcttgtgtgattctaccaacaggtatgttaaaactctctacctatctatcgctctaggtgtaggatacatggaagctgtttaacatcaaccttcatattgatctggcgaagaaaaatgtactgatagttatgaccttaataacgaaagaaattgcagaagtttgaggagaaagtcaggaaccaagtaaaaccaaacttgtattagcatgcaatgcgttcttgaggctaaatctattaatcagaactaagtcgctttagttagattcatctattgatgtagtgtagttcgatgagatttcaaattgagcgttttgggtctcattgtatgaaaacaatgcagtttatactggaaaagcgaggaggatgcaggagccatggctggtttagctggtgactcagagacacatccttatgtctccttcactatcaaccttgcttaaaaatatgatgagagatgcttttgatgccacttctcctctggtcttctcatctgttatatttgtttgtggtctatagatttcacatttatttttcgtaatatattttgattttcataaataaggtggcactcaagagagatgcatctgagcctttgcaggagctttttctttagagtatgatgtgtttcagacacgtctggt

SEQ ID NO: 149276 - DNA, 1863 bp, Arabidopsis thaliana landsberg
gaatagattcatccagattgtgtggtctgggcagaggtcttctccgccgaaacccaagaattgttataggattctctttttgtttacttttcgttatgatcaatcaattcacgcaactcagatttttcatggaaacatctggtttttttgtgcaagttgaacgcttgacattccgagagttcttcaatcacatgttccttcgagagccaaggtaaagtctgtagattttgactaaaacaaccttcatcatccaaaagctataatttttctccccttaattatgtcatactaaatgttgttagacaaattccggatgttgagcattctggttttagtacctgtacggggaaatcactgttgccctccgcacaaccgagtactagtacaaaccgttttaaatcaagtgcagagaatgttcacaaacatgggagttcctctagtgcctcaaattctcaaatttcaatgccacatacctcttttgagaagactagaaaagatactgagggacaatgctcatcaaaccaatctggcggtttgttattcgcaattttatgtctgatctctgttgctctgtataagatcgtattactcacatactcttgctatgtcattcgtgcagttgttgattcactcgagctcatagagagagagtatgttcttgtaaaccgtccttctgcctcgctggaaggttcatcagattgtttcgacacatcattgcaagattccggttttcctaatatcttaccaaggaatgaaaaagtttcatcgagttcacttgaagcacagaaaccattatctgatgtgtcaggtccacgaccagcaagcgtttcatatctgctaacagaagtacaacgcttaacgattgtccatcctccaactaaactccaacttttgcatcagtatgcacaagcacttacagaactagctagcgagatggtaacttgaactcctgaactctgggttcttaaatgataacattagagcttgtaacacctttgcatacagggcaatacagggcaggtaaaggaatcttttgctgttacgctcgtcgttttagctgtctggagaaaagccttagagatatgtgattcttggatgatgtccgttggagagaatgaagtgaacccagatccaaccacggctcctgagacttcgattccagatttgaattcacctgcaccagctaaaacgtgggtgacacaagagtttgttaccgcgtttaaccaagccgagaatttatcaactcaactaaacgaaacaagtggttagtacctaaccgagcaattctctgttatgcttctttgtaattatctgaaggcatctcctgcgtttcattacagctgccactcatatgcctgacgccatggaaacaatatacgagagggcactagcatatggcaagagtggtggggtaagtacaaagtttccatctttttcgcttatgtttttaccatttggttctaaagtctgaaagttttatgaaaagcttctttctacctttctatctactgatttgtcctaaaagtctgaaacatagtgggttgatccatttgtatttgtttttcaggctgaagaatatttgagtaacaaagaaagtgcagcaacattatacaagaaagcaattcttctactctcctttataatcgaggaagcagtgactctatctctaaacccacctttctcattaacccctgacgacaagaagcggattctctactacatctctaacttacagcatcgtcggtctcatctttagcgaaaatagaccgcgggcattgtatataagaaactttcctggctctgcttgggtcaagtctataacatttgtggcttttccttatattctcttgaaactacgaaatg

SEQ ID NO: 149277 - DNA, 1141 bp, Arabidopsis thaliana landsberg; identical to SEQ ID NO: 60287

SEQ ID NO: 149278 - DNA, 1269 bp, Arabidopsis thaliana landsberg
aatacacctactgttagccagccgccaatttcaaaggacatcatgagcaatgtttcatcgctgaatcttttctggagctcaacttgttcatgtactgcatcagacgaggaacaagatcatcatcaggttaagagctcgagaaacaagaggcagtattggaaagggttgtttacgacagttgccaaaacagttaatggacatccaagagtagatgcaaaaaaggttcttgtacacactgaagtatcgtcagaaagagagaatctcaagagaagaagcctgaagggtccaacagatagggagaatcagcagagcccacgagtcattaatccatgagaggtccaatgcagcagctaaagacgttgcaatcatatccttcttgcacaaaatctcaggaggtcaaccacaacacccgcaacaacataatcataaaccatcacaaaggaaacaatatcaaagcgatcattcaataacgtttgagagtaaagagccgagggcggttctattggatacaacaataaagatggggaattacgataacaatcattcggtgtctcctagttcttcaagatggcctaaaaccgaggtcgaggccttgataaggataagaaagaatcttgaagctaactatcaagaaaacggtactaagggaccattatgggaagagatctctgcagggatgagaagattgggatacaatagaagcgcgaaacgctgcaaagagaagtgggaaaacatcaacaagtactttaagaaagtcaaagaaagcaacaagaaacgtccccttgattccaagacttgcccttattttcaccagctcgaagctttgtacaacgagaggaacaaaagtggggcaatgccattgccattgcctctaatggtgactccacagagacagttgcttctctcgcaagaaacccagaccgagtttgagactgatcagagggaaaaagttggtgataaagaagatgaagaagaaggagagagtgaagaagatgaatacgatgaagaagaagagggagaaggagacaatgagacaagtgagttcgagattgtgttgaacaaaacatcttcacctatggacattaacaataatcttttcacctaagtggttttataatcattttattatatacactttcctgtaaaatggggttgaaggaaaaaaaaaaagcatatacaacaaatgtaagtaaatggcttgattttttagttattagtattccatttcgtgatatatttaataaaataattgattttaaagaaatatgt

SEQ ID NO: 149279 - DNA, 1422 bp, Arabidopsis thaliana landsberg; identical to SEQ ID NO: 25014

SEQ ID NO: 149280 - DNA, 3723 bp, Arabidopsis thaliana landsberg
aaatttatcaccccgtgcttctgatcacggtgggattctctccgatcggtgacatatcgtggttcatactccggtggatctcacggcgtaataatttatcatatctgaatcgcaatcttattaaccatggctcctccggccgcttcacagcgttatccgtcaccgtcccaaccttcagggtaacttatgcttctatccatcctctctcgatcaatagcactgaattcaccttacattttttagataattagctgggatcaatctttatgattcgatcatctcttttcatgcgtggtccgtcagctcattacttctcgaattttatgatctgtattattcctatacgaaatccagaaattcagaagctctcatttagcagatctagttttagtgcctagttttaccagtccgagctaagttatgtcaaaaagctaatgtggaatcagaagaagccatttagtttgaattttccccacttagaatctgattcctaaatgcagtgagtatggtcgataatatctgatctctatttggtcaaatgaagcatgaattgaaaatagaaattgttatttatcaggaaaagcgaagtgtcagatctgaaaacccagcttcgccagctagctggaagcagagctccaggagttgatgattccaaacgtgacctctacaagaaagtaatatcgtacatgactattggcattgacgtctcatctgtatttggagagatggtcatgtgctcggcaacatcagacattgtcctgaagaagatgtgttatctttacgttggaaactatgcaaagggcaatcctgatctttctcttttgacgattaattttctgcaaagggattgcaaagatgaggaccctatgatccgtgggcttgcattgaggagcttgtgttctttacgagtgccaaaccttgtggagtatctggttggtcccttggggagcgggctcaaggacaataatagctatgttagaactatcgctgttactggagtactaaagctttatcacatctcaccctcaacatgcattgatgccgattttcctgcaacgttgaaaagtttgatgcttcatgattcagatgctcaggttaattttgttttgtatgtataatgttttgttggatggagttggacttgactccctagcatattacttgttttgtataattattaatgttttgatataaaatatattgtcaggtagttgccaattgcctgtctgcacttcaagaaatttggagtttagaagcaagccactctgaggaagcatgccgggaaaaggagtccttgctcagcaagccagttatatattatttcttgaatcggtatgtccttaagctcctccttcaactgtctatcagtataacttgttgttgtagtggtatttaccattgtggtgtttcactgcaggatcaaggaattcaatgaatgggcacaatgtcttatacttgagttggcagtaaaatatgtgccgtcagatagtaatgatatttttgacattatgaatctgttggaagacagactgcagcatgccaatggagctgttgtcttggcaacagtcaaagtgtttttacaattaactctctccatgactgatgttcatcaacaggtttaaagtccacctcctctatctttaatcatcgaaaattattcctaatgaaattagttatgtgcggaatttcatgaacaaatttgtaaaatagtctctgcattgtccacatagggaagcattatttatattacttttggaaacatagtctggaagcttaaaatctaatcttaacaatcatagtcatcattgatttgttatcatttaagatgatcactgtctaactaatgccaaatgatcttgtataggtatatgagcgtattaaatccccacttctaactcttgtcagttctggaagtccagagcaatcgtatgcaatcttgagccaccttcatcttttggttgttcgtgcgccattcatctttgctgcagactataagcatttctactgccagtacaatgaaccatcatatgtcaaaaagttgaagcttgagatgttgactgctgttgcaaacgagagcaacacttacgaaatcggtaatgatttcaaactatgtcaatatggaatctgaagctagaaaacctttcttttccggctctttgattggactaattcgtacttttttcttttcagtgacggaactgtgtgagtatgctgcaaacgttgatattgcaattgcgagagagtcaattcgagcagttggaaagattgctttgcaacagtatgatgtaaatgcgattgttgatagacttcttcaatttctggagatggaaaaggactatgtgaccgctgaaactttggtaaactatcatttgaactattcacggagatgattggccatcacattgatacttatattgtttacattttcataacaattccacttgtctggttcctcttctaggttcttgtaaaggaccttctaaggaagtatccacaatggagccatgactgcatttctgttgttgggggtatcagcagcaaaaatatccaggaaccgaaagccaaggcggctcttatatggatgttgggtgagtatgcacaggacatgagtgatgctccttatgttttggagaatctgatagaaaactgggaggaagagcattcagccgaggtatttaggcatcacttttctgtttttccttgctactgaaattatggttccatttatgcgtgagaatgaggacttgctcattagtatatgttcccaatttgtgccattgagcaggttcggttacatctcttaactgcggcaatgaaatgctttttcaagagggcacctgagactcagaaagccctaggaacagctctagctgcaggcattgctgattttcaccaggtttcttcctatctccccttccaaatttctctttctttttttcaaacccattggcctattagatcactaattcaacatttactgttggcataggatgttcatgaccgagccttgttctactatcgggttctgcaatacgatgtacacgtggcagaacgtgttgttagtcctccaaaacaggcggtttcagtctttgctgacactcaaagcagtgaaatcaaagaccgtatatttgacgagtttaacagcctttctgtgatataccagaaggtatgtttcctgactttactactgaagccaatatagtagtatgcattcattagcctacattactcagaggtgttccttatatgttttcataataaaatgactttttgcagccatcttacatgtttacggataaggaacaccgaggaccctttgagttttctgacgaagttggaaatatttccatcacacctgaagcctccagcgacattgttccagctcagcaatatgaggcaaatgacaaggacctgcttctaggtattgacgagaaggatgaaaataaaggagtttccaataacaatggttctgcttacacggccccttcattagaaagctcctctaatataacctcacaaatgcaagagcttgcaatctccggccctgccacatccgcaactaccccacaatcatttggttttgatgatctctttggtttgggtttatcaaccgctcctgctccaacaccatcaccgcctcttttgaaacttaacgcaagagctgctttagatccaggcgccttccaacaaaaatggcgccaattgccaatatcactaacacag

SEQ ID NO: 149281 - DNA, 1236 bp, Arabidopsis thaliana landsberg
  unsure (1)..(1236): unsure at all n locations
atggggtcgncctgtctttcggtttcttctatgtactgacccggcccatttaattttcttactcttatggaagtcttactgcattgaccacctggtgattgctacaagagattattgttttgctccttccatggaagcaatatgccaagctgtagaatttatccatagtaagtgtaccttctcattttattcttttacgttttttgccactgaccattattaaaaagcttactgttgtccgaacccgcgttcatttgatctcaaattctattttgtctccttgaaggaaatgcttcgcttggaaagacgacttatgttcactgcaaagcgggtcggggtcgcagcacaactattgtcatatgctacttggtttgtattgcaataaatcccagaaaaacattttgatcagagacactttttctccttttctctgatcataccttttcaacacaggttcaacacaaaaacatgacacctgaagcagcatattcctacgtgagatcaatcatgcccagggttcttttagcagcagcccaatggaaggtatctgacaggggtcccattcttcattaccgatgaaccagagtttagtcatttattcttcttcttctgattgttgatgtatttgcaggccgttgttgagtactaccatgtcaaggtgctgaatactcagagttgcttaactgatgcaacttcagctttgatcccaagaaatgtgaagcaggtttgttctgggaatgtagtggtgtttgatgatgggtcaatggttgtagtcacccactcggatctagagggctataatgatgatgactcacggtcacggaggtcagtgaaagttaatgggaatgagctatgggcggcagctgcagatctgagtatggtgtacagggtgaaagtggtggggcaggctgcgatggcgaggatatcgtgtctgtggctgggcttgcgtgaggaccaaaagctttctgggaaaaatctttccatgggaggcataagcgtcgacatttctgtctactgatgatgatggcgaagaatgaatgcaggtgagtctgctggcgagtgagtgaatataccttattcactgtttctccccagtagaaaaaaaaagtctctaaataaaaaaatgggtcaaattaggtatagaagtaagcaagggtttgtaaatttgaaaaaaaaaaaaacttggttttgtcgtctgggtattgtaattaaatactaccttgtccctcatttgcc

SEQ ID NO: 149282 - DNA, 3458 bp, Arabidopsis thaliana landsberg
  unsure (1)..(3458): unsure at all n locations
gatctttccatttatttatactgcaatcacgtctgctgacagagatgaggagaaaaaaatggtgacactagatattgaatactatgggcgcccagacagaggaagtacaatggtcagaaaataattgacacatggttcatacttcagtggtgctttttgtaagtgaagtttaacacttgggtttctgctgcagggtatgcgacatggttcttatgataaactgtatgattatggtcttgcatcctcctgaaacgttatcatgcattgttccttaattatttattatctgatatggaggtgactaatgttagaaagcatatcatacaatcttttatttttggtatagggtactagagtttcaggtgaagatgttatcattgggaaaaccactccaatatctcaagatgaggctcaaggacaatcatcccgatacactagacgtgatcatagtataagcttgcgacatagtgaaactggaatggtggatcaggtaactttggtttttccttgcagttaagggtttagaaagtttcaggattgaaatatgaaactgatcaattcttgtaacttcgtgtaggtgttattgactacaaatgcagatggtttgaggtttgtgaaagtgagggtcagatccgtgcggattcctcaaattggagacaaatttagtagtagacacggtcagaagggaactgttggcatgacctacacgcaggaggatatgccatggacgattgaaggggtcactccggacattattgtgaatccacatgctattccgtctcgaatgacaattggacagctaattgagtgcatcatgggaaaagtggcagctcacatgggaaaagaaggagatgctactccctttacagatgtcacggtaacttgcattttccttagctgcttagttagcattgggcttggtattattagttttgaccaatgttgtgtcgttaggtggataatataagcaaagcccttcataagtgtgggtaccaaatgcgtggatttgagagaatgtacaatggtcacacgggcagaccactcacagctatgatattccttggaccaacatattaccaaagattgaagcatatggttgatgacaagattcactcgcgtggacgaggtccggtgcaaatcttaacaagacaaccagctgaagggcgatcacgtgatggtggtctccgttttggagaaatggagcgcgattgcatgattgcacatggtgctgctcactttttgaaagagaggctgtttgatcagagtgatgcgtatagggtacatgtgtgtgaagtctgcgggctcattgccattgcaaatctgaagaagaattcttttgaatgcagaggttgcaagaacaaaacagatattgttcaggtaaacataaactgttgtgcaagtggttcatattcatctttatctctttcatgctcatttgtctgatgtcatttcatctaaatattctcaggtatacattccatatgcttgcaaattactctttcaagagcttatgtcaatggctattgcaccaaggatgctcactaaacacctgaaatcggctaaaggcagacagtgaggagcttgcaatctgattttgtagaaacttgaactttccttctctcttggtcatagctttgtaacaatactaaatttacaaatttgtgtaatatttctgtactaattcttaaagctagaaaggtaccttataagatatatttatggattctttagtaaatttgctgctcctaattattctcatggggcatccgtatggngattcactttgtttccttctgctttcatcatcattgtgccttatcgatgagctcaacattgcgaaatccattcaatagctgtttcaaacattaatgatatcttttctatggttttctctattccttcaatattagtagctgcagcatatgcactgagacgaatactaagagtaaattggtcaaaagagactccattcttctccatttcaagcatcagatcatctaattttccatgcacattcatctgattatacatattcatcataagattgtaacaacgtgtgtccatggaaacacccgcttccttcatggcttccacaagcttctcagcttacgatattagcagctaagaagactagaaaagaccgcaataatctttgggaatgttatcaaagaaaacctctgcttctccaagtccacagactcttgatatcaagtttatgcgtgtaccaaaagcttgataaaacatagcttttttttttttttttccctcaaaacatagcttttatttgagagttaaaatgttcaatagatagattcaggtgtaaattagataataataaaagttttgaggcttaatatgcaattatcataaactttcaacctttatttgtattttttcatttttggaaagtctcaatctttgactatcttcttcgccggaaccgatgaatgtactgagacgaattccggcgaatttgattgcgagcagatattactacacaaacagagtaaaaaagacgacactttactcaaaaatcagtcctttaggagacccaaaatcaagtgtttacccagaactccaaaactgggttcaatgcggtaaaaaagtctctgttgctgaacttattagcatcgttcacgatcttcgtagacgcaaacgcttcctccacgctctcgaggtaagtaattctatacaaatcaagtctctttccctctttacaccgagaaaaaaaactaaactttagaatttttcaaattcaggtttcgaaatggatgaatgagactggtgtatgtgtgttctctccgacagaacacgcggttcatcttgatcttattggtagagtttatggatttgtcactgcagaagagtattttgagaatcttaaggaacagtataagaatgataagacttatggagctcttttgaattgttacgttaggcaacagaatgttgagaagtctctgttgcattttgagaagatgaaggagatgggttttgttacttcgtctcttacttacaataacattatgtgtctttacacgaatattggtcagcacgagaaagttcctaaggttttggaggagatgaaggaagagaatgttgctccggataactatagttataggatatgtattaatgcttttggtgctatgtatgatcttgagaggattggtgggaccttgagagatatggagagacgacaggatattactatggattggaacacttatgcggttgcggctaagttttatattgatggtggtgattgtgatagagcggttgagcttttgaagatgtcggagaatagattggagaagaaagatggtgaaggttacaatcatctcattacgctttatgctaggttagggaagaagatagaggttttaaggttatgggatttggagaaagatgtgtgtaaaaggagaataaatcaggactatcttactgtgttgcagtcg

SEQ ID NO: 149283 - DNA, 1882 bp, Arabidopsis thaliana landsberg
ccgaggcccaaatctttctcttttctataatcactcactgtttggttttttatatttgttttcaaaaactttgggaatttcgtcaatggagcctgacgtggtggagatccctcctcctcctctgatcgcttcgggttctagaactcgtaaacccagaaaggttcgatttttatatttctatgcagaattttgctgattcacctggataaaggtggaattttgttcgcttatgatgcgtgaatgatcatctgggtgttttagggtttggttttgatttcagggtttatgtggggtttggttaatctatgcttcaactgtttctctttgccgtttgattgatgggttttgttcttcatgaattgtattgattgtgttcttagagtttcataagtttgaaagtgatcagctttatagcttatgtgaaatcaataagcttacgtttagattttgtgtttggttcgtctcttgtgaatgtttgtgaaatttcaattgttttctctgtttttgatttgtttatcaatcgtagttgatggtaaagtttgttgcttttatcttgttgtaggctgttcctgaagtgattgatgtggaaagttatgaattccgcaatgttggtgttgttaaggataccaatcttgttgatattaagaacgtagggaagccaatacaagttgactccttttgggtcaacagcgttcaatctcatcatcatggatcgtcgctgcttaacttagagacgttccaagactattatggtcataagaatatcccttttagtgaatttgctaatcaaccaattgatgttgatgactactcaatgtatcaagacgttctacatcctaaggatgttccagctggtgcagaggtgacggtaccttggggtttaaattcgagcagtaagggaactgcgaaatcaagtataagcattatgagaagtcaatccatgaaaggatatggaacagtatctctggcaacgactaatgttcctcaattatgggattatactttgcctcagcagaatcaggctatctattcttctgtatcgttttctgcggttcaacctcagactcctgatgtagtgatggtcaccaatcctactccaaacccttttagttatgatgcttctgctagttcttctcatcctatagcggctgagcctatttcttcagttcacgattcttccaatgctaggaaacttaaggaagagtttctgagggattttaaaagatttgacaccgtcgaggatttctcagatcatcactatgcttcaaagggtaaatcttcaaagcaggtgatgatatatttattctctcgataggggttgatgtatccttaatctctctttcatatcaccaactttaatgttacccgccatctctctttttactctccagcactagaagaattgggtgaaagatattcaaaaagagtgcaaaattcttgacaagaatttgccaggtaggtgtatagactgcagcaacacttattcacatttgttcttaagtttctatcccattttttgtttggcaaacagagacaatatttgtcagagcatgtgaatcaagaatagatattttgagagctgtaattattggagccgagggaactccttaccatgacggtctcttctttttcgatattcagttcccagatacctatccttcagtgccaccagtatgtcctcagaaacaatatgtgttctgttttctattttttacttggaacccttaatgactctggaagtccattttgttgttgacagaaagttcattaccattcgggcgggcttagaatcaacccgaatctatacaaatgtggtaaagtgtgcttgagtcttatcagtacctggaccggtaaaaagagggagaaatggctccgcaaggag

SEQ ID NO: 149284 - DNA, 581 bp, Arabidopsis thaliana landsberg
tagtctccgatgtcagttaccaacagatgatcttgacgcgcttgtaacggtaagatccgacgaggatctaaagaatcttatggaggaatacgatctcgctacaacaacgcaagttaagattcacgtctttctttctccgcttaaatcaacgagaacaacagcaaactcgtctcctccaccttcaacgacgtcatcttcttcttcaaaatcacgctctcgttctcctccatcgccttcaactccggaaacatgtcctagttgcgtagagagatctatacgtaacaatggatgttacgttcatagaagtccaagtcataaccaattatacttcatcaacaattgaaacaatctctctaaacattgtaagaatatagaagtcttgaattctcggaattatatttaataacgtgaggatcagtttcatatatattagcccaaaaaagtgagtctaatagatgtaaaagatcatcatgatgttgatgatgatgctagattttttttttttttttccttttgtgattggtgaaagagtgtccttgggaatttttagtgttaccagtacacaatttctttcttccatg

SEQ ID NO: 149285 - DNA, 1403 bp, Arabidopsis thaliana landsberg
gtggatagagacggagacaccgttagagatgcggaggagttgggatcgggaattgacattccgacggcggaaggaatttgtcgattcgattttcaaaagaatttttggggaaacagtaaaaagaaaaaaaaaagtttcaaatttggtcacggtttaataatgcgcgaaccctcttactcatagggaggttttcaggttttgggccgatctgggcctgagggtattagtgtcaatttaaacacgggagagaaagagagagtaatcgccatttttctttattgggggagtgaagaaggataggattcagatgatgaagtacagatgaatgctccataaaccctactcttcttcttttacctccagcttcgattataccattccttgtttgtgaaggttcgtaacttcttcttctctctaaattatctcatggatttatgaaaagaatcgattttgtttgatttatgggttctaattagtcgaagcgcttgggtaggtttgcaatgttctagctggtcttgagcaatctctggtttagggtaccgaaatatgtttatgggaattgaaatttatcggatgagattttgtttctacagtcgtctgttcaaattcgatttcccatgtttcgtttgttttggtataggcattttagttggtaaggatgataactggatacagcacgccaagtgcacatgttctaatgagctctcgggcattcaagtcatcatcatatagagctgcagcaggacagactcaacattatcttgctcgaagttcattgcctgtcgtaaagaactcgtggggatcaccaccttcacctttcaatgagcttccgagagtgtcaagaggcatgtgaatttcttctactcatatggtttcaaacacttattatcatatatccctgcttatatctgtaaattgctccaatgagtttatatgatgtgaatattaaaagacctgtccatgggctgaaactaggataagtgactttggtatttcaaaggtgctgcttttgtttcctaattcaatcttgtatactttgattgttttaggtgtgcctctgtcatatctctcagcctcgtcttctctgcttctgaatggagaacaaggtagtctatctggtacattacctgtgttacctgtccgcagaaaaactcttttgactccacgagcgtcaaaagatgtaccttctagcttccgatttcccccgatgaccaagaagccacaatggtggtggagaactttggcttgcctgccttacctaatgccactgcatgaaacttggatgtatgcagaaaccgcttaccatctccacccattcctagaagattttgaattcttaacctacccatttctaggcgccataggaagattaccaagctggttcctcatggctggcttttttg

SEQ ID NO: 149286 - DNA, 1193 bp, Arabidopsis thaliana landsberg
ccgtttcaccgaagcttcttcaatggcgatttctctcgccaccgcctatatctctccatgttttacaccggaatcgtctaattccgcttcaccatcacgaactctttcctccgtacgattaccttctcagattcgccgattcggaagtgttcaatcgccgtcttcgtctactcgcttcgctccactcactgtgagttctccgttcaccaattacttgtttcgatttgatgctattgattttgagacaaaattcaattttgttcttgttttagttacttcgagtagcttcatggtgtttgtgtattttcatattattcattgtttatacataaagatagaatcagtaatgttgtaaatttacatagttttacactgagattgattccaattgaaacaagaaggagaatgtaacacattgattttagtatattcaacatcgaaggactggatagtccgaatttctcatgtgtattagtgaagctaatcgtcttgccgatggattagcgaactatgcattttcattacccctaggtttgcattggttggagtctaggcccgatgttgttagttctattttgttagctgatgttgcgggggttgcacaccccagacatgttcgaatgtatttttttctttttcttttaataaaaaaaaacattagagagtgtgattctaacatagtgtttgacgttgttctgtgtaatctaaatcagtatgtgtaatcagaaaatgagaattgagatgtaatgaaagaatgaaagaacatatatgttagtgaattgttcttctacttctaatgtaatgttgtttacgtctagtagaagtagggaaaatttgttcatttgtttttatagtagaagcgttttcataatttgtggcgcgatgatttgatgcaggtaagagcagcaaagaagcaaactttcaactcttttgatgatttgttgcagaactctgataaacctgtacttgtagacttctatgctacttggtgagtttatgttcaggtgtacttgttatagcatcaggttttaatgtgttttttggttcttatatggttacagagttgtgttttttgcaggtgtggtccatgtcagcttatggtacctatactcaatgaagtgagtgaaacactgaaagatataattgcagttgtgaaaattgatactgagaagtacccaagtcttactagcgaa

SEQ ID NO: 149287 - DNA, 1363 bp, Arabidopsis thaliana landsberg
gggtgtaaagctccacacttaagtactattcttaattctttggtttgatcagctggtgttcctaaccttgtgaccgtggaaaagtgttgatgatgaaaaggtaaaagtttctcttttgtatatttaaagagaaattggtttgttaaatgttctagagctctttcgaggtgttagataacgaaaacatcatgatctttgggtaagaatactacaattatccagatagtggactctattgttgaacttttgtgggtagtgatattaaagatggattgaagagtttaataagtggtcaaaccacctaaggaatatacgtgtaacggtccaccggttttgtttatttgcatatgctttatagattgcaaatttgcttgatcgtgtggttggtaatatcggaaggaagcccttgaaggtatttgtccaagtgaataccagtggtgaagactgtaagaatctggaatttcttcttcaacatttatctcaaatgttttcctactttcacttttcttaaagctatcttacatgatcgtattcaccaaaactttcagctaaattcggcgtggaaccctcgggatgcgtaggactggcgaaacacgtgaaggaagcttgctcgaatcttgagttttctggtttgatgacaatagggatggctgattacacttcaaccccagagaatttcaaggtttatataatctggtttgaacctataatgtttggtaatatcgtgagatgcttaaaagagctcactttcgtttcttattgtaagtgtagttgcttgcgaaatgcagaagtgaagtgtgtaaggagcttggaataccggaggagcaatgtgagctatctatggggatgtctggtgactttgaactagcagtaagttgttgtgattgttgattcgagtgaaaaattctttctgttcaaaatgttaaagagttttctttacggtttggtgagttgcagattgaactgggaagcacaaatgtgagaataggatctactattttcggggcgagagagtatcctaagaagtaatgatgtaaactactgagtgatgagattgattctaagtttgaacatcaaaaccagtttcagggaagaataagagcttagtttttaatgttgaaatcatgtagatcttctctcttcttttgttttgcattgtatttggtgatgttgcttgtaagttgtaaccaaggtacattattactatttttcaaatttcatggatataaacacatgaaagaagaataaagaatcttgtctttgctacgttactagtgagaagtagttaaaagggtgtcacaaccacttgttactattcttttggtttgagagctctgctaactaagattttaatacttctttt

SEQ ID NO: 149288 - DNA, 661 bp, Arabidopsis thaliana landsberg
caaaagaacaaagatgggaatcattggtaagagtgtttctctaactctctttgcacttttgtgcttcacttcctctgttttcaccttaggagtgaatcaacctggttcatcagatcccttccatagccttccccaacaccttcccctacctccgattacattaccatcactcccaccggccaaagctccgatcaaactaccaacactcccaccgaccaaagctccaatcaaactaccagcctacccaccagccaaagctccgatcaagctaccaactctcccaccagccaaagctccgattaagttaccaactctcccaccgatcaaacctccagttctcccaccagtttaccctcctaagtacaacaagaccctagtggcagttagaggtgtggtctactgcaaagcttgcaagtacgcgggcgtcaacaacgtccaaggcgctaaacccgttaaaggtactaacttatatacattcatgatatatattatcctaaaactcactcgaacccttaatatacgcacatgtggtatgtccgtatgtgaaaagttcttcaatccgatgcatgcatactttttttttgctaaaggtatgctgcatgcatacttcattctttacatttattttaggcatatgttaaaaagtatccataatctcatt

SEQ ID NO: 149289 - DNA, 724 bp, Arabidopsis thaliana landsberg
cgatcgctaggtggtcaccaaaacgctcacaaacgtgagagagcactcgccgagacgcgctatgcgtatgggtcttgctggggtcttccccggtagaggatcaagtagcaattatgcgtctgctgccacagcagccgctctctcgtgtttgccgctttacggaagcggaaacgggaacatgacatctttcaggacttttgggaattcggtctcattccctcggtgcacgacgtcagcatgacatggcagacaccagaaacacttatttgaaacattgccaggttcaaccaggggtattttggtaattgtatacctttttacgtggaggacgacgaggccgagatgctctggccggggagtttccggcaagctacgaatgcggttgcggttgaagcgggtaatgataatttaggtgaaagaaaaatggatttcttggacgtcaagcaagcgatggatatggaaagttctcttccagatctaaccttgaagctttgagctttcgtttttttgtttttttttttgctgaatttggattcttaatttggtgcatcagcttcataactctattatgtacagtgagagtttcacaaaccatttctgatatgttatggtcactatcgattgatcgaccaaaagtcaattctagtgtttgcttacgtggataaaccatttaaacgtttatgtattgtaaactaaatattaagttaattatgctatcaatgtc

SEQ ID NO: 149290 - DNA, 1261 bp, Arabidopsis thaliana landsberg
  unsure (1)..(1261): unsure at all n locations
aaactcttaacactgactatgtacaggacggaccctttaataattttgcttgatgtattggttgagatggaagaaggggctgggctacatcctgtaccacaggcccatgttccggtcatgaaatttaagtttcaaggaataccgattgatctgctctatgctagcatatcacttttagnnnnnnnnnnnnnnnnnnnnngtgaatttattgtatctttctttgtttttgctgaagctgtagggtctgataaatttatattagcttgtatatattatgctatatgttgtgcttgtttgcatgttgatggagacagatagtgtattactcatcctcaatggcttatatagtaaacaaatttattttagtagtttctggcttgagagagagatctgaaaagtttgctggctattttggtgcatcggttttgatttttatatgaaaactgagcccgtgagctgtcatggtagattacaatctcttgctgaatcaaatttcttgttttcatggatttggtttatcgacaggatctggatatctccagctcttctgtgctgtgtgaagttgatgagccaaccgttcgaagtcttaatggttgtagagttgctgatcagattcttaaactcgttccaaattttgaggtaaactcacagaatgccagtcattatgttaacatatgaatgaactatggttaccttctcttatcttatgtgcaattgtagcacttccggacaaccttaagatgcctgaagtactgggctaagaagcgtggggtgtattcaaatgtaagatcatagctttctgaaattcgtatttattgaaaactttcatgtctaagctcttgtcatatttctcatattgggcaggtgactggatttcttggcggtgtaaactgggcacttttggttgctcgtgtctgccagctttatccaaatgcaattcctagtatgctggtttctcgtttttttagagtatatactcaatggcggtggccgaacccagtcatgctttgtgcaatagaagaggatgagcttggatttcctgtctgggaccgtcgtaagaatcatcgcgaccgctatcaccttatgccaataataactccagcttacccatgcatgaattctagttacaatgtctctcaaagcactcttcgcgttatgacagagcagttccagtttggtaacaatatcttgcaggtaagtgagcaaaactattgacttgaaatctcaactatttattcaggatcctatacttatgcatatt

SEQ ID NO: 149291 - DNA, 292 bp, Arabidopsis thaliana landsberg
atggcctctgtagacaaactcatacacacacatgtccctgaaaaggacgtttttgccttccacttcctccaatccctctcaaatctcagaaaacaaaacccttttgatactccggaccaaaaaaactaccgtgtgaggaagatcaagaaggctgcgtacgtttccatggccagagcatatcggagggagtagccggctatggagcatagccctcttgcgtagagcagacaaagatgacaacaagatcgcttgattttcaaggaggaagaggaaggtgacgtggaatatatca

SEQ ID NO: 149292 - DNA, 880 bp, Arabidopsis thaliana landsberg
aaaatcatcttctactacactacacatcgagagctcactgtgaagaaaaaaactcgaaacaaatgaagaaaacactttcgccggaacccgtcaccatctacggcaatcgccaagaaaccttcgtcggtgatatggaatactacacttacttcgacgaatcttgtatccaagacatgaactatttcgtcaaaacaatcaccggcatcaaatccaaaggaatcagaccagaccttatcggttccatcatcgctcattacgcttcaaaatggctccctgatctcttcggcaatggctccgccattatttcctccacctccttagaatccaagaacaaccacaatgacacacagccagagagcgtcactgcatctgtaatgaagaaacggtttttcgtcgaaacactaatcggaatcctcccaccggagaaagactctgttccttgcaatttcctcctccgtctcctcaggacagcgaaaatggtcggagctaatccgaattatttaacggagcttgaaaccagagtatcgtggcagctcgaccaagcttctctcaaggagcttatgataccttccttcagctacacgtctggtactttgcttgacattgagcttgtgacgcgtcttgtgaacaagttttctggattggatagtgaaggtgttaaaaccgctgcggctcttgttaaagtggccaagcttgttgactcctacctcgctgaagctgccgttgacggtggtttagcttttccggagtttatttccttaatcacagctcttcctagccatgctcgtactacacaggatggcttgttccgagccattgatacatataaaaagagaaaaaataaagcttgaaactttgaagttgagatagttaattaaga

SEQ ID NO: 149293 - DNA, 3525 bp, Arabidopsis thaliana landsberg
agatgctgatgaagatggaagagttgtatcaacaggttctggatggacatgaaaagtctttggttgaactggttgcaaagagggagaagcttgacgagcgtgcaagactgatcgagcaacgggctatcataaacgaagaagagatggaaaagtccagacttgaaagagaaatggtgattatgctttccttacaaattaggagaaaaagatcacaaggcaataaaatctttgttgttgttgttgttgtagaatcaaaaggctatgtgtgagcagaatgaagcgaatgaggaagctatgaagcttgcagaaaagcaccaggcaagtagttcgttagtgtttccgtatatattcatgaacaagtaataactaagcttccatttcaaacttttgagttcctgaactatgacaacttttgcagaaagagaaggagaagcttcataaaaggataatggaaatggaagctaagctaaatgaaacgcaagagctggagttggagatagagaagctgaaaggtactacaaatgtgatgaagcatatggtggggagtgatggagataaagatattgtggagaagatagccaaaactcagattcagcttgacgctcaagaaacggctctccatgaaaaaatgatgactctggcacgaaaagaacgtgcaaccaacgacgagtatcaagacgtacgtaaagagatgattcaggttcgaaaacgttctaaatctatctgttccaaactctttggcttgtccttttaacttgtgtaattactttgatgaacaggtatggaacgccaatgaagagttgatgaagcaagagaagattagagtgaagagaatggggcaattaaaccctgcacccttcttgcctgcagtgatgaagaaacataaagttacacaatcaaaggcagagaataaggctatgaagctgtgttcagtgtgggaagcaaacataggagatgtgcaatggactccatttagagtcgatgagtctgatggaacaccaaaggttaggactttaatttaggagtctactttcaattctcaaaagatggggttttagcaaaaaaagacctctgcttttacatattatatcatccacattccaaatgtgaaatgcagagagttgtggatgaaaacgacgagaagcttcgtacgctgaagaaccagtacggtgaagaagtttataatgaagtggtaagaacaaaactagagattgaggaacataacgctagtggcagctatgtgattttagagctttggaactatgaggaaaaccgaaaggcgacgatggaggaagcaacagatgtgatgttgaagataaggtccaaacttgctgctatgaagaacaaacgaaagaggcttgaggtctaacttaaagaaagaagacaataattcaagtaacaataccggagacgagaaagtgttctgtttttcgttaatttaccagtttaaattagttttgctactacaactattgtaccgaattggattttgtttcttcaaaagtttttctccacaaatctgatgtgttgtttgattttttacgtggagtctggagctgaaaatctttttccggttacgtatgtttggtaaattggattacgaagttcttacgaatatataattcaaccgtcgaattttaacaaaaagcgtctgtagtccaacggttaggataattgccttccaagcaatagacccgggttcgactcccggcagacgcaatatttatttttatacatctattatcaaatttataatacatttagcaacgacatcgttttattataacccgccaaaatcgtatcaccgattggaagggtattatcgtctaatcataaaacgtagtatgttgcgtgcacgcgccgaaccaaatcgtgtggccacaatttctcggaccaaccgtctccaccacacgctttgtcttctctttcaatttgtttccggcgagtgaagaagaagaagatatttgttgctgatggcgggtacttgcacttcgataaggcctcgtctcattggctcttcttcaattgttgagctttcaaggttgattaatcgagctggagttcctttctctgtacgattctctacaagaaccagagccctccacggtggtggtttaaccgcacctacctctcgtgaggaaggtccttcttgtatcttcgttggacctattgattctgctcgcaaagaaactctagaagctctttatcgccaagtacgcctaataaaaatctgttttttggttcttcaaaattcgtctctatggttgtggagtgtgtattattcagaaatttagaatcctatgttttaaattctaaattttgcttcttttttcttattggattggtctcggtggatattgagttctgctttatgaaatttttatgttataggctaaggatgcgtattacaatggcaagcctttgatagttgatgacatgtttgacagagttgaggtaagataacactgttagtatattcttgtgtatgtagcaagatatgatttttaaatgttggattctgctttatgcaattgtatcatttctgttgtagctaaagcttcggtggtatggttcaaaatctgttgtcaagtatcctcggtgtagtctactaagacagtcaacatatgctgatgcagaggtacaatgtgggtgttcatgtttccatttagctcatatgatacagatgggcctagatttttcattgacatactataaatatgtaactctcgagaaagaactctatgtttgcttttcatatgcgtttactacttgtcatagtgggaaaaacatcactgcatgtctgtttagtagcttagtatgtgatcattgttttgctgctgctgaacaatgttttgtcaagagttgatgttgagataaatccttgtaggacaggatgatgcatcgcaagttctcctgttagctaccgtatggattatgattttcttatttggtagttcggcatgtgttttacccacgatatatggcgtcggcctggtttatggaggagatccgtttgactcagggcttgtctatagcagtcagttgtcatcttctgtgcctattttgtcaaagtttaatggcatcctcctctccgtgctagggcctgcttttggatatccgattgcatcttctgcaggtaccttaatgcaaacacgattttacctataatctggtaatagcgcatttgcttctactgagataataatgctgtttgcagtaagagtacttaaagggttatggagaaatgacttaacggctctaaaaggagactgcccgaattgcggggaagaggtgatttctttacttgtagttcttttgcagcaacaaacaaaattgttgttgttttcagttctcgtcacatttgagtttgatgaacttgtgtaggttttcgcatttgtgagatccgatcaatcgaaccgatcagctcacaaagccgactgtcatgtctgtgagtgcaccttggagttccgtaccaaagtagaggtagatgttagtgtttttttcccgtgtgttgcttcatcgtga

SEQ ID NO: 149294 - DNA, 741 bp, Arabidopsis thaliana landsberg
aaataacacacacaaaaaaagagagagagagagagagagagagaccccacaaagagcactaatcttcacaaccctaactccgatttttctcacacctcccaatctctctttctttctctctgatgaaaagctaacggaaaatggggaaatacataagaaagagcaaaatcgacggagctggagctggagctggtggtggaggtggaggtggaggtggaggtgaatcctctattgctttaatggatgttgtttcccttctcctcttcttcacttggtgtttaactcgagctaaatctctagctcttaacaacaacaacaacgctgtcttcttaaaaaccctcttctccttcttcgttaccaccgacttctgcttctcctaatccaccgtcaaagcagaagatgaagaagaagcagcagcagatgaacgattgtggttcgtatcttcagctacggagtcgtcggcttcagaagaaaccaccaattgttgtgattcgttctactaaacggaggaaacagcaacggaggaatgagacatgcggaagaaaccctaaccctaggagtaatttggattcgattcgtggtgatgggtctaggtctgattctatttctgaaagtgttgtctttggtaaagacaaggatttgatttctgaaatcaataaagatccaacctttggccaaaatttcttcgaccttgaagaagaacacactcaaaggtatcatctttcttcatcaatttcaacc

SEQ ID NO: 149295 - DNA, 1608 bp, Arabidopsis thaliana landsberg
  unsure (1)..(1608): unsure at all n locations
attgaaaacaatctgtttcaccaaaaaagaacaaaatgcatgggttcgatttcaaagagatccaggagaagatctccgatagctttcgtccatggcaacgctcttttcaattctgggttcgagctactaatatctacacaggctacaaggtctctcttttacggtatctctttaatctttcttcattagtctatagtatcgctaaattttttgaattttgggcttctctgttttgtttggattcacgtgtttcaacttcgcagtcgtttagtgaaagatgcaaagaagcaagaggaaatgtgggaaagacaacatgaacaagctgctgataagatttacttcatgtgctctgatcttggtggtttcttccttaaggtacttaaagtgttcggctttattgcattaatggttgttgttgtgttctgttgatgcttgactttttttgtttgaatggttaaatagattgctcaacttttagcaaaacctgacatggcaccagctgcgtgggtgaaaaagctcgtcactttgtgtgatcaagctcctgcgacgccgtttgatgcaattcaacttgttctagagaaggagttaggtaaaagcattggtgaaatctttgaaacgtttgatgaaaagcctcttggttctgcttctattgctcatgtattacagattttggttgaaaccttacaattaagcaagcatgattgagtttgagtattatggaacattaggaaaagaggaacataatctggttatgatggtttcttgaattagctagaaccttgtcctctcttcccatagaattattatctcctgacattgaactgtagcaacattgtcaaactctggttatgtttatactaagaaattatacatttatttgctttcttaggttcatagagcaatagtaaagggtaacaagatgaatgttgttgtaaaggtgagcattatcatgggactactaaaagcctaccagcttttaataagannnnnnnnnnnnnnnnnnnnnnnnnnnnnnnaacttcataccacatgtttaggttcaacatcctggcattgaaagattgatgatgacagacataagaaacttgcaactattcgccttatacatgcagagaacagatatcaaatttgacctgcattccataacaaaggaaatggagaaacaggtacttaattgatcttgttcctttgtgagacttatttttctccaagtcactgaaaactatgcgttttcttttttcaagattggttatgaatttgacttcaaaagggaggccaatgcaatggaaagaattcgatgttttctttatgagaacaacaaaaagtctcctgttttggtaccaagagttctgcgagatatggtgactaagtaagtgttcttacttttgcatatcatatacctgattggttaatgtgataatgtttaaggccttctctagatggagcctctgctgtcatttaatggcatactcacatcttaaactacaatttttttttatcatttttgcttcgggtgatacttaccatatgaacaatcatgatttcctcaggagggttttggtgatggaaatacataatggaatttcaatcctgagcattggtgatgag

SEQ ID NO: 149296 - DNA, 1346 bp, Arabidopsis thaliana landsberg
ttctcttgtttggtatttgattcattcttctaatgtaggccttaagattggagttagaggctcatccagccctggacaagcttacttccaagatcagtacccttaatttggagcgggttcgacagattaaaagcaggctggttgcaataactggacgtgttcaaaaggtgctatgattcagacattaaaatggctcctttgatattatgataaggatttatcatgtttccttatagatgtgaacctatgacatcaccatattctaaccacgtttgcctatactaataacactttttctctttacatgttctaggtgagggatgagctagaacatctgctagacgatgatgaagatatggctgagatgtatcttacagagaagttagctcagaaacttgaggattcgtcaaattcctctatgaatgagagtgataccttcgaggttgatcttcctcaaggagatgaggatgacaggcatgtatcaactttctgagcttgcagtaccttctattgttctgatataagtttaacatctgcctttttactccaggcttcctcccgaatttgcatcagaggctaacagagatggaaggtatcttcaagcaaatgatgctcacgagcttcttatgagtactcaaagtgcacttagcagaaatagccgtgggactcacacaagctcaacccggagtgccatgaccaacaaattagatgtggaagagcttgaaatgcttttggaagcatatttcgtgcagatcgatggtatactgaacaaactatcatacaggagtaaatagaccagatgctttggtactctttgtcgtgatgatatccttcttctaatacattgtggtctttgttgctgctatgatgaaaaaagctatgggaatttgtggatgacacggtggactacatcaacataatgctagatgacaagcataatcatcttctgcagatgggtgtgatgctaacaacagctactctggtgatgagcgcctttatcgcagttgctggtgtatttggtatgaatataaccatagagttgttcacggataataaacatggtccaagtagattcatttggactgtgattggaggttctatcggcagtatatgcctctacgttggtgccatcgggtggtgcaagtacaagcgccttcttgaatgagtcgaccaacaacatattgggagaggagaataatgtcgcattgccacaaatctatttaagctaacgagacttttatgtatatcctttgttcttgaggatctttactactctcaaacctttttttatccgtctccttcactatttgcatttctttcgatttaataaaagagcaaattgcata

SEQ ID NO: 149297 - DNA, 2142 bp, Arabidopsis thaliana landsberg
gcagcttatgcagccgagaagatacaagtcttggctccagagagaactgggagttatgttcttctgtcaaatgtttatgcatcagctggaagatggaacgacatggcgaaagtgagactgagtatgaaggagaaagggttacgtaaaccgccagggactagttcaatacagattcgaggtaaaacccatgagttcacatcaggggacgagtcacaccctgaaatgccaaacatagaagcaatgctagatgaagttagtcaaagagcgagtcacttaggccatgtacctgatcttagtaatgttcttatggatgttgatgagaaagagaagatctttatgcttagcagacacagcgagaaacttgcaatggcctatggactcattagctcaaacaaaggcacaacaatccgaatagtcaagaacctaagagtatgctctgattgtcattcatttgcaaaatttgcatccaaagtatacaacagagaaatcattctaagagacaataaccggtttcattatatccgtcaagggaagtgttcttgcggtgacttctggtgatagcagaaacagaactaaaagaataataggaagattatgttgagactgcagcttcctcggtggatgatcaaaaggacgatctgacgagatcctagagtttgacggatgacgatctcgaagttctcaaaggttgtttagatctaggctttggtttcaactacgacgagatccctgcgctctgcaagactttacctgctttagagctttgctattcaatgagccaaaaaaatttagacgataagcatacaccaccactccaattgccaattggaagatctctagtcccgtcgtgtgtaaatatctcatattttccgtcgattgattaggtgatctaagtttgatctactctgatttcaattatgtaattggtttgttgctgagtgctagtgttaaacaagaatttcagtgattggaatggactgtgatatatgaagtctaaatgttatcagtttgttgttgttacaggtgataatccggatgatgtgaaagctagactcaaatgctgggcacaagccgttgcctgtactgtccaattgtgcagctgaatgaatcattgtcacgtctgactcaggaatactagtgtatgaacaatctctctcgggcattgttagcggaggaggagatttcagaaaggcattggaaggtctgaatttaactgaacatcaacaatgattctcacttaatttccatgtatgtgtagtagtagtatctagtctaatgatttttatgaacggaattaaaaggtatcagtgaataaaaacatcaatttttttccgcatttacatgatggtctcagcatctacagcttaacatctgacatcttaatagctggagtcttcaccttatgagagcattcctcttatttaactggtcatggttctgcggaggtaacttatctaactgtgtctattaactgagtgtgatgcaatatgattatactctgtgccatataccattttgtgaatgattgtgtgttaagctacagtgtaaagcttattacatgtgagagatgaaagcttattgcagagttaagcaatgtcgattttcaatagtttgacaaacagagatgtctcagcttggacagcggctataggagcaatggctatggcaggaaacgctgagcgagcaaacgctaagggtttaatacagattcgaggtaagacccatgagttcacttcaggagatgagtctcaccctgaaatgccaaaaattggagcaatgctcaccatagagcaagcaacttaggtcatgttcctgatcttggtaatgttttgaacttctgatggatgtagatgagaagatctttatgcttagcagccacagcgagaaacttgcaatggtctttgggctcattagctcaaacaaaggcacaaatttgcatccgaagtatacaacagagaaatcgttctaagagacaacaaccggtttcatttcattcgtcaaggaaagtgttcttgcagtgacttctggtgattacagaaaacacaagtaaaagatggaaaggaagattcacattttattgaataagaccctgcaattatacacataagcttcaatgcttgaacaaggtttctaaagcaaaag

SEQ ID NO: 149298 - DNA, 1579 bp, Arabidopsis thaliana landsberg
agtcattgtacttgttcggtgtgtgataggagtctaatcatcagatcaaagtgaagatgcaattgcgatttttctcagatcagagttttgttggtttgaattcgagaaattcgacaacttttttgaaattgagcttattgctatgtgtacttcacttgttaccactcttcaaatttaatctgaattggatcttttgatgttcaattcctgattttgattgttttatctcccattgcattatcttcatcatctcctttggtttttgaaatgtagccttttacgttgattgctggtggggaagaactgctacgacaagtattttcattgcagcagccattacagattggcttgatggatatattgcacggaaggtaacttctttctttaccctttcatgttcttctgcatagttgaaattgtaagcttttaacagtgagacgtgccttttcagatgagattgggttctgaatttggtgcatttttggatccagtggcagataaggtcagataccttcttccttagctacctctatcctctttatcttttctccaccagaaaggaatgatttttatcattctgatttatgtcattggtatgcagcttatggtagcagctacattgatattgttgtgcactaaaccaatggtcgccgttgtcttaggaccagttccatggttagtgacagtaccttcaatcgccatcattggtagagaggtaagatacagaattctgatataccgttaagtaagtttcacttatcagctttctgttctaaactagtcggtatacttttcactgtagattactatgtctgcagtaagagaatgggctgcatctcaaaacggcaagctttcagaggtaaagttatcaccatcatgtgcgttctcttggatctgttttcgtaagtgttcctttcctaatccatggaaatggcattgatgttgctaggctgttgctgtaaatagcttgggaaagtggaaaactgcaacgcagatgatagcgctaaccatacttcttgcaagccgggatagcagttttgagagactattaccgtcgggtattgggttgctctatgtatctgcagggctctctatatggtctttagttgtttatatgaggaagatatggagagtactgctaaagaagtagcaacaaaaaactcttttttcgggctttttgcattcagtatatacacatagaatggaagatttacctctcttcttcttgaagaaagctgactaatttctctctggatacaaatgaaattagttgggcaagcactataagactcttatatgatgctttagttctgttttcaactttgggcactggggtcgtaatctacttggtttggttttgtataatatctctgaatcacattgctccggctagcaccgaattttaatgaagcagcaagcacgatcttatgggcaatgatggaaaagcagcaggcgcaatttcgttctagtcgaagacttggtctcatgaattctgatataaatgaaaacaattgttgcatgtcatgtagatgcttttaccgatacaatataatttatatatataaaaaactttggttac

SEQ ID NO: 149299 - DNA, 2324 bp, Arabidopsis thaliana landsberg
caaaaccaagatctgaaatggatatctcagattgttctgcaaatcaacaaccagatggttttaatgtagtggaggatgcacaagaggtggaagaggatatagttgatatcttgaagtggcatgatgattttgaagaggaaagagaagaggttttgtgtggagcttcttcttcaagttcttttggtgattcaatgtgtgctcgtgatggtgatgattttggttttggtgatgaagcacaatctatgttaagcaatgattatccattacctggaacttgtgatgatgggactgagtttttgggtttgcctaagaagaagacgaatgataggtggaggagattgactaagcctataatgtggagatgtaagtggatagagcttaaggttaaggagattcagtctcaagctagagggtatgagaaagaagttaaagattactatttgactaaacagtttgatttggagaagtcgaaattggaaggctttgatggcaaatcgattccttttcgtgaaaacaatcaaaggaggaatgtttttaagagaggaagaaggaaacgagtggaagagactacagatgttgctgcttatatgtctaaccataaccttttctcttatgctggtatatcaacaatgcagctttctttgcttcttttaactttcttctttttggggataacaatggtgtataactttttgttcttatcagataagcgggtgccggtaaatgttaaagggcagtatcttgattcaggtaagatatatacagattgtttgattttgattgtctgattgaaaatgggagttttagtactgaatcatcaatattatgttaagattttggtacaggtcgcaaagctacggggaagcaagatgcgattgaagatgatagtctaatttctgagttagattgttctgatgatgtacttgcaaagtttctgtgtaagattgatgaggcacagggaaaagcaagaagattgaggaagcgtgttgatcagttgatgtgggattctcagcctgctcatacatcatcaatgcctcaaatggtagctccctgtcatagagactctatgataccacctggcaagaaatgtgctcttgttgaagccccgttgactcatgtacaaaatggtcaacaatgtatacctgctgatcatatcgaacacctaatggtgcctcagacacatattggtgggcaatgtttgactaacaactctccaatttcatctagcttaagatttcaccctatccttgaagacgtaagagttgtttattcgataatttcctaatgataaaatgtttgtttggagttgaaaaagagttcagaaaaatctttgaaatggtttttatgcagctgctaatggatgagccagagatgaatgatcatgaaatggaaggggatgacgtaaagcttgattacttcatgaagataatcaatcagattacaggcgtgccacgggaagaagcagatgcagaagaagatcctacaccggtcaccaagaagcggaatacttctcactgaagctctctctctgtacagagccttatcttcctgcctgatcagctaaaattcatgtccataaagctctcataagatagtaatattggtatattccgtttattcttcttctcaatctctctactaactctttggatttggctctttatgaattatgaaaccagaataggtttcagagtttgtgcagagttaaatgacttagcaccatatcttcggctattatctttcttgttcaatatgagtcattagaccttatttgattctaaattcaaatctttttgatcttccttatggagagtttattcatgtgattgtgcacaagagtcaaaaagtcacgcacgccgattgattaacaacaaactgtgattaaactaaactaacactagactctggtttggtttctttaataatcttgagaaactttatccgacacatacacatgtcaagtcgagaacttagtctgaactctgaagtgtttttcctacaaaaggctctttcttgattttcgaatcttttaaaatgattaacatggaagatgagtcaggttagtgataattaatttacctgtaaagaccaaatattagtgataattaaagagaaactttttaggtagccgcattttcttgagacccaaacaaacactttgatatttgtaaacgacgacaaagctatcttatgagacagtttcttcactttcattggccttacttgaggggaccgcaaatacaatctcactttctctatagcctctttacattttcaaatctcgaatcatttattccataagcgtaaatgtcgtactcgggctt

SEQ ID NO: 149300 - DNA, 1111 bp, Arabidopsis thaliana landsberg
aagtttaccttttctccttttaggtggtgattgttgatgatggaagtgttgatggaacaaaaagagtagcttttgatttcattagaaagtacacaattgacaacataagggttataccccttgggaagaatcaaggcaaaggagaagctataagaaaagtgagttcaactcgtagcgcatgcaattctatatatttattttatgtgattgagtaagactgtaaatttgtcatttcatagtacaaaaaaataatcgaagctttctactttttgaaagcattgaatagggaatgttgcattcgcggggtcagctacttctcatgttggatgctgatggagcaactaaagtaacggacctagaaaaacttgaaaatcaggtttgcccttagttttgactgttaaaacttcagagaaactagaaattgtgctataaatttcctgatctcctagcctctcagatcaatgcagtagccagagaagaatattcaatcagaaatccagcatctaaggatatggatttcaaaataggtgatgttcaagtatccgcatttggttctcgtgctcatctcgaggagaaagctcttgctacagttaagtcttgcaaacttctgttctagacaacatcattctaagtctatgtacacatacagatgcatatacttattacgcatcttagataattgacttttagtctttcaatttcagaggaaatggtatcgcaactttctgatgaagggtttccatcatgtggttctattagctgctggtcctggtattcgggatacacaggtggctttttaaatctcattcgttgtttccttctacactctctgtttcaccaatcttgaatagtaataactaaacatcattttttttaatcagtgtggcttcaagatgtttactagggctgctgctaggagacttttcacaaacgtccatctgaaaaggtatatgagtaaatgaatcgatgatgataaactagcagtaaaaacatcaataagagtctcatctgactcggtctatgcgcaggtggtgctaaaataaaaaaattggtgtacttgtgcaagcgttttaatataccaatggttgaaatctctgtaaaggtccggatt

SEQ ID NO: 149301 - DNA, 1888 bp, Arabidopsis thaliana landsberg
atggctggacgggtcttcgaagcctggaagggaagtaatgtaagcttttctttttctttcttaaggcgtctcgatttcgctttactcttttcccttttctggaatctacatttaggttttcttaaaggcgacatttttatgacttcactgtcctagttttaagaaaaataattgcagagaagaatgttctgagtggatttgttgttttgatgagaacaatctggacatttttgagggaaattgtacttttgtgtgaagaaattagtatcatcatattcaattagattacattggtgagctttattggattcgactgtatatgttgaatttggtggctttaaatttcgaatctttttcaactctatcactgttgatagtgtcatttattgttatcattgcgaagatctaagtttgaacatatataccgtatttgttagatttggtttggttccatgctgatgcatcaccatatttacaacattgatgagctttctattcactattggttcactctccaagcatgaacttgcatttttggtgaactctatcagtctattgtcagattttgttcaatggaacccattaccacttgtgaatgtagcttttgatgcatgctctatgctgtatttattctgaacatgatgatcatcttctcttttgttggtcttttgcagaagtttctgtttggtgggagattgatatttgggccagatgcttggtctattccttttaccttcctgctcatcataactcccgtttgtttcttttctgtatttgttgcaacacatcttcgccgcgagctcttaccaaacaatgcgggacatgtgttcttagtggcaggagttctatttactgtctttgtaagttttctccaatgcccatttgatatttgatttcttgttcacatgtatcttgtataccttataatcttatcatgggatattataggatcttatcaactcttttataagttttgaatgttgattatatacatgcatcatagtatgattcacttgtaattatacgacaataagttaaaaatcttaccaaaattttgaaatcacacctcaataacatgtatcttactgtgtttcttgttatgttctttcctctagcttagatataaagtttgaagtattattttgaatgttgtcactttttgtgtggcttttggattatgctttttttgggcaggtttattattcttccttcatttatgttttttttaaaatcatgtaaatacttaataggtactgatccttctcttcctcacttctgcgcgggatcctggaatcgttccaagaaatttgcatccgccagaggaagaactatgctatgatacaactgtatcaagtgatggaagacaaacacccactgttcaaattcctaggacgaaggaagtcatggtttatggcgtttctgttagagttaaatattgtgatacatgcatgctttatcggcctcctcgatgctcccattgttccatttgcaacaactgtgttgagcgctttgatcatcattgcccttgggtaggccaatgcattggagtggtaagctgattcaaaagcatattaaactgggaagatatgcagttcataagttcttataagcagaaaaatgtgcaggattttctataaaaggatttcatattttgaggatctggtttttctagttgttgacaaaactgtgaactttaattttccatcttgacattttgttttgtgtgtgttgtgggcagagaaactataggtacttctttatgtttgtttcttcggcaactattctctgcatctacattttttcgatgtcggcattatacatcaaggttctgatggataaccatcaaggtctgtgtggagggcaatgcgagaatcacccaaacggttat

SEQ ID NO: 149302 - DNA, 964 bp, Arabidopsis thaliana landsberg
  unsure (1)..(964): unsure at all n locations
ggtgtagagttggtgataatttcgttaaggctgttgtttgtactggacctgtagctgnaggttacactaaagaaagaggggtaaanccatttccatgtttccttttttcgagctctttgatgattgtcccttgatgctgaaatcttgctttgtttccttttgttttctatgtttcaagataactgtctgcagtaactatctgaccattcaagatgaagtgaaccaagtagttatacatgagttgattcatgcttatgacgagtgccgagccaagaatttggattggactaattgtgctcatcatgcttgcagcgaggtgattacaatattagatcaaacctttgatatactcttgtcaaagtacttgataggttttggtgtgtgtgttttctttaacagattcgtgcaggtcatctaagcggtgattgccatttcaagagagaacttttgcgcggtttcattaaattaagagggcatgaacaagtaagtctctttaaggataagagttgtgttagctagttcattttgtagaatcatggatgattcttgttaataataacctgattctcggtttttcaaaaaggaatgtataaaaagaagagtgttgaaatcacttcgtggcaacccgtattgctcggaagtagctgctaaagacgcgatggaagcagtgtgggatacttgttacaatgacactaagccttttgatagagctccttgaaggtaataagtctatttacactctcaaaagacttatgtttgcttcaaagttatgagttcaacttcatctttgaagatcgacataaagccagaaaaaaaactgttggattcagccgttgattatccccccatgtatttctctcaatccaacctttttggccaagtcaaacgatagagtatttgtttagattctttacattgttgtttgaaacaaaggaaaaggtctaatacacaatcttgatttcaa

SEQ ID NO: 149303 - DNA, 571 bp, Arabidopsis thaliana landsberg
  unsure (1)..(571): unsure at all n locations
aaattactggaacccccctttgagtaaaaaacctgaggcttcgtggtgttagttttaaatgaaaaaaaaaaacctttttncccctcctacaacaccggtccaaaaaatcggtgtttttaagcctcgacctcgatccttctctgttaacaatggttgcagccatctcaatggtctgccagaagttgatttaattccttcatgccttggactcaagaaaaataatgtttgtgaaaatagtatcacatgtaacaaagatgatgagaaagatgattttgtgaataatctaatgaatggagataatatgtggttggagaatttactggaggaaaaccaagaagctgatgcgattgttcctgaagcgacgacagctgaacatggggccactttggcgtttgacgttgagcaactttggagtctgtttgatggagagactgttgaacttgattagtgtttctcaccgtttgtttaagattgtgggtggcttttctttcgtattttagtaatgtatttttctgtatgaagtaaagaatttcagcattttaagaaaaatggatatgtttatacgtaatgg

SEQ ID NO: 149304 - DNA, 1666 bp, Arabidopsis thaliana landsberg
atcttcccaatttcgaatctcacacaccgaaagttattttcgaatccactaacgaatcttccacagcaaacacttttgtgttcctctgtaatttctcagtatatatagataccaacacaggcagtgaaaaatggctatggcgagtttatatcggcgatttctatcttctcctccggccattgacttttcttgcgccttatgcaaggtacgtacggatcaagcttcgatttcatggattgcgattataaactaggtttttggttacgcgaatttttctgtggttctgatgaatcacgatctccagactccaatctcgatttcgtttttgtttttgtcttcaatactcatgagatcttacaattcgttcagaacttgaatcaaacgcgttttgtaaaattagatactggatttggatttgaattgtgaaaacacataatgtagtcgttgacagtgatcatcacttgtgaaccttctaaggtcagtgacagtgatcacagagatctgaatatatctccaagtaatttcagtgatagtgtttctggaagtagtacgcttggtggttatatttactggagatgtacttgttaatgttagctgtgttgatgtctaaaaagtatttttgatcatttgtggcagctaatcttcaatgaagcgcttcagaaaggaactatggaaggatttttcaggttgatttcgtattttcagacacaatccgaacctgcgtattgtggtttggctagtctctcagtggtgttgaatgctctttctatcgatcctggacgtaaatggaaaggtatgcaagattgaagcaaattatgtccacactaaataaatgatggttttttataaaaagtttcctctcttccaatagggccttggaggtggtttgatgaatcaatgttggattgctgcgaacctctggaagtagtgaaggaaaaaggcatttcatttggaaaagttgtctgtttggctcattgttcaggagcaaaagttgaggctttccgtacaagtcagagcaccattgatgatttccgcaaatttgtcgtcaaatgcacgagttctgagaattgtcatatgatctcaacatatcaccgaggtgtatttaagcaggtaaagcataactttgtacacactgttttgctaaggctcagtcatattttcaagttttaaaacgtctggtggctataattgcagactgggactggtcacttttcacctattggtggctataatgctgagagagatatggctttgattcttgatgttgctcgtttcaagtatccccctcactgggttcctcttaaacttctttgggaagccatggacagtattgatcagtcaacagggaaacgtagagggtacataatcttttcttatctttcgcttaggttcttactgtatcatggatgtaatgtttctatataatatggtctgatttttttctgtgttgttctcaggttcatgctcatatctagaccacacagagaacccggattgctctatactctggtatgttcgatgcaatataggttctctttaagtttgctaatatctttttcttcaattttgctattctattaatgcaattttctcactcacaatctcttccacatgtattgaatgaacttgagatccttatgagcattttggtaagacacaccgtgtg

SEQ ID NO: 149305 - DNA, 594 bp, Arabidopsis thaliana landsberg
gattgaagtcaaatgcttgatgtatttgttccaacgttacctcaagtcaaagatcctttttttttttaggtatatataaatgagtgagcttattcgatatagtagagcttctcaatagctcagtttgttaccaagaatcttgtttgtttcagcaaggaaatccgagtttctgttatcgggaatcttgcgaagatccctgagtctctcctccgaacagttcacgagttagaggaagctacaaagagttacaagaagaagcatctcatcttggccatagattacagcgggagattcgacatcttgggtgcttgcaagagcattgtgaagaaatcacaacaaggtttgatccgagaggaagacgtggacgagacgttgttcgagagagagcttcagactaagtgtaccgagttcccaagtcctgatctcttgattaggacaagtggggaacagaggattagtaacttcttcttgtggcaactcgcttataccgagcttttcttttcgcctgtgctttggcctgactttgattagcacaagtttatagaggccctgttttcgtatgagcgcaaggatagacgatttgtctcccggctt

SEQ ID NO: 149306 - DNA, 888 bp, Arabidopsis thaliana landsberg
taaattgactaatgaaaaatgggaaagagacattaatattaaccaaaatagtggctctttccatgatggtgtttaggtttgacgcattgaaatatcttgggaaaatgagaggaaaaagaataatgctggttggagattcaatgatgagaaaccagtgggaatctcttgtctgcttagaacagtctgttcttcccactcatcgtaagaagctcacttacaatggtcctacgatgtctttccattctctggtaattaataatcacaaatctccttttgaatcacatatacatcattggttagtagatgcaactattaaatttggttactatacaggattttgagacatcaattgagttttgttgggctcctctgcttgtggaactcaagagaggagttgaccgtaaaagggtgttacatttggactcaatcgaagacaatgctagatattggcgtggtgtagatgttcttgtattcgattccgctcactggtggactcactctcagagatggagttcgtaagtcatctgaataaacacttacatctttccttcaaaagcaaatgattagtgtataacggttcatagacgtctatgttcattgtatttgttattgtgtctcattttacttcagacttgggatttgtgacagtaacgcaagctattgatgttttaggtgggattattacatggatgggaataagatcttcaaagctatggacccaatggttgcttatgagagaggactaaccacatgggctaaatgggttgagataaatcttgatccatccaaaacaaaagtcattttccgcactgtctcaccgaggatttttcttttattctcctcttaatctcaacatatatacaaaatggacaccattatcatgtcata

SEQ ID NO: 149307 - DNA, 2413 bp, Arabidopsis thaliana landsberg
agctgctcttctcttcatcattctgtccaccggctctggcaacgacagagaagttgaagatggagatcttgccgagacttccagcaacgaaagccagtctcgccggaggagactgcgtcttctgtcttcgattccatctgcgctgatcgtgttcgcactcgggttagtgctctgtttcatacgtgatccatccattttcaaagaccttaaattcggtccctcgaagttccacattctgagaatcagttgggatgattggaaaatcgggtttctgagggcggcgattcctcagattccactctctgtactgaactcagtgatcgcagtttgtaaattatccaatgacttgtttgacaaggaactctctgcgactacagtctccatcagcgttggggtgatgaacttaatagggtgctggtttggcgctatgcccgtctgtcacggtgctggtgggttagctggtcagtatcggtttggggcaaggagtggattatccgttatttttctcggaatcgggaaactgattgtgggtctggtgtttggaaactcctttgtaaggattctgagtcagtttccgattggaattttaggggttctgttgctattcgcgggaatcgaactggcaatggcttccaaagacatgaactccaaagaagattccttcatcatgctggtctgcgccgctgtgtcgatgactggctcgagtgccgccttaggatttggttgtggagttgttctttacttgttactgaagctaagaacgttagactgttcttcagtaactctgttttcccggtcaagtgatgaaaagcaggtcgattccgaagccgctcctcgtgatgtctaagatggacttgccaaaatgacttgatgaagaagtacttatgacgaaatggcgggcagctgcgagtgcatcttatgtcttcgattccatctgcggtcataggggttggtgccctgtttcattgagtgtattgagatgtgaaaccattaatcaatgttttcattgctcaactttgtgcttaagattataataatcaggtatgattaaggactaatattgacaaaccttttaactaaagaaaatcataaggctgacgcataaaagagccaaaactggatctctcccaagtattgtcctttctataaagaatcgaatcccgaatccactgtgaatgtacaattgactttgacaactactggtttacatgtttctataaatgcaatgctagagtgatctctatatacatcatcatcacctgaccttttggctatccagtccaatggactcacatgaagagcaatgcttacctatcctcgacttctccagcgataaactagtgcgaggcacgagtcactggatcacgaccagggacgatgtcagaagagccatggaggggcagggttggtttgtggcagagttcagtggcgtctcatctgacctcagggacaacttgctggccggcatgaaggagatgtattatctcccagaccaaatcaaaatcaagaacgagaaccacaaggcgtcccatggctacatgtctatggtagttgacgattaccggatccatgagagcttggggatcgattatgcaaccgagcttcaagcttgcaaagacttctctaaactactctggccacagggaaacgatcccttctggtaaaaacacacacataaagactttctttcatttcatctatgtcgttgttgtcacatctcagatgatttgcagtcaaaccacacatatgtatgcaatggcaatggcggagctagaccagacggtgatgaggatgttgtatgaaagctatggaatggatgagaagaagcattctgtgagtcactccgagtcaactcgatacctgttgaggatgctgagttacaggagacagcaaaacggtgaagcaaacactggtttcgtgtcacacactgataagagcttcatgagtatcctccaccagaaccacgtcggaggtctccagttgaaaaccatgaccggccaatgggtcgggtttaacccgtccccaacaagattcgtcgttctctccggcatgggtctcacggtgagctctaaaccaaattcgattagtcgaaacacctagacatagcaataaatgtgaaatctttttgttggtgatgaaggcgtggagtaacgataggataaaggcatgttaccacaaggtagtgatgagtgcagatgagattcgatactctttagggtttttctccttccacaaaggaacgatccgtacgccggaggagctcgtcgatgaccaacatcccctccgctacaatcctttcgagcacgacggcctcttacgcttctacgaatcgtacatcaattctctcaagaaatccagcgaagatcttctccagatctactgcggcgtcacaccctaatcgccgccgtaatta

SEQ ID NO: 149308 - DNA, 1016 bp, Arabidopsis thaliana landsberg
ggattgtttggtgtaacggattccctgaatgttctttgcaggagcacttgctaattgtatgtgaacttcttaaggccaatctatacgaattccacaaatttaacagagaatcaggtggtgaagtttatttcacgatgccaagattgcaggtttgtccgcttcatcattaacattcttaatagatatgtataaatccgagttctaatctctttgggatcgttctgtacagtcaatcactatccagtgtctcgaatcacttcagtttctacatggccttggacttatacactgtgatttgaagcctgagaacatattggttaaaagttatagcagatgtgaaataaaggtcattgaccttggaagtagctgtttcgagacagaccacctatgctcctatgtccagtcaaggtcatatcgagcaccagaagtcattttgggacttccttatgataaaaagatagatgtgtggtctcttgggtgcattttggctgaactgtgtacaggcaacgtaagttttggaatttcagctagataatattgtctagtttggttgttgatttttgaggacaagaaggtgaatccgtgtttaatatcgagttacttttgcaggttctcttccagaatgattcgccagccagtttgctagcaagggttatgggaatcgtaggatctttcgataatgaaatgcttaccaagggacgtgattcccacaaatacttcacaaaaaaccgaatgctctatgagcggaaccaggttagtgtttccagagaccttaaaggaacattccctgaactccaaaaactctgcaactcttaagttgaatggaagaaacatatgctaataaagaacattctctctggaaaaattgtttgttcaggaaagcaacagattggagtacctgataccaaaaagaacatcgttgagacatcggctgccaatggaagaccaaggattcacagactttgtggctcatcttcttgagataaacccaaagaagcgtccttctgcagcagagg

SEQ ID NO: 149309 - DNA, 1010 bp, Arabidopsis thaliana landsberg
cggcaaacctgatcttacacgacggaaggatgatggagttcacaagtccggtcaaagttggttacgtgttacaaaagaatccgatgtgtttcatatgtaactccgatgatatggactttgacaacgttgtatccgccattagcgccgacgaggagtttcagcttggtcaactgtacttcgctcttcctttaagttcgcttcatcattctcttaaagccgaggaaatggctgcattggctgttaaagctagctctgctcttatgagaagtggtggttcatgtggccgagataaatgtcggtgtcgtcggaaatgtgtgtctccggtgatcttttctgctcgaagagtggcggcggtgggagtaatggagagacaaggaatgggaaaagacgcggtggtggtggtagcgggaggaggaagtatgcggcgaagttgagtaagatagaagaatgaagggtagtttggtgatttagttattattgtagggttaagtttgtaaatatgtagttattatcggagaagtattgttgtgcctaatgcaaattgcgttttgcaacgtgggaaaacttattgtacttggtttactaatcatatgagttgagaaagaccaaaaatctcatattatggatttaagttacaattttacggttgctttttcttaccaatcattcaaaagatatatagtttatatgtggtgtgattttaatacaatgtggttctaatgcggtgcaaaattattattagctgcatttaaaatcgcacaccaataatccaaaaagtgtagtgtattttttttaattaaaaagtgtagtgtatccaaaaatctcatattatggattttaagttattattatcagctgcatttaaaatcatgtggattaattttattgcatcaaatagttatacaaaatttatttattcatatgttaaaatttgagaattagtatattacagtattatcctatatagactcgttcaatatttattttgtttgttctgtaccactcaaaca

SEQ ID NO: 149310 - DNA, 624 bp, Arabidopsis thaliana landsberg
ctctctaaaaatggctcaacaacactcttttctcctcttatgcttcttcctctcaatctcttatttactatcttccgcccaaaccgaagccacctcaatcgagagattagtgccaagagacctctacaacaaaattttcatccacaaggacaataccgcttgtcccgcaaatggtttctacacttacgaatcatttgtccaagcgacgaggcggtttccgagattcgggagcgtaggaagccccgtgacacaacgactcgaagtggctgcatttttggctcagatttcacacgagacgaccggaggatgggcaacggcaccagacggaccgtacgcttggggattatgctttaaagaagaagtgagtccacaaagcacttattgtgattcttctgatacacagtggccttgtttccctaacaagacttatcaaggaagaggtccaattcaactatcgtggtaggttcattttcactaatagtggtccgtatcttcattcaaatatatattttgaattctatcatttatagttttcgatttgtataaaactataccatgcaagattccacatcgtaattatattattttctaattgtcattttactttttgggatataaggcgga

SEQ ID NO: 149311 - DNA, 947 bp, Arabidopsis thaliana landsberg
aacagaatagatgaaggatcgttcacgatccagagcactaatttgtttccagcattggacactcgtaacacgaagaagaagtctgacaaggcagggaagagcaaagggtcttctaagtcacgagagccagagaaggagcctgagcctcaggtctattgggctcctacgcctttgaaagttaagtcttgggctgatattgatgatgaagacgacgatgatgactattatgcaaccactgctcctcctcagtctggttggagtacttctctgccttcccatactgattccaaagacgttcatgttgaggtcagaagtctaaacattttatgattttgttgcgattcctaaattggttgagaatggatatgatggttctgtgtctattggttaacgattctctttgtgattgggaattctgagagctggtttctgttctaatgttaatttatcttatgcttatggctctagttagttattacaaaaattgtttgtgtgtggtgtctattgtctgagagaagaggatttgttattgttgctcatgttgctttatccttcctgaatatttttcatttgtgtgttacctatgttgtggtagcacatggttgtgtaggttgacttgtgtaagcgttagttcttgtccagattgcgtgtgattatcttggttgctgatggaattatcttggtgtgattgtcaggagagtgaaagtaagagagatattctcgctgaaggtgatgatgatgtggaggaatagcaggaacagtaaacagaggtacaggttcatccagagcctgaggtgaagatagctcctaaagttcttgcacctcctaaagaggcagacaggcaactctccaagatagagaggaaaaagaaggaacttgctgagcttgaagctttgttggctgattttggagttgcccccaaggagaacaatggcctagaggaatct

SEQ ID NO: 149312 - DNA, 1200 bp, Arabidopsis thaliana landsberg
  unsure (1)..(1200): unsure at all n locations
aaaaccaaacgtgctgaaacgttgtcgttcggatactatcagcgattgctaaaattgttaagaacgagaaaaacccaaaacgacgtcgtttcttatatcgttgccagagagagtttgacggcggagagatatggcggcgttgatggagtcagtcgtcggccgagctctaaaattctcatcgacggcgaatttcaggtcaatccgacgcggcgaaacaccaacactctgtatcaaatcattctccaccattatgtcaccaccgtcaaaagccatcgtctacgaagaacacggctctcccgattccgtcaccaggttcgtctacttttactctgtgtttacataaacacacataatctccatttacaccttttgttctcctttgacgaagatagattggtgaatctcccgccggtggaagtgaaagaaaacgacgtttgtgttaaaatgatcgccgctccgatcaacccctccgatatcaatcgaattgaaggtttatgttcgataagttttgattgggaatcaataatagtatccctaaacatcatcgtctccatctttgtttattggtcacaaagctaagagttagataatgagttcaatgttttggaaaatgatgattgtttaggtgtgtatccggtgaggccaccggtaccagcggttggtggttatgaaggtgttggtgaagtttatgcagttggctccaatgttaatggtttttctcctggtgattgggtcattccatctccaccttcttcaggtactctctaatgttatgttaagtgaagcaacaaaagagagtgtgacttcaaaacagtttaatgatatccctttttgatttgtgaaatagtctgatgtgaatctctctgaactagggacttggcagacttatgttgtgaaggaagagagtgtgtggcacaaaatcgataaagagtgtccaatggagtatgcagcgacgattactgttaatccattgacggctttgaggatgcttgaggnnnnnnnnnnnnnnnnnnnnnnnttggactgtatattatgtctttaatgtaactggtctttactttctttttgcctaacaaaggatttctctggaacaggggattctgttgtacagaatggtgcaacaagtattgtgggtcagtgtgtcattcagttggcaagactccgtggcatcagtaccatcaaccttattcgtgacaggtg

SEQ ID NO: 149313 - DNA, 488 bp, Arabidopsis thaliana landsberg
aaaccgatcggactacctaaaccggtcggaattaagaaagctcttgttttttacgccggcaaagctccaaagggagagaaaaccaattggatcatgcacgagtaccgtctcgccgacgttgaccggtccgttcgcaagaagaagaatagtctcagggtatggaatcagatctgattcacatctttgtttcaatctcttgttctgtttctggtaaattgaatcaacggtgttgatttttgcccagctggatgattgggttctctgccggatttacaacaaaaaaggagctaccgagaggcggggaccaccgcctccggttgtttacggcgacgaaatcatggaggagaagccgaaggtgacggagatggttatgcctccgccgccgcaacagacaagtgagttggggtatttggacacgtcgaaaacggtcttcaagctgcatacgacggattcgagttgctaggagcaggtggtgtcgccggagttcc

SEQ ID NO: 149314 - DNA, 1036 bp, Arabidopsis thaliana landsberg
agcatttttgattcggctctgagctcactcgtctcttctcctacgccgtcaaattcaaacttcttggttggaggagtaggtggagaaaatgtcattatgagagagctcatcgggaaactgggtaacatcggcgatatctatggaattacggcgagcagtggaaactcgtgttacgcaactccgatgagctctccaccgcctggaagtatgatggagacgaaaacgacgacgccgatggcagaactgtccggcgacccgggattcgctgagagagcggcgaggttctcgtgttttggtagccggagttttaacagcagaacaaactcgccgtttccgattaataacgaaccacccatcacaaccaatgagaaaatgccacgtgtatcaagcagcccagtttttaagcctcttgcgtctcatgttcccgccggcgaatcgtccggtgaattttcccggaaaagaagaactaaatccaagcagaattctccttctgcagtttcatcatcaaaggttcataatgaagcttcacattcgaataaacccattttttgtttggtttaaacaaatactaattttagtttgattatcaggagattgaagagaaggaagattctgatccaaagagatgcaaaaaatcagaagaaaatggagacaaaactaaatcaattgatccttacaaagattacattcatgttcgagctcgacgaggccaagccactgatagtcacagcctcgccgaacgagtaattatttctctttactctccacttctcctaaaatcttatatagtaaagttgacctcaattatccggagtttgttaaactccggataaaattggcaaaatattccttagattcggttaaactttaaactaaaatttcgagggagtcgggctaatgtatgagttggaacactagttgcgaggcaaaataaatgctaaaaaatttataggttttggcacgaagaaatgtataggttttggcccaaaacttatcggatatgaagataaaacaaaatataatcacatttagtgaa

SEQ ID NO: 149315 - DNA, 1694 bp, Arabidopsis thaliana landsberg
gtctcttcttcttcttcttcttcttcttctctccgatttgctcagtcgattgcgtcatgtcgtcgtttgatccgccgaatcaccgatattcagccttagtacttattcttctcctgcttggtttttcggtagcggcggccgacgatgtatcgtggaccgaagattccagcctcgagtctcctggctgtaccaataagtttcaaatggtgcattcaatttcttatctttacttcgtatctaatcactctctggttcagtggagttgattgatctagttttccttctctctctctctttgttaatgagattctatatttggtggaaatgatcttcatataggtaaaggtcttaaattgggttgatggtgttgaaggagacttccttactggcttaactgctcaatttggagctgccttgccttctgttcctgatcaagctcttagatttcctgctgcttttgtagatcctttggactcttgttcccatctctgttccagggtcagtttctcttttcttcttgcttttagaatgaagtcaatggcttccaccatgtaatttggaagtgcaagctgacttttttttttggcaatgttcattgatatcttgtattgacattgtttgttccagttagatggacatattgccttgtcgatccgtggcaattgtgctttcactgagaaggccaaacatgctgaggcagctggtgcttctgctctcttagtcattaatgacaaagaaggtgtttttttcttttcaatacggtttcggattgatgtttttcgtgtttcgtagctttggatcatatgatttactcatgatctgttatcagatcttgatgagatgggatgtatggaaaaggacacatctctaaatgtgagcatacctgtcttaatgatctctaagtcaagcggagatgctctcaacaagtctatggttgacaataagaatggtgagcctttgtgatttcgcacttcagtttttctcttgttggtcctgtagctctacaatttgaaccatctggtattcgtataaatctcttttaggctaagtccagtttctttatgatgcagttgagcttttgttgtatgctccaaagcgtcctgccgtggacctcacagctggattgttattgctcatggctgtgggaactgttgtcgttgcatcactgtggtcagagcttacagatcctgaccaagctaatgaatcttacagcatactagcaaaggtgtaccagagaattgtggttaagcacttttgcatgctatggtttctacaattaactgcctttgatatcctatacacgtagtttacatttcccagatactttgcgtagcagcctcttgttattctgtagacttggtgatcaaaacttcagtttatgtagctgaattaacaatgtctttttaaagaaaaaaaaataatttactgaattttttccaggatgtttctagtgctgggaccagaaaagatgacccagagaaggaaatccttgatataagtgtcactggtgctgtattttttattgtaacagcctccatatttctgctgctccttttctacttcatgtcatcatggtttgtatgggtgctcaccatatttttctgcattggcggcatgcaggtaatttcattaacatccggcggttttgaacctgtctagaatttagattaaatgtatatgtgcgttttcggtca

SEQ ID NO: 149316 - DNA, 3893 bp, Arabidopsis thaliana landsberg
acttacttttgttagtgatgtgcaggaacttccttgaccattctgaatacgcacatgccatgtcggatcttattgtacaaaatatattggtggacaagtaagaatccagttgctgctcttttttaggctctggaaggttttagaagcttggaattatgagatatacaatctttcattttctttttgtttgccatataggtgtatccttgatggtgaaatgttggtctgggatacatctctgaatcggtttgctgagtttggttcgaatcaggaaataggtttggcgtctaatcaatatccttatgttgaaaagcttagtcttgcttccagtagatttgattcttgtactcttgttcacagccaaggcagcaagggagggtcttgacagccataaacaggttcatatgcgaagtcccacctgtttacttttgttgtttgaggatccgactacaaactctgatgttcttttatctgctaatgcagttgtgttgtatccttacgaggagaagttaatgcccacacttaagaattccctgacaaaacgactttagaaatattattttccttgaccctgtactagatgttgcctttgatgttctttatgttggcgatactagcgtcatccaccagagtttgaaggaacggcatgaactgctgaagaaagtggtcaaacctttaaaaggtcggctcgaagttttagtacctgaaggtggtctcaatgttcaccgcccttcaggtaaggactactaagattctagttgactgtgcgaggttcacaagtgcgacagagttaaatcaatggatacgtgaacaatccttttgcaggggaacctagttggtctattgttgttcatgctgctgctgatgttgagcgatttttcaaagaaacagttgaaaacaggtttctttttaattcttaatgcagccaaagtttctctatccactattcatgatttgtgcaaaacgtttggatggtgccttcttggcctcgtgtgaacagtgatacttgcttgacagaatctaacctctagtacagagacattatatggttttcttcacagatgcgcgttcttatttccaatccttcttctttgtcctcagagatgaaggaattgtgcttaaagacctggaatcaaaatgggaacctggagatcgtagtggcaagtggatgaaattgaagcctgaatatatccgggctggtgctgacctggatgttcttataataggtctgtacttaatattatgtttacttttacttgtttaaagatgaaggtcatgtccattggatcttattgggaattttacatctttgccaggaggatactatggctccggacgtcgtggaggagaggtagcacagtttcttgtagccttggctgaccgggcagaggcaaatgtatatcccaggcggtaagtatttatatggtttcacatttctcgtataagatgaaatcagattgtcagtagaaacagccatgagagaacatgcgccatgaagaccttagggcttttcatgttatcggaattgttagttgtttgcctagacattccagatctaattatcaatgataagctattctcttttttgcagagtttatgtccttttgtagagttggcactgggctttctgatgatgagcttaacactgttgtaagcaaactgaagccttatttcaggtgaaagacgtaatcatttacatgctttctcatctcattaaaacaaaagaaatataaaataatatgtttttgtggtatgatattctaagaatgagaacactgcctcttttttcattttacttgtctttcagaaaaaatgagcacccaaagaaggctccaccaagcttctatcaggtcactaatcacttcaaagagagaccggatgtttggattgacagcccggaaaagtcagttttctgtcaattacctccttttgctcatctgaagcagaagaattgggatcactgaatactattattcgcgctcatatcttttctcttcctttttttgcagatcaataatactttcaatcactagtgatatcaggacgataaggtctgaggtatgtctataagatgtgatgtgaagattagccagttaactcttacatttcttaatttaattcttgcaatgcagatttgtcgcttaaaatgcatatgctctattttatgtaaaactctgctcttttcaggtgtttgttgcaccttacagtctgaggtttcctcgtattgataaagtaagatatgacaagccttggcatgaatgtcttgatgtgcagggtgagtaaaagaactaaagaaattctccaatgttcccattttcatgaaagttgaaataaccgatttgctttcactttatatgtccgactgatgttgactttgcagcttttgtggaattggtgaattcgagtaacggcaccacacagaaacagaaggagtctgaaagcacacaggacaatccgaaagtcaataaatcctccaagagaggagagaaaaagaatgtctctcttgttccctctcagtttattcaaactgatgtatcggatatcaagggcaagacctcaatcttctcaaatatgatattttgtatccttgacatgttttaaaatgagttttcttctctctgtttcattatcacatgggtaccgttttcttactgattgcatcttcagctgtctttctctattagaattagacaccttttcacatggataagtttctgaaattgctttaacttacaaactttgatatctttgtcatactatattgttctttaccaccttgacaaatctaacagattttgttaacgtgcctcggtcccattctcttgagacattccacaaaatggtggttgaaaacggagggaagttttcaatgaacttaaacaactcagtgactcattgcattgcagcagaaagcagtggtacgtactttcttaccattacatattgatttttccccaacccttttgtacacatgagtgagtctcaaaacaattttaataatacgagcatgacaatgagatactatttcaggaataaagtatcaggcagcaaagcgtcagcgagatgtcatccacttttcatgggtcttagattgttgttcacgaaataagatgcttcctttgctgccaaagtgagtcctatcaactttttcttatggtattcaaccctttagggtttcttttgcttgtcgtgtctaactaaaaagcttttgcggccacttttgaaggtacttcctccacctcactgatgcttcaaggacaaaattacaggatgatattgatgaattttctgattcttattactgggatttagaccttgaaggtctcaaacaggtatgtattgtattccttattgagaccattcagtgagatcatacaatcgatttgcaatccctttcgcttcatttccaggtcttaagcaatgccaagcaatctgaagattcaaaatctattgactactacaagaaaaagttatgtcctgaaaaaagatggtcctgcctcttaagctgctgtgtttacttttacccgtatagtcaaccattgtaaggcccctcttgtttctttcttatgctgtttaaccatgtcagttacctaaagcaatactcatcatcctcaatgtgtctttttaacatgaaggagcactatagagaaaagcccttattgggatattatgtgctaagaaaattcaagtgctatgaacgtggttaatggctggctgagtaatagattagcagatgaatctttgctctatgcgtcgcaccttgtagttcttgctatggcataagaacctttgaattttactttagtttcgaaaaggtaaaccaaatattgtctgtttctgctattgagtttagccccacaatataatcagaattaagtctctattgttggtct

SEQ ID NO: 149317 - DNA, 984 bp, Arabidopsis thaliana landsberg
atggcagcttctaagcgactagttgtctcttgcttgttcttagttttgttgtttgctcaagccaattcgcaaggtttgaaagtaggtttctacagcaaaacatgcccacaactcgagggtatagttaaaaaggtcgtgttcgatgcgatgaacaaagcaccaacacttggtgctcctttgcttagaatgttcttccacgactgcttcgttcgggtatgtttctgtaataagtgaaatggataatgattttaatatatttcatgatgtcacgttcttaataatatgagtgaatcgtgtatgattaacagggatgtgacggatcagttttgttagataaaccaaacaatcaaggtgagaagagtgcagttcctaacctaagtcttcgagggtttggcatcatagccgattccaaggcggctctagaaaaagtgtgtccgggaattgtttcttgctctgatatcttggcacttgtcgctagagacgcaatggttgcagtaagtataaattcttactatcatgtgatctaatatttggtcagagctcacggtgtctttattacacgctccttgtatttattactacaaagttcacatggcgattatagacatcataaatagggttgggcgtattcttctatttttttgatgctacaaaatgcacttgacttaaattttcaagagactagttcagctttctatctgagattttctgactaatatattaaagaaaatatatccataaaaaaaattatgtattatatgttgtgttgaacttttaacatcatgtattttatgataaccaatcaatatatgttcagctcaatggaccgtcgtgggaggttgaaacgggacgaagagacggtctggttacaaacatcactgaggccttattaaacttaccatcaccatttaataatatcagtagccttatcactcaattccagtccaaaggcctcgacaagaaagacctcgttgtgctttcagg

SEQ ID NO: 149318 - DNA, 1079 bp, Arabidopsis thaliana landsberg; identical to SEQ ID NO: 36941
  unsure (1)..(1079): unsure at all n locations

SEQ ID NO: 149319 - DNA, 2398 bp, Arabidopsis thaliana landsberg
actgcagtactgcacccattcattttgtgactcggcccctccccattttgtacgtaaacaagaaaacgcgttcgtgattcactttaactttatgaaaaaaaaaacaatttggcgacttgcatcgacgtgcgcgtttatattatataaactgattttcaaaagaaggcatgattcatcaaagcatgtatattagcattcttaattatatctttgtttcaatcatgatcccaaaaatgtgagttgatctattgtcgttgtttccacgtatgttcgtctatttccaattttcagtgtattttattattctgctacatatttaattttagctcaaacacacattttaaccatattctccttggccatttatttattagtcgatagcaatttggttgcaataatcttctgttatacttgaaaaacgatctattaacaaatatattcgaacgagtttcaaaacaatctattaacaagtattcgaaagtcgtcacatcgttgactaaagctgaggacaactctgtcatttttatcttattcacgtggctacctcttcttcttcgtctctcattttatgtgtaatcccacagagcttgtcactccaaaaaaggcaaaaaaaaaaaaaaacagcttctaaaaataaaaaacaaaacaataatccagccaccgtaggggtaattccgtaaatttgtaacagaaactccattcccgcggcgtatgcagagggcaatcccgtaaacttaacccatctccggtgatgaataatatcaattccttcacgccggagtgattttccacaaaaaataagatatgaaagcaaatcgcggcggcggagagcacggccaacacgaggctctaaagctttccagtttcttcttcatgccggagcggccacgtgattacctcgtgcttttcacacgtttctccgtcctcacgtgcctcatcgtctccgtatctcttgttctccgcgccacttttttatccccttccgctcgagactattccaccacctacggtctcaaattaaccgccgtacctcaaaaagccatagctctccctccgtccgcatccgtcggaccaaccaatatctcccatatcttcttctctatcgccggagcagctgagacatggatcgatcggagccagtacatctccttatggtggcgaaacacgacacgtggcttcgtctggctcgatgaaccggtgaaaatccctgaaaatcactccgatgtcagattctcgatcccgactcgagtttctgatccaggctggactcgattcaaattctccagctcaagagccgcggttcgaatcgctcgtataatctgggatagttatcggttaaatctaccaaatgtccggtggttcgtcatgggagatgacgataccgtcttcttcaccgagaatctcgtcaaggttctctcaaagtacgaccacgagcagatgtggtacatcggaggaaactcagagagcgtcgagcaagacgtgatgcacgcgtacgatatggcgtttggcggcggtggtttcgctctgagccgtccattagcggcgcgtttggccgccgcgatggatgattgtctccaacgttatttctatttttacggttctgatcagagaatcgcgtcttgcatcagcgagatcggcgttccgttcaccgaagaacgcggttttcatcaggtacgtctgttgttatgcacgtgtccgttatctaattggttaatgtttatacacgtgtcgaaccgttttgagctagaattttggagcccgacaaattcaaaaggtttttattagatgctgaatttctcggtgatttaagtggattcttgccacgtggattctcataaacttatggggtcaaaaattaattatcactaatccacttgcttagtgttagtctgctagaaaaagcatgttggagtggatttattgaataaagtcacaaaattgttgaccaaaaaggaaaatattagtcattcaattatggacattagtacctttttccctctattcgacttatatatgttaagtactcttagttgattgcagttacagtttttacgttaagtactcttagttcattgcttgatataaatgctctccgaccgttttcccaaattttataagtttatttagttttagtgagtggttcttgtttgttgtggtccatgaatgtggcagaaaattgtttctaaattcgtgggtttaatttattggtggagcacatgatactgtcatgttcagatacatagcttttaatcatgtctagctactgatcagctttctgcaatgtgcttgttttaatctttagtgtccgctaaaatcttatactatttgatatttgttaatcatatctgtggttcttaagacatttatgtttattgttttatctctatgtgcgtgtcat

SEQ ID NO: 149320 - DNA, 1575 bp, Arabidopsis thaliana landsberg
  unsure (1)..(1575): unsure at all n locations
cggcttccaacatatgcaatctgctgactgctgccagacaagttgtattctgggggcttgggcagttacaagtttcatctttgcacattacatttccgtctggagctgagtgggacaaattgaaagagaaaggcttctcccaaaggattggaatgcagtaccactggaaaaatcgtgattataaaaagtaattgaagttagttgccagtatattagttcttaacaatgactggattggaagtagttgctattatattttgttcattttttttttatctctaatacttcagttttgacgagttcttgatggacatgaagcaaagcaaaaggaaaaatatccgacaggaacgcaaaaaggtttgtttagtttcctcttttcatatcatcctcattgtgcaatttattcttgtctcttaagtttctttgctcatgtgaatagtaaaatggaatggttactctttttttcttcccatacaacttttgaattgtggccttatttcgttatccgttccttgtggcgtttttcaagcacgctgctgacttctaatactccttttctctagtagattggtacccagaatttgaaaatgagacggctacaaggagatgatataaaggtatgtaactgaactgccacgagacgaatttgttgtaattgattatgcctggcggtatcttttcattttaatggctataaataatcaaccatgggatatcaatctgctaccagaggttagaactgatggcacatgctataaaggacattatggggcttttatattaatatgtgtcttaaaaatttgattcatcgtttgtgcctaatgtttttgcaggctaggcactgggattccttctatgatttctacaggaacacaactgataacaagtttagtctttatctttgagacatttttgtttttcttatcattagtacacattatgtgtctttgtgcataataaacatacttacattcaattacctgtcatcgtcaagtgtatgcattacctgtgtttgtcctttcacatgcttaacgatttccggctcttttagcggggcacaccttatctcacaagggatttctttctcgactttgcatcgaagttgggagacaagggattggtggttttagctgaagaaaacgaggaacctgttgcaggagcattgannnnnnnnnnnnnnnnnnnnnnatttgggagactatggggatgtcgtcccgactcctattatcctagtctccattttgaagcatgctattaccaggttggtcttgttgtttcaaagtctcaagagttttcgccgagacatacttgattaaaactcacaaactgataatgggattcataggcaattgaagcagcgatagagcttaatctgaaaacggtagaagctggagcgcagggtgagcataagattcagcgaggctaccttcccgttaaaacatatagttgccattacatattccatgaaagtttcaggcaagccatagacgagtttttagtgcgcgaatcaaatcacgtatgttttgaagtatggtgttaaagagtatataacatagctatgaattggtcatcgac

SEQ ID NO: 149321 - DNA, 3250 bp, Arabidopsis thaliana landsberg
taaaaaaaaaaaagaatatttatattcaaaaacttatcttaaaatcattatttttgtaagaaatcaagaaaaataaaattgtataaatctattgttaatggaattcaaatccaataatttaacaaaaatggtttttcacatgataataaggaaaggttaatattaaataaaattaatctcacatgataatcataaattatcttctaactagaatcaagtcaaaatgcatgagcatatgccacatccgtgataattcagtttgctgtcattatatttgccaaaaaatactcggaatagaagttgaggttttaatctaagtaattttaaatatatgcacatttattggaatattagcaaagtacagggatctattcgaaacttttcctttcatttaaggtttagtggaatattaatcgcataaaaacgtcaaaaaggaatttaataaagatcattactctctctctctctctctctgcagcttttaaaatcgctttctcaattctcgtcgttgtacccatttcagtttctctcaacgtaactgcttcacggcggcgagtgagtgagttcgacgtgaaatttcaactgatgggagcgtattgcgacgaaaacctaagtagtttaccggtgttctcctccggcgctccggcgaacgagctccggttcagcaagcatgtctacgataacgttcatggaaacatctatctcgatcctgtaagtggttgatttccttataatcatcttcgtttcctgtttctgtgattcctaatggttcgtttgcgagagataaggagcgacgctctagaactgtttctatggagatttctgttgaaattccggtgccgtttgttctagttggaatctggatactatcttcgtttatcttacattcatcgccgtgatttcgccggaatttaattgaactatcgagtcacggatggattagagattgctgtttaccggaaaattatgaaatgtatggttgagttttgagtcggagactaatttgatgaaccaactgcaaaaatttactggtgttaatggcttttgctaaaattgtttcgtattttctgtgtaaacaagagttttcatattctctaaaccactagagtgcctacgttcatatgtctatggaatctcattactaatagttcccaaatgtagtttactattgactcaacatggcatctgtactaatagttcactttttggtttgcagctttgtttaaaattcattgacactgagcagtttcagaggtaaagtcttggattgtgcttgtttccttcaatgaatgacttgctaaaaccacagtgttctgattcattattctaattccttgtttcaggcttcgtgaactaaagcaacttggtgagttggcttgcgttttcaactcaagttgcctctcctcttgtttaacgaagaagacagtcttgttatgtctatttccccccatcgataaacatgtatttattgtcaaatataggaaattttccttgaaaactttaaggagattcttcgttaaggtttctagttttaacagaaatgagtcttgagttgtgtatcttctttcgttgagaggagtttttctttaatggttcaggagtgacaaacatggtatatccaggagctgtacattcgagatttgagcactctctaggcgtgtattggcttgcaggcgaaactgctcagaggctaaaaaatttccaggttttaatttggatttcagtggtgcagtcacattttgatttaagtatggtaaggtttgtaatgtacgtgcttaactttctatagggaatggagcttggtattgacaattatgatcttcagactgtgagacttgctggtaagtggtaactattattagctcaatgactacattattccttgatacaatttctgatctgtttgtatgtgtaggacttctccatgatattggccatgggcctttcagtcatatgtttgagcgtgaattccttccaaaggtcataagtgactgtcagtggtatgtttgcacattccttgaaaagatcaatgccatggtgttacttgatattataagaactatgccttaacttttagtagttggcttctatggattatctctagctctttatatgccaattcttcgatgcaggtctcatgagttaatgtctgtaaacatgattgaccatatggttgatacacatcacatcgatattgatgctcaaatgctgaaaagagtgaaggtaactttctttcttaagactgttttgcttccctcaaatggcctctattatttgaaactggaaattgtgacattatttccagtctttacaaatccaatttaatatttattgcttcctttctctctttgctgatgattttctctaatgttaactgaccaggacatgatactagctagtactgaattttcacagctgaaagtaagttttataacaagtatgttctctattctaatcaaacatgaacaactacttaagctttgtatatattttccctttttcataatttgcagggcaatgcagagaagcgtttcttgtatgatattgttgctaatggtcgaaatgggattgatgtggacaagtaattctttacctgtatacttgtctgcagtttctttctttcccttttcactcatcatggtgcgtaaatttgaacctttatcttacaacatcaacttttaatgtctgcaaatatttataggtttgactaccttgtccgtgattctcgagcttgtggactgggatccaattttcaattccaaaggtcttcattctattctatagtcatttcactggtttctaataaggaaattgctaattattagaactttctagactgacagagacgatgagagtcctggacaatgaaatctgcttccgcgccaaggagtgtaagttttgtccacctaaattctctatttgcgtttgcttctatcccattttaaacccggtgaatttttcagatcttagtgtccacaagttatttgcaactcgagctgatctttatcgaaccgtctacacgcattcgaaagtaaaggtattataccattatcattctctctgtaccttgactattctttctctctttcccacttgtctcgttccattcatttgcaggcgatagagctgatgatagtagatgccatggtcaaagccaacaatcatttggaaatttcttctatgattaatgacccatctgaatactggaaggtacagttcttgctcagaagactaatattcactgagagcg

SEQ ID NO: 149322 - DNA, 1307 bp, Arabidopsis thaliana landsberg
aagacaattcaagaaagcgatttagaagacggaggagttcttaccggagatcttatacttatggatggaatgtacaatttccattcggccggtgattattcagataagtcggttctgatgatgtcaccggagagtctcatgtttccttccgattaccaagctttgctatgttcctccgccggtgaaaatcgtgtctctgatgttttcggatccgacgagctactctcagtagccgtctccgctttgtcgtcggaggcggcttcgatcgctccggagatccgaagaaatgatgataacgtttctctaactgtcatcaaagctaaaatcgcttgtcatccttcgtatcctcgcttacttcaagcttacatcgattgccaaaaggtgatcgttaactctttctttttttatcacttagataaaatctaggttttactttttaaagataaagataagattgagaagctttgatatttgattgttttttttataattttatggtttaacaatttcataatttagaaacaggtcggagcaccaccggagatagcgtgtttactagaggagattcaacgggagagtgatgtttataagcaagaggttgttccttcttcttgctttggagctgatcctgagcttgatgaatttatggtctctctctttttttccctcgatttgttttcggatttttatttttgttaaaatattttttttggaaatttttgtacttaagaagataatttattatcaggaaacgtactgcgatatattagtgaaatacaaatcggatctagcaagaccgtttgacgaggcaacgtgtttcttgaacaagattgagatgcagctacggtacctatgtactggtgtcgagtctgccaggggagtttctggtatgtcttaaattatccctctctggttcggtcttttagtggttctattttgtggttagttcagaatggtttcttttgatcataaccgtggtttttcgcagcagcaccccttatcagaaatccaccaatccacatgtgatgtgtgaacaatgacagttgtgtagcatagtcagtagctagatatggataagggggccatggaatcacatatggtgcagcctacaatcaatggttcaaagcgccctcaacatcagctaggcttaagagattaattgagcactgccatgatgttgttagaatttccatataggcctcttatggcccttggccctgtaaatgagacctttatgagcgctctaagaatatcttttatagccatgaccatataccccagttggtacctatacatatggcccggga

SEQ ID NO: 149323 - DNA, 1301 bp, Arabidopsis thaliana landsberg
tatgtctcttcaccaaacgtatcaaaccaaagcaaagttctttcttcttcttctcttgcaccaatacagacgaaaaaaaactcaggttccaatctctctattccttcaattcctagatttgattttgcttattgaaatactctgtgagacgttttcttgtaactttttttttttttactttcttatgtgatcatatcaaaccttaaagcaatttccaacgattcttttttgttcaaatctcttttggaaatccataaatgtttgttttgtgtggttttggtgaagagttacttagtctaaggttaatctagctgtttagttgtctgattgattaattaactcataaattctgatcagagatgttttagaggacaaaaacattctctgtttctgaaaattaatgcacttaaagtttatctgaatcttaattttgtttaataggaattagtgtctgatgatgctagtggcctaattcgagcttgagctgaggattttgattcagtttttggtgtcatgcttttgtctcaagatcacaaaattctcttcaatggggtacgtaaatatgtaatcatggagaagaaatatgtattttcatttgttatcacatctcttgtctgcgttgttctccttgcaacttccttcaacattggtttaatgtcttcacttcgaccaccgattaatggaactttatcaagtttccccaaaaatgattcgaacgttgtaggaaaacaacctcgtgaagacgacaagctcccacgtttcgcttaccttgtttcaggatctaaaggggatcttgaaagcctttggagaactcttagagcattgtaccatccaagaaaccaatacattgttcacttggatcttgaatcaccggttgatgagagatcagagttagcttctcgcatttcaaacgatcctatgtattcaaaagcaggaaatgtatatatgataactaaagctaatcttgtgacttataccggaccaacaatggtggcgaatacgcttcacgcatgtgcgattcttcttaaaagaaccccggattgggattggtttatcaatcttagtgcttcggattatcccctcgtgactcaagatggtaaatgcttcaatcttttccttgtgttcttgatattccccttgttaagactatcaaaaactgttctatgtttatagatctgattcatacattttcgacattggaccggaaccttaactttatcgagcacacaagttccttaggctggaaataagaaagttttttttcctctcattttctgaaattctttttagtggttttcaat

SEQ ID NO: 149324 - DNA, 380 bp, Arabidopsis thaliana landsberg
gatctccactggtgaagatatcggcggagaggatcgaagcagtggatttggagaacaaaagcatgtcatacagcatcattggcggcgaaatgttggagtactacaaaacgttcaaaggaaccatcaccgttattcctaagaacggtggcagccttctgaaatggtctggtgagtttgagaagaccgcccatgagattgatgacccacacgtcatcaaggactttgctgtcaagaacttcaaagagatagatgagtatctccttaagcaaactagtgcctaacactagaacctttaaattatataagagggttcgatcgtctctataagatttttctaattaagaagttgaataaagtggaacctctttatgaatatccaa

SEQ ID NO: 149325 - DNA, 230 bp, Arabidopsis thaliana landsberg
cctgaatgttgtatctgatgtgatacgtttgtgtttgtgcagattatgtgtaaccgctggaaacatttcacctattgatgttattactcatcttccaatcttgtgtgaggaggctggtgttccttatgtatacgttccttcaaaagaagtaagccaattttctttcttgatttctatcatcttaccaattaatcggttttgtggtgctaagatattcaatatttttttta

SEQ ID NO: 149326 - DNA, 534 bp, Arabidopsis thaliana landsberg
aagatttcaaggtttagggtttctgcaattcaaccatggcagagcaggtttggatctacattacattgtctttatgttataattggggattgctagttgttggattctcgttttctgggttctttgattttggcttttaatgatggattggtgtgtttgcagacggagaaggcgtttcttaagcaaccaaaagttttcttaaggtaattgtcacacctcaaaaattcaattgctttgtattttggctatggtctctttatgcttatgattcaaatgttctatcagctcgaagaaatctggtaagggaaagaggcctggtaaaggaggtaatcgtttctggaagaacattggccttggtttcaaaactccaagagaggctattgaaggtactgtttttatgtctcagctctcaattttgctttaccatgtctagaagaagcttcatttgttaaaaaagttgcattctttagagaacttagaggattttggttaaaagtctctaatttggttgttgagacattttctgagtaatct

SEQ ID NO: 149327 - DNA, 570 bp, Arabidopsis thaliana landsberg
  unsure (1)..(570): unsure at all n locations
atggctaccctaagagcaatgttgaaaaacgctttcatccttttcctcttcaccttaaccatcatggcaaaannnnnnnnnnnnnnnnnnnnnnnnnnnnnnggatgtgcagccaacttatgttgcagtagatatggatattgtggcaccacagatgcctactgtggtaccgggtgccgaagtggaccttgcagctcctcaaccacacctatcccaccaactcctagcggtggtgcaggcggtctaaacgctgatcctcgtgatacaattgaaaatgttgtcacaccagcattttttgatggtatcatgagcaaagtcggaaatggctgtccagcgaaagggttctacactcgccaggctttcattgcggctgcccaatcgttcgacgcctataaaggaaccgtcgctaagcgtgagattgccgctatgttggctcagttttctcatgaatctggaagtaagttctttataacccttctagttctactacatgaatgcatgtatactaattatntaattaaggcaaattaatgaattattattatcaagaatattattacactaattaag

SEQ ID NO: 149328 - DNA, 1146 bp, Arabidopsis thaliana landsberg
cttggaatcagtttctcttttcttccctctttctctgagctatggagattactgtaatcgcttcttcctcaatcgatgaaggaattggaagttgggatctcaaaaccgggacagagcagcttcaattcaagccgtgtgcttctccggcgcatggtctcaccgccgtcggcgaaaaatttctcgcctcctctcagctctcggcgagaaatacttctggctcgattttttactggtcttggactaaggtctcattctcaaacttgaaatcactgtttttttgttctctttggatagaaagtttgaaacttgttttgaattgtagcctcaagctgaagtgaagagctacccagtggaaccaataaaggctcttgcagcaaacaatgaaggaacttacttagttggtggtggaatctctggagatatttacctttgggaggttgcgactgggaagttgcttaagaagtggcatggtcattatcgttcagtaacatgtttggtgttctctggagatgattctttgttggtttctggatctcaagatgggtctattagagtttggtctcttataaggttaaaactttgtgtattatcatgcttgtttttttgcaaggcattgtcttttattctgattctttgctctttgtggttagttaggctatttgatgatttccagaggcagcaagggaacactctttatgaacacaattttaatgagcatacaatgtctgtaactgatattgttatagactatggaggctgcaatgctgtgataatttcctcttcagaagatcggactagcaaggtacttatttggatcactaatgttatgcatttgttaactgcaatgaaagtttagctcttgtattgttaatgagattcattttgatatagctgagaaatagaacctgatatagcttttttatttgatgaccttggttggatttgtaaatccatataggtttggagcttgtcaagagggaaattgttgaaaaatatcatttttccttcagtcatcaatgcactcgcattggaccctggagggtgtgtgttctatgctggtgccagagacagcaaaatctatatcggtgccattaatgccacaagtgaatacgggacacaagttcttggttcagtatctgaaaaagg

SEQ ID NO: 149329 - DNA, 488 bp, Arabidopsis thaliana landsberg; identical to SEQ ID NO: 19228

SEQ ID NO: 149330 - DNA, 2421 bp, Arabidopsis thaliana landsberg; identical to SEQ ID NO: 30376
  unsure (1)..(2421): unsure at all n locations

SEQ ID NO: 149331 - DNA, 855 bp, Arabidopsis thaliana landsberg
aaaaattttggacttattttcgatatgtttaggggaaaaatatttgtgttatcattattttctatttacgtcctctcatcagcggctgaaaaaaatacatcattttctgcgctttttgcttttggtgattcagtcttagatacgggaaacaataattttcttcttactcttctcaaaggaaattattggccatatggtttgagttttgactataaatttccgacgggaagattcggaaatggaagagttttcaccgatatagttggtataatatcccaatgttgactggctttacttaactctacctataaagatctctcactgcacactttctatagatccgagactaataatcttgattaatcatattatttatataactaggtagtattctcatgtggtgaagtcttctattgtatgcagccgaaggtttacagatcaaaagacttgtaccagcttatagcaagattcgtcgcatcagttctgaagaccttaagactggcgtttgttttgcatcaggtggttcaggaattgacgatcttacatcccgaacactggtgaaagaaaaaaaaaacttaattgttatttcgataaacactatatattatatatctcaaacaatgttttcttataataattggatggttgtgggtggttttgtcagagagttttatcggcaggtgaccaagtaaaagactttaaagactatttgaagaaactaagaagagtagtgaaacgtaagaaaaaagtaaaagaaatagtttcaaacgctgtgtttcttatttctgaaggaaataatgatcttggatactttgtcgctcccgctcttcttcgattacagtcgacaacgacata

SEQ ID NO: 149332 - DNA, 468 bp, Arabidopsis thaliana landsberg
aaaaaaaggggggcaaaaaagggttttttttttaaaaggtttcccccgttgggtttaaaacagcgaaaaagggaaaatgggttctggttaaaagggttacttaaaaaaagttaagggggtttggaatttcaggaattgaatggtcgtcacatccgagtgaatcctgctaatgatagaccaagtgctccacgggcttatggaggtggtggtggatacagtggtggaggtggaggctacggaggaggtggtggtgggtacggaggaggaggtggtggctatggagaaggtggtgatggtggtggtggtttctaaacagaggaggtgcttgtgaagaagaagagttaatggttctgtttagttggtttcttctattgaatcttatgttagcacaaaacctgaatgggatttgctgaaaactctttactctttttttggttaccaatcaattcggtttaatattttattgcc

SEQ ID NO: 149333 - DNA, 294 bp, Arabidopsis thaliana landsberg
attccacatttgagacctgctgagtacaaaaggtcaaggttggcaaggaacgagaggacagtgaatcgtgcttatggtggtgttctatctggagtcgctgttagggagaggtaagtatattatctagatttctcaaaaatgggtttctttagagtattgcaactaatcttacacttttctctgttccaggatcgtcagggccttcttggttgaagaacagaagattgtgaagaaggttttgaagcttcagaaggcgaaagagaagactgcaccaaagagttagaagatgacctt

SEQ ID NO: 149334 - DNA, 596 bp, Arabidopsis thaliana landsberg
aaaaagaaagaccaaaaggccgtgggttttcgcgaaggagaaaagattccgatcgtcagcgtcgtctttcctcacgcgatttcgaatcacttggttcagatggccgtcctggtccgcagagatgtaatttcactaaatctcttcctctttcgctgtttttagttaggttttagtgttggcatactgattcttcgcgttgttgatttatttgtggtagtaatttgttctagggtttctcataaccccttgtgtttgggattcaatttgacctagaagttttttgaaaaaaattagattggtttagatttagtttgtaaccattataaaaaatgtaatggttctagagtctgtgaagatagaacatagtttctttgagggtaatgaagaattgggactgttttggatgaatttgtttgttgtgtagccgttgaaggatggattatcttggtctctggagttcatgaggagacacaggaggaggatataaccaatgcttttggtgattttggggagattaagaatctaaatctcaatctcgatcgccgtagtggttatgtcaaggtatggagttttgcctttgtttcttagtggctctt

SEQ ID NO: 149335 - DNA, 1781 bp, Arabidopsis thaliana landsberg
cttgtggaactcttgaactagtcctttcaaaaccaccaagtaacaactctgtttattctctgttttctacctctaatctaaaacatttactgacttttttcttcttcaataccgcaaaaatcagatatgcgatacaatgcgcttagctttatctttcttcaagtgagggaactatcttggctacaatggcatccatttagtgtttcttcaagccctctagatgggaaccatcatgttgcggttctcataaaggttcttggtggatggactgcaaagcttagagaccagttgtcaaatctatacgaggcagagaaccaagatcagctcatttctcctcagtcatatcctaaaatcacaacttgtgtggagggaccttatggccatgaatctccataccatttagcgtaatgcatttcgtctacttgaaattttttcaatgccataagctttagcttaactcaagaaagatttattgcgggtgcaggtatgagaacctggtcttagtagcaggaggaatcgggattacgccttttttcgccatcttaagcgatatcctacaccgtaaaagagatgggaaagcttgtttacctagtaaggttttagttgtatgggccattaaaaactcagacgagctctctctgctctcagcaattgacataccttccatttgccctttcttctctaagaaactaaaccttgagattcacatatatatcactcgacaatccgagcctcgcttggtacgtcttaaataagtcttttgggagctgcaataggccttactaagcttgttgaactctttaatgtttcatggttatacaggaagatgggatggttcacaaggtggtgcatccttctgtcaagctaccacggaccaacggatgttctatgtcggtactagttggtacaggggataacatatggtctggactctatctaattatatccaccattggatttatttcaatgatcacattgttggacatcttttacataaaaagatacaacataacaacgtggtggtacaagggacttctatttgttggttgtatggttgcaagtgtcttgatttttggaggtcttgtggttgttttctggcatcgctgggaacacaaaaccggtgaagtggaagcaaatggcaacgacaaggtagatttgaatggagaagaaacccataatccatctgcagcagagcttaagggcttggcaatagaagaagatgtccagaattacaccactattcgttatggcaccagaccggcctttagaggtatacactacaaaattagcggtgtcaagtccagttatctcgtttttttatttataaaattatagaaactgaaatcattcggaacggtttgacacggtttcgttcggttcttgaatccgacttttggtgtagatatttggctcgattcggttaagttaaatctttgattggttcatgtaatatttttattttgtaattgcagagatatttgagtcattgaatgggaaatgggggagtgtggatgttggagtgatagtatgcggtccagcgactcttcagacgaccgtagccaaagaaatacggtcacatagcatctggcgatcggcgaatcatcctcttttccacttcaacagccacagtttcgatctctaacgatgctttcaaggccaaagaacattatggaaggaaattcgaagacaaattgatgcatatattttaggtaatctctgtcagtatgtactatggaaacagctatggttgatatgtgtatgtttatctttcagttttcgat

SEQ ID NO: 149336 - DNA, 1099 bp, Arabidopsis thaliana landsberg
atggaaggtgtggctatgaaactcccgtcgttccctaacgccatctccatcggccaccggagcttctcccgcgttcgttgctcctcttcgctatccgtttgttccgccgccgccgcttcctccgccaccatctccactgattccgaatccgtctctctcggccatcgcgttcgaaaagatttccgaattctccaccaggtttgtccactttccataaacctgattaactttgaattgtatggatttgaaaattaagcaattttaccattgattgagtttttatttcaggaagtgaatgggtcaaagcttgtgtacttagacagtgctgcaacttctcagaagccagcagctgtattggacgctttgcagaattactatgagttctataattccaacgttcatcgaggaatacactatttaagtgctaaagctacagatgaatttgagttagctaggaaaaaagttgctcgtttcatcaatgcttctgatagtagagagattgtttttacaaggaatgccactgaagccatcaatcttgtagcttattcatggggtctttctaatcttaaaccaggagacgaggtttggctttacttttatcaatccatcttgttgagattcttccaaatgagattgtgaatgatgcaagcttttcaggttatacttacagttgctgaacatcatagttgcattgttccttggcaaattgtatctcaaaaaactggagcagttctaaagtttgtgactttgaatgaggatgaagtccctgacataaacaagttgagagaattgatttctccaaagacaaagctcgtcgctgttcatcatgtttctaatgttcttggtagattctttttcatgttctcatcatattcaatttgtttggcttgtatatgtgtttaatttttccatgaaagaaggtaagtatctaacttatgtttctttttgtttagcatcttctcttcctattgaagagattgtggtatgggcacacgatgttggagcgaaagttctagtggatgcttgtcaaagtgttcctcacatggtggttgatgtccagaagcttaatgctgattttctagttgcgtcttctcacaag

SEQ ID NO: 149337 - DNA, 2144 bp, Arabidopsis thaliana landsberg
acattgatcgcaaatgcctcagcgtaccagaagagcagtttggtccaagtactaatgcacattgattagatgtgtgtgaggagaaggatctgaaagggaagatttgctctaaaaatggaactttgtcacatggattgaatcctgaggctggcttgaacatggaggtaaagtcaaaggctgatgttagcagacataggaagagtgaaaagaacttgcacgaaagaaaccgaaatgaacatgatggagaacttggtcgaaagcagcatggggaggctaagacctgcaagaggagttcaaatagaaaagtccgggttgttcacggtgttgaaggagattactgtactcaacattcttgtcccttgccatgtaatgctgatggctgcttggcagagagtaaacttggctccactgatgctgaccagaaaaaggtttcagttgaactatctcagtgcgtgtcactcttaacaaaagcatggaatggatcttccaaaggtaaaatctcagaagacagagcatcatctttgttatctgtgaaacattgtatgtatgagccttgccagagacaagattcaaagacgcataaagtgacatctgaaaaggggagaagtatatctccttttcagcggcttagcttcaatatgggtaaggcaagcaaaactaacagtgaaggaggtactgttcccacaacccagctagactcaatgactaactccacaaagatagattcacaaaatgtggctctattatctgatgttgacggctcaaattgcaacaaacccagtaaaaaagatacaaccacgacaagccatttaagaaggttgctagagcctctattgaagccaagagcagctaactctggcaattctgtggaggggccgaaaggtcaaggccttcaacgacttaaattgggtatcacaggttgcaaatcagtaaatgtcaatgattcagctcatggaaagaagctaggatcatccatggttcgagctgttctgcgggttacagttaagaacaatcagccactctttacatttgcagtgaacaaagaaacagacattattgcggccacccaaaagaaaatgggaagctcggaagagggtgaatgtactagtgtttatactttcttctctattaaagaccataagagaaacagtgggtggttaaaccaaagaggcagcggccaaacacatggtctcatctctaatgttgttgctcagatgcgggtctcgagctctttgccatctggttccatcagagagtttgttctcttctctgtagaacttgatcgagagagcacggaaaagtctgatctgcagttgaaaaacgagctagctgcgatcatcgtgaagatgccaagattgtttcacagaagggctccactaaacacggttcaggatcacaatgcaactagtggagagcttgaagatcacatcaaagacaagttttttgaccaagacattagtgctacggtcatacttcaaagcggtgttcatagtatgcctcagaaagcagggccatagtctttgatacagcgatggagaacaggtggatcttgcgattgtggaggttgggacatgggctgtaatctcagaattcttacaaatcagcacaacctctcctacaagaagtcggcaacatcaaactcaccaccctcttcaaacagattcgaactcttctttctggtgcagattctatacttagtcctaaatcaaatgtccttttttttgctctctgccaaatcaaaaccaaaaggtttcatcatcacatttctacgtttttccagggagaacaagcggaggagcatccgttcttgagctttaaaccgatcaaagaagggatatattcagttgcatataattcatccctttcacaactacaagcgttctctatatgcatggcacttgcagagagtaggaaaatgtcagagaacatccttgagcagaaaagctcttgtgatgaacataaagttaggggaaaaaccgtgttactcccggaccaagattcaaaccctaatggcaacaccgtcgggtatcaaccgcggttctcgcctgttgggcgggtctgaagtttgtatttttacttcaaacccaaattttttacttgcaggtatgtgatcataatattagtgttaagcctaagataaaaca

SEQ ID NO: 149338 - DNA, 2654 bp, Arabidopsis thaliana landsberg
ttcaccaaaacggcatcgtaggaccagtgttacgcctcttcttccaatccgccggagcctgagtcttcttctcctcctcctcctccgcctccgcctcaaccgctggcatcgcaacagaagaggaagaagaacgttgagacgacggattgggtcgcttcttccttgacccggcggtttggaatcggcgcgggtcttgcctgggcgggctttctggctttcggtgtaatctccgagcagatcaagactcggattgaggtttctcaggaagtagctaaccccaggttttaatatttcacatgtcgttacaaaatttcgcatttttgaagaactttcaataccgaataggcgattacaaagaaatagtttttggatttcataatcataagttatctgaagactagagttgattattttgttgggtttgcagagatgtagaagaagagaaagagattgtgttgcccaacggcataaggtacaatttccccattaacactagagcacaaatgttgaatgatttcatccgtggataaagtttaattacctgcttactagttctttaaacaaagctctgttactgaaaaatgagatatgagcctgcttcatccataataattagttaattaccacgtatgttttctctgtggccatttttagtatatgagcttattaagccattgaaactattgatgtagcaatgtgtctcctttcctatgatgtactgaagaaagaatatccgacattgataacaaaacagacagctcttgcatcagtaactgatgcatggaatcggaccgtgcaggtactatgatcaacgcgttggaggaggagcaacaccaagagcaggagacttggtagtgattgatctaaaggggcaagtgcaaggaaccggacaagtattcgtggatacatttggaaccaaagacaagaagaagatgaagccattggcacttgtggtgggttcaaaaccatatagcaaaggattatgtgaaggcatagattatgtactaaggtccatgaaggctggaggtaaacgcagagtgattgttccaccatcgttaggatttggtgtagacggtgctgaattggaatcgggtttgcagattcctcctaatgcttcgttggaatatatagttgagattgatagagtctcaattgcaccagcttgagttgttgtacgtacagctttggtttcattcccaaatccttcaaatatttggttgtataagtatgagtggaaaacaaagtgtaaatttttgtttcttttggggtcgatgtgattgaaccgagataaaccggatcaaaatcttcggtttgatttatttatttatttaaatagatataaaattacgtaaatgtatttctgtggttatacgtactgtatttactatttacgacttcgatgaagtcttagccaaaattgcgaagataattattttattcgctggatctctctgtgaacgaggaaaggatcacgacacttgtcaattaacattgtttattctttttttccggcggaagcgaattgttggttgctgtagagagaattgattggccggagagaatggtgaaagtaatcgattcccattacctagccatcaccgccattgtcaccgtaagtctgtcttttctggtgcaatcgtttcgttttgtgtttctcgaaaaatcacgagttgggtcttttctgatttagcgtttttttttgtgtgtgtaggtgggttatcaattcatattcttcgtaatcacagctcttttcaaatttgatcaagttactgactttgccggtacgttgatctatctaatttggaaatgctaatgttaatccttttgagtgattcgttattcttctttcgattgcgatcacaaatgttatagacttttcatttctgctaacatgcatgtgactaaaaatgttggcaggaagtacaaatttcgtgatacttgctgtattgactctgcttctcaaagggacatggcattatcgtcaggtaataagatctctctctctcaatgagtttctctgtgtgattctgtataattgactcagctctttaacctcccagatagtcttgactgtgctagtagtcgtatggggacttcgtctgggactgttcctccttatgaggtttgcaccatgacaccgcttcaaatcgatatgcatttgcaaaagttaatgattttctggtcatgtctgatgtattttttgcatcctaactttgagtaggatcttgcaatggggtgaagatcgacgctttgatgacatgcgtgaaaatattgggtaaactagtagtcttttggatttttcaggttagctacaaactttatattttcatctttagaagagagagaaggaagtagctcagctaagttggattgttgggatctaacaccatgtggggtcttgtgctttttttccctatcaggccgtgtgggtttggactgttagtttacctgttacctttgttaatgcaaacaacggtggaagattgtttcagcccgcagatgttatcggttggacaatgtgggttgcagggctcttgattgaagctacagctgatcaacaaaagctttcgttcaagaagtgtccagaaaacaaaggaaaatggtgtgatgttggtgtatggaagtattcacgccatccaaactactttggtgag

SEQ ID NO: 149339 - DNA, 1672 bp, Arabidopsis thaliana landsberg
  unsure (1)..(1672): unsure at all n locations
gacactcaccgtttactcactggtggaatggagaaaatacttcggatattcgatttgaatcggccagacgcacctccaaaagaagtcgggaattcccctggttcaattagaactgtcgaatggcttcatagtgataatacaatcttaagctcttgcacagataccggtgacattaggtatgccaccacgtcgttccttgggtttagactcagtcctttagtattcctggtttcattgttcttttgtgtatgtcctctgtaggttatgggacataagaagtgacaagattgttcatacattagaaacaaagtccccagttactagtgctgaagtaagtcaggatgggcgatacatcactactgctgatggatctagtgttaagttttgggacgctaaaaagtaagttaaaaatatagaaatgcatcctcagttacagttttatcgtttttctttgatggttgagctttttctcctgctctcctagttttggattgctgaagagctatgacatgccttgcaatgttgaatcggcatcgttggaaccgaaannnnnnnnnnnnnnnnnnnctggaggagaagatatgtgggtgcacaggtttgatttccagactggagaagagattggtaagtttcttttaaaaaagaatgaagttttcattttaggaacctgtgtgtatcctttaaagccaatgtggtgaatgtagggtgtaacaagggtcatcacgggccagtgcactgcgtgaggtatgcgccaggaggggagtcatacacctcaggctcagaagacggaacggtcagaatatgggtggtgggttcggtaaaccatcctgaggagagcaatctaagcggccacgtgaagcttgtggcagaggaggttgtgcgtaaagctgaaagtctgcgtatcagtgagaaagccgcagaagctaaatgaaacaccatcgttagcttatgatatcacatagattcatagttgtttttgcatcattataagatgtgacaaaggggttttgccttttaaaagtctctcagaccgaataaaacgaaataatcttcaactatacttgagtgaatagtgaatctaatccaaattttgacaagaaactttacaacggtatcaaaaatatctttaaacaactgtatgtcataaatagttgcaagttttgaaagcccagttgaaactagaggggcccagaaattaagcaaacatcaaatagtcaaatacaaagaaagtgtgaaagttaaaaccctaaacccttaatttgagctctctgctctcctggttttagttttcctctatttcgtgctcaattcgcttgttctccagttccactctgtaaggatctgttacttttctgtaatcctctcaaaattcaatgcttttgcttactgggtctgatctttgcaagtgaaatgcatgacatttcgtccaaaatcagaccttgcaaaaatggttacttttttacctaatccgtatcgtctgggtgttttgatctttacaaaagaagatcagtgccggcggcgatactgtccgaggataaaacatgtttgctctttccaaggttttgcggatgttggattcctcgattagacactcgttataccatttgattctttatttactactataatttgtctcgtctatcccaaaattggatataattaacagttctct

SEQ ID NO: 149340 - DNA, 1623 bp, Arabidopsis thaliana landsberg
acgtagagaacaatgctccggctactatttatcgttcgccttctctttttaatgccactagcttcatcgagatccaaccacagtgaagaagtcgagaatcttctcaaactgaaatccacctttggagaaacaaaatccgacgacgtctttaagacctggactcaccggaattcggcatgtgaattcgccggaatcgtatgtaattccgacggaaacgtcgtagagatcaaccttggaagtcggagtttgatcaaccgagacgacgacggtaggttcaccgatcttcctttcgattcaatctgcgatttgaagttgctggagaagcttgttctaggaaacaactctttacgtggtcagattggtacgaatctcgggaaatgtaatcgcttgagatacttagacctcgggatcaacaatttctccggtgagtttccggcgattgattcgttacaattactcgagtttttgagcttaaacgcttctggaatctctggaatattcccatggagttctctaaaagacctgaaacgattgagtttcctaagcgttggagataaccgattcggttcgcatccatttcctagagagattctaaatctcactgccttgcaatgggtttatctgagtaacagcagcatcactggtaagattccagagggaatcaaaaaccttgttcgtctacaaaacttggagctctctgataatcagatctctggtgaaattccaaaggagattgttcagctcaaaaacctaaggcagcttgagatttatagtaatgacttgaccggtaagttaccattgggttttaggaatttgacgaatctgaggaatttcgacgcctctaacaactccttggaaggtgatttatcagagctgcggttcttaaagaatcttgtgtctcttggaatgttcgaaaaccgattaaccggtgagattccaaaagagtttggagatttcaagagtttagctgctttgtctctttacagaaaccagctcacagggaagcttccgaggagactcggttcttggacagcttttaagtacatcgacgtgtctgagaacttcttggaaggtcagattcctccttatatgtgcaagaaaggcgtaatgacgcatcttctcatgttgcagaacagattcacaggacaatttccagagagttatgctaaatgtaagactctgattcgtcttcgtgtaagtaacaactctctctctggaatgattccttcagggatttggggtcttcctaatctacagtttcttgaccttgcttcaaactattttgaaggaaacctcactggtgatattggtaatgccaagtctctaggttctttagatttgagcaataatagattttcaggttctctaccgtttcagatctcaggagctaactcgttagtgtcggttaatcttcgaatgaataagttttccgggataggtgctgaatcttttggtacgcttaaggagcttttaagtctcattcttgaccagcactaatctatctggtgctataccaaggcataggcttatgcacatctttggttgatctaaactttgctgggaactcactctctgacgaaatgccggaaagttaggatcttagagacattgaatccctgatct

SEQ ID NO: 149341 - DNA, 798 bp, Arabidopsis thaliana landsberg; identical to SEQ ID NO: 33257

SEQ ID NO: 149342 - DNA, 2923 bp, Arabidopsis thaliana landsberg
  unsure (1)..(2923): unsure at all n locations
atggtgatctttgctaacattgtcgtcattgttgctacggttagccggaggagctgcaggagacggcggagggatctggtgacgtggcgggttagtaggaacggtggaaggaggatttgctgcgagagagatatcggagagatcgtcaagggagatcggaaaaacgctctgagaaggtcttctctggtgacggcttggtctctccgacatggttagctacagattcagacaacaaggattgggaagagagaaaagagagataagaagagagagattgttgtgtgtgagagtgatgagatcgggagatagagagagactgtttatataaagaaggtgaaaaagaaaaatgtgttaggtagacagtgattatccgaattgagagcatgtatattgtaattttgtaaattctagtatattacaagaataaaaaagttaattttaataactaaaacatgaaagaaaagtaagaaaaacaaatgaaacatgagtttggatgtcaaataattctcttcttttttttttaaagttgtcttataattcactatttttaaaaaattagcatagactaaatcatttagtaaaataaagtcatttagtacaatagattttaggcaatgtggatttggtgttagtttatcaatcaaatgctctttaagaaaaactgtattaccatctattttgtactgtttttctttatataccattacatcttcaattatcatgtcatctataactatgttttaatatatatgaactacgaagaacataattcttcttatcatattttttgaaaaaaatgtgtgaaaagtattgttttctgtagaagctggttctaagtagcaagactaacatctctatgcatggtcaaatggttcagtaaatgttctgtgcatggtcaaatggttcagatacaaaattatgaattgtacctttttaacaagtaaatttaccccacagttccttaaaagtttatcttttgttaggtaagtaattaagattgaccaaaattttgtattttaagtatgatttgttttaggtcaataagttactannnnnnnnnnnnnnnnnnnnnnnnnnnnnnnnnngagggagatacagaatttaataatcaccattaactgtatttgaatagtctttactttctgcaaagtcataatgttgaaaaagttaattgcaattaaatgtaaatcttctccaataaccatcatagttcattgcatttagtggaaacaaaattgttcattgcatttgatgagaatatagataattggtctgacagatcttatatatattgataatatgaacaaacttccgataagctttgtcaacataaataaattaagaacccaaattattgtaatttgttttagtttttttttgtctagaagacaaacatttctcccccatgtgaggagatgtcagtctcgttggaatttaatgttgttatacgttccatagagccatacgacacgaatacaaacatgtattcaattttctgtgtctgatttttcttgttgataagatagatttaaatgtgacacacagatggtgatttcatatgggattgctgattaaaaaactcaagtaattttacaaaagtactagtgctagtgctagatattatatctagctagtaacttcgatagatcatcagtgtccagtgacactgatttagtgtccaatagaaagcatccaagtttttgccaaaaaaaaaaaaagaaagcatccaagcaatacatataagtttcatttgcattatattcaacagtaccattttcatatcttgtttcaaaaaatacatcaaattattttccaaaccttcacatataatttgagaagaaatattacaaatttaatataggttcagcataatttagaaaatattattcaatgtttaaaacttctcctaaattttggagtattgctattaatccttttaatgtgaacaaaacattgaagcgaaggttgccagatcagcaaatcatagcccgtgattcactttcaatccaaaagctaacattcatcaactgacaaaaccaaccatatcttccaacttctttcgctatcttacgccaaagctttcttaattcctccgtttgcatattttccggtcagatcaaaatcagaatcagaatcaaatttctcgtcgtgtcggagtaaatcaagccatggattccggaaccaaagtgaagaaaggagccgctggaagaagaagtggtggaggtcctaagaagaaaccggtttcccgttcggttaaatccggtctacagtttcctgtcggtaggatcggtcggtatcttaagaaaggtcgttattcgaagcgtgtcggaaccggagctccggtctatctcgccgccgtcctcgagtatcttgctgctgaggtaataaagttctgaattcagatcagctaatcatttcatcggaattatcgcagtttcatcgatttcactagaattcttgtgggttttgttctgttgcttcgttgaccatctataggtgtagaatgtcttcttctgattttagggtaaattgataatcatctgaggttgtaaaattgaatttgttagatactatatcacgagtagatcaacctcaagacatggtttcactttcaattaggtttaacatctttgctttgcaaatctcacaatcttagatagagatatattagcgttacataaaaactaaagttgcatagtcaataaaacctaaataaaacatctgcaggtaaacttcattgagaatctatcatcatgtaacaccgttttgagaatctgaataccttggactgatgtgcatgttacatgtaactcttgtcaacaaatctctgagtaactaggatatgcaaatattgcatactaatctttttgatcgaatgtgacaaaaccccattttaactttagaggcacattggctcgagcat

SEQ ID NO: 149343 - DNA, 620 bp, Arabidopsis thaliana landsberg
ccggagctggtgaaaaaaatcgtcttttctatctcctttgaaggtaattcagcttctcgatttctccagatgctcatatagttgttttatgccagtcgaatcggattattttcatgaaattaagagtgtttagggtttgaatctccgtgtttgtagatggcgagcaatattatcatgttcgaggatatcttcgtggtcgataagctagaccctgatggcaaaaagttcgataaaggtatctacttttttttttaacctcagtcacgatttgtaatgcttgtcatggcttaaatcgagtttctgatatgaatcctagtttcttgtgtttgttttaagttttagataaattggaatccaagttagtgtgaaaaagatctcaacttttaaaattttaagcctcctaaagtttttttgttctgacttcaaattgattgcgtctctgtgtgtttgtggtaacacagttacgcgtgttgaagcaaggagccacaacttggaaatgtttatgcatttagatgttaacactgaggtttatccattggctgttggtgataagttcacgctggctatggctcccacgcttaatctcgatggaactcctgataccggatactttactccgg

SEQ ID NO: 149344 - DNA, 625 bp, Arabidopsis thaliana landsberg
gtttttttaatgaacttgctcaataagttagtgttgagacacatcattaattaattttatctgttcgaatgaaaatgtgtagggttgtgatggatcgttgcttctagacaccatgtgggagtatagttactgagaagaactctaaccctaacagcagatcggctcgcgggtttgaagttgttgacgagatcaaggcagcattagagaacgaatgccctaacactgtttcttgtgctgatgccttaactctagccgctagagactcctctgttcttgtaagtcgctttctttctctgtctctctctattgcttctttaagttctcaacatctaatttggttcggtttgtgtgtagactggtggaccaagctggatggttcctttgggaagaagagattcgacaagtgcaagcttgagtggatcaaacaacaacattcctgcacccaacaacactttcaacacaattgtcacgagatttaacaaccaaggtctcgatctcaccgacgttgttgctctctccggtaagcttacttaacacacaaggaagaaatttacttgcttctaaagctaagttgaaccttaataacgggtttatcataatctgacctcaatttttcaggggaatc

SEQ ID NO: 149345 - DNA, 2428 bp, Arabidopsis thaliana landsberg
actgtaatctatctggataggaaacggagtgactctggttgtgatgaagattgctcttctagtattgatggtgaagatgtttctatatcacggtttggttatgagcttatgcagtcacctctttctcctttcattggatcaaacaacattccagaagagctgtaaggtctacatgaaaagtactcttccacatgtagattattcacatacgaggaagtcttgtcaattacctcaaactttgcatctggtatgcccctttatatatgctaacatgagtttagcttgtgtctgacttgatattcatccttttgctttatgttttctgtttccagagaacttggttggagaaggtggtaatagttatgtttatagaggagatctaccagatggcagggaattagctgtcaaaatattgaaaccttgtctggatgtgttgaaggaatttatactggaaattgaagtcattaccagtgtacatcacaaaaatatagtatctctctttggtttctgtttcgagaataataatttgatgctggtatacgattatctaccacgaggaagccttgaagagaaccttcatggtaaataaactacatttgatattccctctggattctcatactagagaaagatccatcgtcattgttctcatttcttgaatcaggcaatagaaaggatgcaaagaaatttggctggatggagagatataaggtggcagtgggtgttgccgaggcgttagactatctgcataatactcatgatccagaagtaattcaccgggatgtcaaatcttctaatgttcttttggcagatgattttgagccacaggtactgctacatcacaatcttaatctgagttcattcacagatgcaatttttacacaagtttcctgattgacattaaattatattggttcagctctcagatttcggattcgccagcttggcttcaagtacctcacagcatgtagcgggtggggatattgccgggacatttgggtatttaacttgcttcgttacaccatctcttaaaaactatcaccattccatcaatctgcctcttaactttcttctttctttgacagttacctagcaccagagtacttcatgcacggtaaagtaaccgacaagattgatgtctatgcttttggtgttgtattgctcgagctcatatcgggtagaaaaccaatctgcgtcgaccagtctaaaggccaggagagccttgtcttgtgggtaagcataattgtccacaaactcacattttctacttcataccgttattctgcctattgaaatcagattataggaagcaatgttactcttccatgtccatatgaaatgacttaagttgcatctctttcccaggcaaacccaattctagatagtggaaagtttgctcagttactggatcccagtctagaaaatgataacagtaacgatctaatcgagaaactattgttagctgccacgctatgcatcaaacgcacacctcatgaccgtccgcaaattggccttgtaagcatacgtgtcatttatcttcttggtttgcaatgaatccttattctttgctcctcattgctctctttcttttgggatatattcttatttcaacctcaggtcctaaagatattacaaggggaagaagaagcaacagagtggggaaagcaacaagtgagagcctcagaagacgtgagcgcatatttgacaaatatagaatcacacataaacctcgcattgcttgatttggaagatgatgcagcttctgatagcagccctgaagctagtagtatctctgttgaggaatacttgaaagggcgatggagccgcactgctagcttcaacttcaactaataatttttactagtttaaccccgaaaatcccaaaatttgacgatattgtaagttgtgtaaattgtaatcgattttctgagattctcaagctttaagttgtgtcaatttaggaagagtgaatagctcttgtagagaggacttaagttggaatttgtcttctttgttttgtcagagcagaaaatgtttcaagtgttccactttcatatcggttttaaaagtttaaaaatgtacaagtgttccgattcggttttaaggttcagttttataattttagtttacttgtaaaaaccacataaaaaaataactaacttgaatggaaaagcatacaagaaactcaaagagaaggctgaagcttatccttgtgtttgggcttcttataatattgttgtctacggtggtttttttgatgtggacagcttatagatggaggaaacgtcgtaagaccgaagatagagttcgtgttcttcagacaaaactttctaaactcgtcgaaaatgaacaagcagcagtaacagcttctaaatctgctcaatcagtggacaagtcttcttcaattcccgacaagaaaacgtcttaa

SEQ ID NO: 149346 - DNA, 661 bp, Arabidopsis thaliana landsberg
aaagagatcggagacgtgtactatagagtcgactatacttgaggacgcattttcttggaggaaatatggacaaaaggagattcttaatgccaaattcccaaggtcctttttacccctatatagactttgactatatatattccgatctgatatgtgacatgttgccgggtattattacacatggaccgcaattatatctaccataaatgtggtctgagcttaattggttgtgggcttgaggcatatatattttggcctaaattattttattttaatttatgttgtgcagaagttactttagatgcacacacaagtatacccaagggtgcaaggcaacaagcaagtgcagaaggttgacctcgaacccaagatgttcagtatcacatacataggaaaccacacgtgtaacaccaacgcagaaactcccaagagcaagacttgtgaccatcatgatgagatcttcatggattccgaagatcacaagagtcctagtttaactacctcaatgaaggaggaagaagacaatcctcatcgtcatcatggttcgtccacggagaatgacttgtcattggtgtggccagaaatggttttcgaagaagattatcatcatcaggccagttacgtcaatgggaaaacgagtacatctatcgatgttttgggt

SEQ ID NO: 149347 - DNA, 422 bp, Arabidopsis thaliana landsberg
taaagcaacaaacatctcttgatcatggttcgggccgagatcgaaaccggagctcctttccgttctgttaaagaggctgttactcttttcggcgagagaattcttctcggagataattacatcagcaagtccgtagaggttgtttatatatatatatatatatcaaatgcatatatcaatcgtaacatatgtgtatatatgaactatatattaactttcttgcaatgattttggaccgtgtgattagagaagcagttgcaaaagcattcaagatgagctggttgaagcaaaggagaatctgaagaaagctgaggaagagaacaaggtttcgtctcagctcatcgaaagccttacacaagagcttgacaccactaaagaaaagcttaatcactcactcaaaaatttcccagaacaccctcaag

SEQ ID NO: 149348 - DNA, 1666 bp, Arabidopsis thaliana landsberg
accagagaaaaaaaaaaagtagcagcaatggcgacatctgttgcgactctatcttctccaccaccagtatctctacctctcctctcatcatctcgctcttccttcttctccaattgcttcacagtcacgacccgaccaaacactcgttctctggtagcgattggacgcagaatccgacaagaaccaacgagaaagccactgacttgtaatgctttgtttggtctcggtgtgcctgagcttgctgtgattgctggcgtcgctgcgttgctttttggacctaagaaacttcctgagattggcaagagtattggcaaaaccgtcaagagctttcaacaggtttgctaaatagaaattttgttgggatctttatgaaattctttgagttctgctttgctattgtatgagttgtgtctggatttgtgaggaattgataacaagtttcaaaaaattgtgcaattctggagattcttgtggtaagaagaaatgtgattttggattagttatgtttggatttgtgtggaattgagtggttatataactttgctatatagaccatctgcttgtaaactttgctgtataggatcataactaatttgatagaatatggatgtgataatcttcttatgcccagtcatgtgaaatagcttgttgattgttgttggaattgatgtaaaaggtcaaaatgaggaaacttcatgtttcaggtgcttagtttttctatgagtttatgtttagatttgtaaggaattgataagaatactaagaaaaacttggaaactgagtggtttatataactttgctgtatgaccgtagatgaagaataaatcattcatttgcttgtaaacattaagtttcattgataactttgctgtgtattataaatcaaagcatgttatgttagctcaaacggggaaatttattcaattcatgtgaatagcttgttagttgtagttgggattgatgtaaaatgaatgtgtatactttttgtggatttgtgaggaactgataagaacaatcagaaagattagttactgagtggggacaataccttatagagtatatagatcaagaataaaacattttatttgcttgtaacagtaagttcattcatgaaatgtcgatcaagcttgttgttatgttatgttatgttaaatcaataataaaattttgctatatagtatagaccaagcatgttgttatgttaggttaatctggcaatgcaatctctattcaaaaaccgatcacagaggtagctcgtgatttgattattggagtgatattagctccgagaaaacttctggttattgttatggctctcatggttgtctgtttgttgtatgtttttctgtgttcctattatcgttttacttgtattgatgaagctttgtatggtttggtataacgcaggctgcaaaagagttcgagtctgagcttaagacagaacccgaagagtctgttgcagaatcatctcaggtagcaacgagtaacaaagaagaggagaaaaaaactgaggtttcttcaagctcaaaggagaatgtatgaagatgagagacttcagtgtttgcttttccttgtagctacaacaattttatgtcatgaagagtttagatcaaatattattgtctggaggaaacaaaatagcctttcaatgaaaagtataaattaa

SEQ ID NO: 149349 - DNA, 3618 bp, Arabidopsis thaliana landsberg
agattttgtccaaggaagatctatcagtttacgctaacgtgtatgacattattactgtactttagataagtaggaccggccaaatatgctaacgtgtaaaaaaaaaaaaaccacctggccaacacgataacgattccaagtttttttcgccgacatccgtaccggtctatcctcctccgccttccaaaatcaaggcaaaatctgtgaatatcggatacagttctggagggatcaatagtttaaaaagcgtatggattgtcagcgaaagaatctctagtgttttttttgcttttgtataatctgaggtgggttcgttgagattatctgatcaaatgatatagagagagctgtatgtttctgttctatgttgttagaattttgttcataattttcggattagcttttgaggttgatcaatgaagcagtagacatcgcataggcgacaccatagtccatgtaatttttgaaattagcaaattagatgttttatcatctgtctcaaactaccttgaggtaaagatttctcaaatacgggagatttgttataggaaaacagagatgcgcaatgaatgacatgggcaaaagtggagtggagtggaggaatataagggacacgtgacagaagcttattggagtgtttgtctagtatgacaagtgtttgttgtgatgatgcgcttgaggatatgataatttgttgaagactgaatccagtggtagtagctagctctcactagaaagggatttacagtgtaggagtatcttaatttaaaaacaactaaaaaaactctcttctggtctgtgtcattattgcgtcagtgtctcgttttttctctcgggtttactttgtgttatcgatgtggataagttgtttttacctcattatatataacctcttgagtggaactcaaattgtttgagtagaacaaacaaagttagggtttaagaagaagtctgtaaatacctaatctccatcaaatttggtacttgtagccatgatgatgattatgatgaagatgggtttgtgctgtagattcttcgatatttattttatctcttagcttttgtttctccttctctttgccttaatccattacagtatcagagtttggtgcttatgagctctgtttttccaggaccaagatttttgtccttgttgcaacagaattcgaaaaccctaattcaagctaagcaaatccatgctcaattagtcatcaatggctgccatgataattctctatttggcaaactcataggccattactgttcaaagccatcaaccgaaagcagctcaaagcttgctcatttactagtgtttcctcgatttggtcatcctgataagtttctcttcaacacattgcttaaatgtagcaaaccagaggactcgattcggatttttgccaattatgcatcaaaaagttcgttgctttatctcaatgagcgcacttttgtcttcgtccttggcgcttgtgctaggtcagcttcgtcgtcggcgttacgggttggtagaattgttcatgggatggtgaaaaagcttggctttctatatgaatctgaattgattggaaccactttactccatttctacgctaagaatggagatttacgttatgcaaggaaggtgtttgacgaaatgcctgagagaacctctgttacatggaacgcaatgataggtggatattgttcacataaggataaaggcaatcacaatgcgagaaaggctatggttttgtttaggagattctcttgctgtggtagtggagttagacctactggtacaaccatggtttgtgttctttcagccatttctcagacgggtttgctcgaaattggttctctcgttcatggttacatagaaaagctcgggttcacacccgaagttgatgtcattatcggtactgcacttgtcgacatgtactcaaaatgcggctgcttgaacaacgcattctccgtgttcgagctaatgaaagtgaaaaatgtctttacatggacttcaatggcaacggggctagctctcaacggtagaggaaacgaaacaccgaatcttctaaaccgaatggcggaatctgggatcaaaccaaacgaaataactttcactagcttgctttcggcttatcgtcatataggtcttgttgaagaaggaatcgagctgttcaagagcatgaagacaagatttggtgtcacaccggttatcgaacactatggttgcatagtagatcttcttggtaaggcagggcggatacaagaggcttatcagtttatattagctatgcctataaagcctgacgctatcttgttaagaagcctctgcaatgcctgcagcatttatggagagactgtaatgggtgaagagatcggaaaggctcttctcgagatagaacgagaggacgagaagctttcgggttctgagtgcgaagattatgtcgctttatcgaatgtgttagctcataaagggaaatgggtagaggtagagaagctgaggatcgagatgaaagaaagaagaatcaaaacaagacctggttacagttttgtttaacatagcttgttacaggtcaggattcaaaacactactcattttgcaatgaaagttttttagtttcatcaagtcattaattaacattacacaacaaataaacttgcaggtctcggttctgttaaaagctctgttatcccctgaagactctcttgtcttcttcttcttctttaagcacatgcattggattcatcacatcaagatctacacatagattaaaaatattcagatcccaatcttcttaatctatattaagaacaaagtcttcttaccgtgtagaatcttgtcaagttcgatgtctcttgatctcttcttggatttgtgctctgtatcaccaccattaacagattgattattcttccttgtaccttgagttccaacaaactctttgcctgtaatatcgattatatcatcgtcgctgtcaatgatatgaactgcatccagtggatatttggtctcgcaagccgaaacattgaagattattacacggaaactcgaattctccttgtattcgaacaagagaaagtggccttcctcgatggaatgagcctctgcaaactcactccaaccctcatggaaccaaatctcttcaccgatccgtttgagcttaatggaacgcttgaaacccgcaggagtctctaatgtaacaacctctgagagtttagacccttgtagcttcacgaatcttggcggaatcttctgctcaaagttattcaacataatgagattttcagaaacaagtaacaaaatgtcagatcttaaattctctacatttcttaagaacaaatgatcagattagtgtatcccttttagatctctagtccaagataaaacaaaagaaatggacactgtttagtgaatcttcagatatagtccctagaaattgaaacagggataacaacacacatgcaaacactttatttcaagttttttctaagtgttaagtaattaccatcatcttatccttcatcgttgaaggtaagaccaacttgaagaacttcttcaccggcgactcaggatcttgctgtgatcggcggtgagagacggaggtgactctggcaatcgtgttttgggttgtaaccattttt

SEQ ID NO: 149350 - DNA, 1280 bp, Arabidopsis thaliana landsberg
tttataatcttaactcaaaagaagatcgatcaactattatggagaacaaatcgccctccaagaaaaacaagccgccatcgtgcggatcactcgtaaccatcctcagccttgatggtggtggagtcagaggaatcatcgccggagtaatccttgcctttctcgaaaaacaacttcaggtttaatagtagaatgcaaattactagctagtagataagaagggatatatcatatataactcgccatgcgaattttatacttagtagttattaagtccctgcatcgatttatgatcacgaattcatatttgatctttactatagagtaattaaacaacatctttcttcttgtagttattttcttgaaaaattaaactttctcggtatacataggaactcgatggagaagaggcgaggcttgcggattacttcgacgtgatagctggaactagcaccggtggtcttgtgacggcgatgttgactgtaccggacgagaccggtcgacctcatttcgcggctaaagacattgtgccgttttaccttgaacattgtcccaagatatttccccagcccacgtaaagaaattctatttctctatatacacactaattacaaaaacaataataattagacacttgtatttctgtttagaatagaaaaactttatgttcacaatttcgaaaatagtaaacgttatttaaatttttttaaggaataaatcaaccagtattttggtgtctcatataattgtttgttttttcctaatgaacaattggcatataaattaaagaaattccaacgtaacaattgaaaaaacattctaatgaaaaatgcagaggcgtgcttgctctgttaccgaagcttccaaagcttctgtctggtccaaagtacagcggaaagtatctgcgaaatcttctgagtaagcttcttggagagacaagacttcaccagaccctcacaaacattgttatacctaccttcgatatcaagaaacttcaacccactattttctcctctaccaggtctctattcctaacactacacacatgtatatactaaaatctaaagttcttggttcaacctaatttacaagttgttgattagttcactttttgtttgaaggcgttgactgatcctagcttggacgtcaaggtatcggacatatgcatcggcacatcagctgctcccacttactttcctccttattacttttccaacgaagacagtcaaggcaagactaggcattttaacctcgttgatggcggggttactgctaataaagcg

SEQ ID NO: 149351 - DNA, 621 bp, Arabidopsis thaliana landsberg
tctctcttcatttcgtacttatgtgtgtgtgtgtatacgcaggtgtgggaaaaagttgcttgttactgcgtttttcggatgatactttcaccacgagtttcattactaccattgggtatgtctttctttctttgactttgtatcttgtcttgttagattgttgaaaagttcggtttaagtacgtttcatgtttttcagaatcgacttcaagataagaacagtcgaacttgatgggaagcgtatcaaattgcagatatgggacactgctggacaagaacgttttagaactataaccacaggttaaaacttctctctgctctatgtgaagtgaagatcactctttatgttttgtgtatgaatctgctgattcctctgttagatgattactcatcattctaagtctatttgtttactttctttcttgttaataaagttcagatgacatttctttgtaactcttttggtccatttttctttgcagcatattacagaggagcgatgggtatattactcgtctatgatgtaacagatgagtcatcattcaacagtaggtcttctggcttttctttgtaccaggaactatattcttactagaacttaaaagtcatctttgatatactt

SEQ ID NO: 149352 - DNA, 3492 bp, Arabidopsis thaliana landsberg
caaaaaaaaagaacaaaaaaaaagaagaagagaaaaatcataaatcttgtcaaaagtaccggagcctgactggacgaagcgacaaacaatggaggacggcgagatagaggaaggaatggtaactgccgacgaattcccggagccggaagtaacaaccacagagactatacaacctccccgagagccaggaaaatctccactcgagctacttcgagagagcaaaacctccgtagaagaaatcgtcgcgaagatgctctccatgaaaaaacaaggaaatcacaaatctgagattcgagaactcctcacacaaatgttcctcaacttcgtcaatcttcgtcaggtacataccaatcttctccgaatctctccacctctttcgggacacgatgctaattagggttttttcgcaggcgaatcgggcgattttgcctgaggaagataaagtgaaagcggagacggaaagagcaaaggcacctgttgatttcgcgacattgcaattgcataatcttatgtatgagaagagccattacgttaaagctatcaaggcttgtagagatttcaaatctaagtatcctgatattgaccttgttcctgaacaagacttctttcttcatgctcctgaagctatcaaagatcaatcgctttcaagtgatagttctcatgttttgatgcctaagagactcaattttgagcttcatcaggttggttaaccaccaccatctctcaaattcatttaaggtgatataatgtttcattacctttatatgttttttgattcagaggaaagaattgtgtaagcatcgagcgagattagaggaacagaagaagagtttgttagaaaccattgcagagcgtaagaagtttttgtcgagtcttcctctacaccttaagtctctgaagaaagcatcgcttccagtacagaaccagttgggtatacagcacacaaagaaactgaagcagcataatttagctgagctgcttcctcctccgctttatgttatatactcacagctcttggcacaaaaggaagcttttgaggagagtattgaattggaggtagttgggagtcttaaggatgctcaagcttatgctagacaacaatccagaaaggactcaggtaagttgttttgaaaattcactgtgttgtctaattctgaaatgaaaagaatgctaatttggtattggtttttcaggtatgtcgagtaatacagagagttctaggttggaggatgatggacctgatgacgatgatgatggacaaaggagaagaaaacgacccaagaaacttactagcaaagaaggttctgacaaggcaggattatatcaagtccaccctctcaaaattgtccttcacatgtttgatgatgagataccagatacaaaacccttgaaacttgtcattctcaagtttgagcacttgctgaagttgaatgttgtatgtgttggcgctgaaggctctcaggatggaccagaaaaaaacatattttgtaacttgtttccagatgacgctggacttgagcctcctcatcaggtaactttttgtttctgtgtttcagttttcttctacatgtgacttttgatgactttacttttaaaaatgcatactcaattctctttatatggccggttttccatgcagtcaaccaagctcatccttggtgatggtcagacatttgatgagaacagaacttcaaggccttataaatgggtacaacatttggcgggaattgatattttaccagaagtgtcaccggttttattaggccaagaagctcataacactgacccagctaaaagtgatacgtttgtgcctgatctttctttgtatcgccagcagcatagagtgcaaacagttctgcgaagaatacgcttgcggaaaaaagcgcatctggctcttgcgtgagttcaccactctgtatgttttccgtcttaattaaagaacacgatgcaaagaattccagaaaattagttgaccaccatgataatcagcatatggtttgtacatttaatagtttgggtttgtcagtaacctggcggtcaatttaatccctctgtagcattgtcagcttcgtgataagagcttctataggtaattatttctgttgatatgtttatttttgctgaatactttggaaactcttactggctacagggaacagcttgatttgcttatgaaacatgagttaccagtggtgaactgcgaagatgctccttgggcattgcataaggttctctgtgctttggattcctggttacatatacaatcttcagctagtaagtcatgctctctgactctgaacagtgtggaacaagttccagaacctatggaaatcgatgtagatggaagatctatttctggaaaagaagatcttgaaagtatacgggaagatggagaacttccctctttggtcacggcggctgcttcgttaaccagttccaatcataccccatcgaaagtatctaatcaagcacggtcaaggcagttggccttgatgacaaagaatctagattctccgattagcaaaggaaagtccccaagtttcaagaaatacgaagatgatttggatcttgttctggacgatgatagtgaaatagatgagccaaccggaagaactgaggcgcatgtggaagagttatgccctgcgaaagctgataattcatgggtggattatggttcgagagagtttgcgcttgcgttctccaggaaaacagatgccggaaagttgtggaagttagaagcaatggtaacttctaaaaaactatcttctaatacggtatcttccctatatctttttctttcttaagtgttaaatcgagttgtattggcaggtacaaattagcatggagtatcctcttcgacctcctttgttttctctgtctctccacgcttcttcttcatcagggaatgacaatgggacaaatgaaagtgaccattacaatgaacttcgagcaatggaagcagaagtaagtgttaagcccagtaacataaactaatctttactcgatgacaccaaagataacacctttgtaaccttttcgtggcggtatcaggtgaaccttcatatgttgaagattattccttcagatcaagaaaactatctcctatctcatcaaatcagatgcttagcaatgttgttcgactattacgtggatgacccatctccagattccaaaagaggaacagccacaactgtggtcgatgtcggtttgtgcaagcctgttgacggtaagcttcttgtgagatcattcagaggcagagatcaccggaaaatgatctcatggaagggcagaggatgtgcatcgggttatccatgctagagattacatcggcactcacttctttatattatctttctctggtggtacaagcaaaagtttttgcatgtaacattttttttatcgtataaaccgttattgaaacagcctacttgttgggtgaggacctggtctgttttaaacctggcatgtttcaagtccaatccgttttagcct

SEQ ID NO: 149353 - DNA, 1453 bp, Arabidopsis thaliana landsberg
ttttcatgctaactgatctaattacttgttacagatttttatttgcggggactattttcaagacgaaagtggggctagagaatttggcaaaatatctcttacaacaaagtggataaagactactgacacttcattgatgttacggaatcttgaggttaactacaaggaggtaagaatcttgtatcagttttcttctgtttatttttaccagatcaagttatttcttcgagggttaagcatgtttcaattattgatattgtgttttacagacagaggatcagcccatgtccgttttgcatattcagtatccagaatggcctgatcatggagttcccaaggatacagtggctgtccgtgaaattctaaaaagactatatcaagtaccacctagtctcggcccaatcattgtgcactgcaggtacgatgcatgtcaatgagggatacaagtgttgttcaacgtctcctgagagaattgtttttttctctctcagtgcaggtataggaagaactggaacatactgtgcgatacataacacaatccaaagaattcttgctggcgatatgtctgcgttggatcttgctaaaaccgtggcactatttcgcaagcaacgcattggcatggttcaaaccatggtaaatctttcagcgttacaatttttagctaccaaatttctgtatctcaccacataatttgttctgaattgttcaattccttactcttttttgaaggatcaatacttcttttgctacaatgctattgttgatgaattagaagatctaaccgcggggacaaatgctggaacgagttcctaaaggtacgcaatttcaacaatcaaatctgagtgagccatacctgttataatctatgaatactcttatcttgtctatcttttgatccagctgaagggttcgtctgcttagagagggaaaaaggcttctacccaactatatcaatttcgtaatgtgattcaagaagaaacccgcgtgaatctctacattcaagatttttcaatttctgtaaatttccatatctgataggtttcattgttacttttgttgtggaaatgctgattaaaaagcaaatgaagtcgccaatgcgagattcttcaaagactatgaattcggtttgatttggtttgaagtgtaaaagaaccgaagattaatttaatggtttagacttaaccgagtttctttcgaaaataaataaatcagaagcggttaaaattggcgtaaaatgtcccgagtcatcgttgctcgcgggaaatctagctagtgtcggcgcgtgtctggcacgcgcagtaaagttaagctataaactcccaaatcgagacgcgagtctttcgcctttggcttctggatcctcgtgatgatgatgatggagaattcgaaatcaaagtaagcaatcatcgtcacttcttcgaatacccctactcaaatcgagaatcacccagag

SEQ ID NO: 149354 - DNA, 2208 bp, Arabidopsis thaliana landsberg
gaaggttcgaatcacgatcgtggtttatatgctcgatgttttgaggaactcttcgacctagtcaattcggattcaacttcgacatcacgattcagtttctctctttcagtgtttgagatctataatgaacaggtgcttccaatcgagtttacgtactaatacttttgggtttcattttctttgccaagatagttctgcagtggaatttgacacttctaatttgacaaccttcattgtcagatcagggatctactttcggaaactcagagcaacttgcccaatatcaacatggatttacatgaatcggttatagaactcggacaggaaaaagttgataatccattggagttcttaggagtcttaaaatctgcatttctgaaccggggcaactataaatcaaaatttaatgtgacacatctgtatgttttatattgtgcttgaatacctccttcggttacatgcatataattatctgctaaggaccaagattctttagcacttctttacggatgttttctgccttggtaggattgtcacaatacacatatactatagcaacacgattactggagaaaacatatatagcaagctctctctggttgacttggctggaagtgaaggtttaatcatggaaaatgatagtggagaccacgtcactgatctgctgcatgtcatgaattcgatttcagcgtatgttaaattcttatatctctgtatttatccatgaatttgttcttgttaactttgtttatgcatatatttctggttctataggttgggagatgttttatcctcgttgacatccggaaaggattcaattccttatgataattcaattcttacaagagtacttgcagattccctaggtaaaatttgatatctcagtacatgcatctttcctcttttgcgtcacccttaatattatcatcttttgtttttgtttttgtttttgttttgccaccatttcttaaagctctttgtaagtgagatacaatattctgtaatgtgtaggaggaagttccaaaacattgatgatcgttaacatctgtccaagtgtgcaaaacttgtctgagacaatctcatgtctcaattatgctgctagagctcggaatactgtaccaagccttggcaatcgagatacaatcaagaaatggagagatgtggtaagtggaagtgaaagagatttttccttctcggatattcattttgttacaaaatttgctgcataggtaaccttttgtcctgcaggcaagtgatgctcggaaggagctgttggagaaggagagagaaaatcagaatctgaaacaagaggttgtgggcttaaaaaaagctcttaaagatgcaaatgaccagtgtgtattactctacagtgaagtgcagagagcgtggaaagtttcatttacattgcaatcagatttaaaggtcataaagcttcaccagggttcttgtttagcttgtcaacaattctttataacttttttgttgttgctcattatccgttttgtacttcatgcagtcagagaatattatgcttgtagacaaacatagactagagaaggagcagaattctcagttaaggaatcaaatagctcaatttttacagttggatcaggaacagaagctgcaaatgcaacaacaagattccgccattcaaaatctccaggtttgtgccccatgagtgttagtatctacgctttaaagttttagatctatgttaaggcaactgatttttgaaattgttgacttctctgtacatgatagacatataattaccctgttgttcaattcaaattaatgcaggctaaaattacagacttggaatcacaagtaagtgaagccgttagatctgacacaacaagaacaggagatgccttgcaatctcaggacatattttctccaataccaaaagcggttgagggtacaactgattcttcttctgttaccaagaaacttgaggaagaattgaaaaaacgtgatgcactgattgaggttctcctccctcttactctgattagagttcgtgccctctggctgaaccatggatatttgcactagtacatttatctgaagagaattatgttttccgcagaggttgcatgaagaaaacgaaaagttgtttgacagattaacagaaaggtcaatggctgtttcgacccaggtcattattttctcttgtatagctatgctatattaagcatttcaatatca

SEQ ID NO: 149355 - DNA, 1864 bp, Arabidopsis thaliana landsberg
caagagggatgaatatcacctttcctgtttttcttccgaaagcagctgaaggacataatgggaatgggttagccagtagcttggctcctcggaagagaagaaaaaaatggtcagctgaggaggatgaggagctgattgctgctgtgaagcgacatggtgaaggcagctgggcccttatctctaaggaagaatttgaaggagagcgaacagcctcacaactctcacaggttttaatttcattgggctgatattgtttcgtcattttcctcatacctttagattttcttcaattatattgtgcatcatctcgactcagcatgcttaagcgtttgtacgaagtttatgcattctctttttattattgctctgtgtcatatgcatggtctcgttaatcatcacgcagatagctatttcgtagttacaggaatatagtaaaggaatttgagattcaaaggaagtggatttctaattgctttagaaaagaaaaaaaacaagtatgatctaggatttggagtgtatagcaactaggcatgaggggtgatggtttgctctgttgttaatattgcagtgccttccttatatttttcagttagtgccttgttcttggcattactacctgctttacaccattatctgagtgtttacttagaccctctgaaacataatttcatgagctccttatgctcttaggcttttacaccatatatgtcacactttgtctagatgcaactaggtggcattatcacactcttctttatcgaatgatatcaacagaattgtggtcattgctttagaaatatatccgttgtcatctagtttggtcttgatgtgggtttccccccattgttcccgggttcaaatcccggcaacggatctctaaatgttatgattaataatctcgtagaaaacgtagattttagctgctgttggcaataatctctctgtccaccatttttgtggatattttttcgtcacctatttctgatgtttccaggtatacttcttagtaagtagtgttaagaaagatatctggggacaacattgtatgggcatctgtgatgctgtttatttagcatacatctgtaatctggctgaatttacttatttgcagcggtggggggctataaggagaaggactgatacttcaaacacttctacccaaactggcctacagcgaacagaagcacaaatggcagctaatcgtgcattatctttagcggtgggaaatcggttaccctcaaaaaaacttgcagtaggtacgagtaacagaagattcttccagcttattgtactatttaggtagttcttctaggctatgttatacttgtttagattgttttttcttgcaaagttgatattggttagtctctatacttatctcaatcagatttgtcaatttgactgtttgtaggtatgactccaatgctgtcatccggtaccatcaagggagcacaagccaatggtgccagcagtggtagtacattgcaaggtcaacaacagcctcagccacaaattcaagcattatcacgggcaacaacatcagtgccagttgcaaaatctcgagttcctgtaaagaaaacaacagggaactccacttcgagagcagacctaatggtaactgctaattcagtagctgctgcagcctgtatgtctggcctggcaaccgctgtaacagtgcctaagattgaaccaggaaagaatgctgtttctgcgttggtgccgaagactgaacccgtaaaaactgcttccacagtttctatgcctcgtccttcaggtatatcatcagcactgaatactgagcctgtaaaaaccaaagtggcagcctctttgcctcgttcatcaggtattatttcagcaccaaagg

SEQ ID NO: 149356 - DNA, 2894 bp, Arabidopsis thaliana landsberg
cgcatttaaatttgtttctctgcttcactcttttgatttctttctacttctttttttcacacagatcttaagatactacaactgcgaccatggagcttccatctccttacagctcaagaaaggaggaatcaactgttcctccgaagagaggccgagtcaagatcatgatctttcgtgatctagtcagatcggaaacctcgatggcaccgcctccgaggagaggccgaatcaagaaaatgatcgcgggtgatctagtcggatcagggaaacagaacaactacgacggagacggtaagagaggaggctagttaagcagactctccgactacatacactttatctccatgccagcttccagacaatccctttctctgagaagatgatcggattttcatattcatttgaaaatcttgtatgaaatgtaatatagttgttggctttggcttcttctttcgaatatgttatacaaaaagtttattatttttgttggggtaaattaaagatttaaaggtaagttactctgtttcatacaaagtttgggcctctgggctaatgtttttgtatctttgtaaaaatgtaaatattatgtttctttagaagtttatttttgtatctttgtagtaaattgtatctttgtgaaaatgtaaatctacttaacattttgatgaactcaacaaaaaaaatctgattttaattgagggatgaaattgtagttactcaaaatttgaggataaatgtcgtaataaataaacatagatggctaaatctgtaattaacctttttagaaagagggtttattgtataattttttctcccaaatcttttttttttccgccgccgtgaaaaaatgaatcatcttctaatcttagcgagaaactcgctgcggcggcggaattttaatctccgaccaccgtctcgttccttcaatagcaccatcttaccgcaatcgaatcggtgagctctcatctcctgtataggcgttccttccttttcctcggtaatggcctctcctcctgattgtgaccccaaacaaaacaaacgtatcacaggtgtcttttggcatagcattcgatatcgatggagttattcttcttggttcctctcccgttggtggctctcctagcgctctccgacgtctctacgatgattccggtatgcaatcattgatttctagaacctgcttaattaggttgtcaacaatgtacattgttatagattgactctaggccaagtactggtttaggtttaatttgtaatctttccagtgtatgatgagttttgaggttgcttttgcaggtgctttgaagatacctttcttattcttgactaatggtgagtctttgttatgagtcttaaaataggtcaaatgagtgaattatatagttaacatcactttttgtcattggttatggcaggaggtggcttgcctgaatctaaacgggcttctgagatgagtcatttattaggtgttcaagtttctccattgcaggttgaaaccttgtcacatcatttcctttgtattttgtttctgtagagtgtggatgttacagtagtcgccaaagttaagttttagtaactgtaactcttttgatgtaatctctttgacattttgttcatgtctcaggtgatacaagcacattcaccctttcggaagctagtaaataggtaagttataaaatcacatagtgcacaagaaagaccttgcaaacaattttataagatattctattccttggtttggtcagaaagatgtttagtgatttgcttggaccaggtttgaaaatgagcttgttgttgcagctggaaaaggggaacctgccgcggtgatgtctaattatggtttcaagtaagcttagggctcttttcttgaattttctgattttcgttagtttctgcttcaaacttctgttcaggtgatttatacatgtacatttatttttcagaaacgtcatttcaatggacgaatatgcctcttactttgacaacattgatcccttggcgccatataagaaattgatgttcaggcaggatggtcacaaggagcttagatcaagagaagatgttctatcccaaagagttcaggcagcatttatagttagtgatccagttgattggagccgagacatccaggtttctcctgcttcacatatctttattttcagatgtgatacttatctgataaaatcctttaagcacacatgacacatcgtaataaataaggcaaagtggactttcgtatttctatatcactggcttcacgattatgtggaaaaaaaacaaaagaaaacacattttaaatggtctttggctgtagatcctcatagtttttgttgggggcagcagagcttggttaacattttttgctactaactcacggtgaatgaatactgattgatacttttggtcaggttctttgtgacattttacgaactggaggacttcctgggaaagaaattggacctcaacctcatttgtacattgccaatgacgatttagactaccaggttctggtgaatccgttgttatttctccattcttttgatttactttatggtatactgatgcattgtcaactaaattcagactgagtttcctactgaacgtcttggcatgggagcttttagaatcgcgttagaatcaatcttcaacaggtaataaccaaattcaaagcacacacattccatatgttcacattttttcctcatttgttcaattcagttttgcatgattgagtttgaatacatacttgcagaattcatgaaaaacctctagagtacacatcatttggcaaaccaaatccatttgtgttcaaaaacgcagaagatgttctgaaagaaatcgctacatccccttattcttcaaaccaaggaagtcaccacttcaagacactatat

SEQ ID NO: 149357 - DNA, 1622 bp, Arabidopsis thaliana landsberg
tttctctgttttttttcgttgggtggttcctcagtggttaccaaatctctcttcttcttcttcgtagaagctaaaacctttcaaaaccctaatttcatctatctatctcaataagtctagatcaaaaattcgaatttcaaaatcccgttttgagttttagtagattcggtttctgggttttcgtagaaacgggattaagggcggattcagatcttgaaatttttgtgtgtttctcaaactgattataaattttgttttttttttattaaatttcgtgtttgaaaaatagggaaaatttctgggtttcttctgagaaattcgaattttttggagatgggagaaggtgaagaaggagacaaattcccgccaaaaacggatgaggttacacaagagtctatgaagtcggcgaggcaactcgattttactggtggttcttccgatgttgagcattcacactctaatcaagcttcttcgatggctgctgcatcaatcccttcaccggttgtgacggttacgcggccaataattaccagtcaggcaccaccgacggtggcgactccgattccaccgccgccacaatctcagggcatcatccttcacgtcccaattagacatccgtaagtttctctcttattcaaaaatttgaacttttgggaagttgatagagatgtgtttctatgttgctgaagtcagatttggggattaaagcatagatctttacattgatttgaaaagattattgaaattgacattttgattttcatagtgaataaggcaaggtttgaatttctagagttgacacttgtttttgtaattgcaggaggcccgaatctccgaattcgatgccaaggcctgctggggaaactagagatggaacccctcagaagaagaaacagtgtaactgtaaacactcacggtgcttgaagctgtaagtctctcatcataccatttgatgacaaaactctttgtttctttgtggacttgttcattgtgaattgaacactgtacaatgtctttttttgatcaggtattgtgaatgttttgcatctggcacttactgtgatggttgcaactgtgtaaattgtttcaacaacgttgaaaatgaacctgcgagacgacaagcggttgaatcaactctggaacggaatccgaatgcttcaggccaaagattgatgatagtccccatggtgaacgaaataacagggtatgtggtttgtgttatgctctttaaactgttggtctaaaggttgttggataagttataaattttgactcgatttgcagcaggaggttggtgacgttgtcatgttagcgagacacaacaaaggctgtcgctgcaagaaatccggatgtcttaagaagtattgtgagtgctttcaagcaaacattctttgttctgagacctgcaaatgcttggattgcaaaaactttgaagggagtgaagttagacaatctctttttcacggtgaacattcccacaacttggcttatcttcaacacgcaaatgctgccataaccgaaactattggttcctctggctttgcatctgcaaaaccaactaagagaaggaaaggtcaggagattttcttcaaccaaggagccggagattcaaccaatcatag

SEQ ID NO: 149358 - DNA, 922 bp, Arabidopsis thaliana landsberg
tcgcagtggcgctgtctccgccgagaggctgattcgtgtagccaccagatcaggcgtggatcggttagttcattctcattctcgagcttttcgacggaaagtgcgatctctaaaacaaccgccgacgagaatcttgttagcgttatcgaatctgaaatcgaatgcgccgtcgcagaggaggctcctcatgacactgacttcgtaagttctctctttcaatatacatgattcttctcgaattcatgagatttgaatatttctggggtttagaacaattgtatctgaattagaaatgttttggaaaaacagttggaagataagccagaagggtttccatttgaaatcattgataattcaggggagagaactgtgttgctgacaaggaaatttgaggatgaaaccatccaagtggaagttgactctgttgcttcttatgatgatgaagatgaagaagaggaagcagaaccaaacaatgaagaagacgatgaagatcaagagagctcgggtaaagtccgggttccgatggttgttagtgtgcagaaaggtgatggtgtgtgtcttgagtttggagtcagcgcatacccggatgagattgtgattgatagtttatcgatcaaacaaccgcaaggatctgataatgaccttgcttacgaaggacctgactttgagtaagtttacttcaatgatagtgagttcttgtttggaatatatgagattggggtattgttatgtgattgaatttggttattgtgttatgtgcagtgacttggatgagaatttgcagaaggctttccacaggtacttggagatcagaggtattaaaccaagcttcactacctttctggcagattatgtggccaacaaagatagcagagagtatcttcaatggctcaaggatctcaagtcttttgtcgagaagtga

SEQ ID NO: 149359 - DNA, 718 bp, Arabidopsis thaliana landsberg; identical to SEQ ID NO: 8768

SEQ ID NO: 149360 - DNA, 1196 bp, Arabidopsis thaliana landsberg
  unsure (1)..(1196): unsure at all n locations
ccaaactgttgtgtttaaaacttaaaccgatctatcaagcaagtggttcctctctctctctacctctcgtttttggcnnnnnnnnnnnnnnnnnnnnnnnacgacgattcagttcttgagttccggcgattatcggtctctcacttctggttccgttgaacccctcatttctcttctcgcccgtgctctcaaattccgatatttgcccctgtgattcgaaaccctaatttcgcctatcaatctggaaaatctctcaattcgaagactttagcagcgcaaagatactctatccgggtaataagatcgaagaaaccatcaatttcttaccaaagtcgtgattcttggatctcgtctttgtttgatggacacaattagggtttccaaggaggttcctggatcttcgaaatcgaccgcacagtcgctcacggagtcgacctctcgcacggaaaccatcaatggctcccacgaattcaagatcagcggctactctttggtcaaaggcatggggattggcaaatacgttgcctcggatactttcatggtcggtggatactcctgggccatctacttctacccagatggaaagagtccagaggataattctgtctacgtgtctctcttcatagcccttgcgagtgaaggagccgatgttagggctttgtttgagcttaccctcgtggatcagagcggtaacgaaaggcacaaagttcatagccattttggtagaactctcgaaagcggaccctatactcttaaatatcgagggagtatgtggtgagtaaattattatccttctcttggaaaaaaattacagctttgagtgaatttaagaaatgctattgcctagtctctgccttgtactgatgagtatagataatgtgacatgtttttggtttctataatgtttaatttgttgatgattgcttaatttttaggggatacaaacgatttttcaagaggtctcttttggagtcatcggactatctgaaggacaatggtctcttggtccggtgttgtgttggagtggtgaagtcacgcacagaaggaccgaggtgttacaatatcccggtgccggtttctggcttgggtcagcagtttggaaagcttttggaaagtgggaaaggagcttacgttactttcgaagttgatggagaaacatttcctgctcacaaattggttcttgcagcacgttctgc

SEQ ID NO: 149361 - DNA, 347 bp, Arabidopsis thaliana landsberg
gacggggttacggattctctctcagtaccgccggacctgtcttcttcgcgtctctccgggatcgtcctccgggatacttgaacacgccgctgacggttgttgcggtggggataaagaagtggctagacatttacagtggggtattgatggttagggttttgctgagttggttccctaatatcccttgggaaagacagcctttgtctgccatcagagatctctgtgatccttacttgaatctcttcagaaacatcattcctcctatcttcgatacgcttgatgttagtccattgcttgctttcgcggttcttggtacacttggatcgattgttcatggcagcactggg

SEQ ID NO: 149362 - DNA, 626 bp, Arabidopsis thaliana landsberg
atcatcatcgagcttacaagacaaattcaccgtggagacgacgaagcgagtggttcttgtgagacatggacagagcacgtggaacgaagaagggaggattcaaggaagctccgatttctccgttttgacgaaagaaaggcgagtctcaggctgaaatttctcgtcagatgcttatcgacgactccttcgatgtctgcttcaccaggtcctgcattttcttattatatctattgaatcggtatttgaaatctagtcacttggatttggattttacatcgaattgatgaaattgactatgaagaatcagagatacagattatgatagtaatcactgcaatttttttgttcttgttctttgtgatggagatttttgttgttaaagcctttttgtaaatttggctgcatttgttgttgttatacattgtgatcatcagtccattgaagagatcaaagaaaacagctgaaatcatatggggaagtagagaaagtgagatgattttcgattacgatctcagagaaatcgatctctactcttttcaagtaagtgcagctgtgatagggagatatagattcacatagaactaatatcgtagatgaacttaactcttgttctagttgatggttat

SEQ ID NO: 149363 - DNA, 3316 bp, Arabidopsis thaliana landsberg
  unsure (1)..(3316): unsure at all n locations
atgcatgcaagttcaaaacataacctgaaaggtaggaatagtgagcggctcgaagcaaaccggacagtcaagaacatcaagatccaacaacttagccgatcgtgtttcattctccatacgttgcttcttttgcgggtgagagctttttctttttgatgtttgattttgcgggtgagagttgctatcctccatatcgataaggttaacttgaaatggaatcggaattggagagatggctacaccgtaattatggtttttgtttccattagttaacgcattaattcaggctccgatttccgatgtttaaagaaaaagttgcatgcatgacttgggatggaatttgagtggatgcagcaagtaacacttgtttaacgtctctttcactgttttgccatgtgtcacttaacgtacaacacttgtcctcagatgatccattagcagtagtaaatgatttactgactcatctaccaataccaacataccattatcttaccattatcatttatctattgatctctgtatccccacgaaaacactatgtaatgtgatagtcaatcataacagcttaatcacacttaaataaagtaaattatcttttttctttttcttttctttttatgggataattttattcgtttccgaagaaagaaaagagagcaccattcaaacaacaataatctttttgaacggatgatctaatagtctacaagaagactaattttatttaaacaatcgaacctaacatgactctaattagagatatagagaattatatacgtaaaaaattcaagttggttaaagttacatggcttttgaaatttaaatttacaaattgaacattgaggaacatatcaaagaaataagaatgatagtgaaaaatgttgacaaaaaaaaaagaatgatagtgaaaaatattcaatacataatttttaaaaagaaaagtatattatatacttgtcaaagatctaaactaagtttgacgtttggattataattgttacagcatataacatgtactttataaaaaaaaaaaaagagaagaagaaaaaaaaaaacatgtaacatgttttatttttgaaaaagacagcatacaacatgttagtcaaaacatattcaatttaagatattcatatcaaaaattcataatacgaacgaataccataaactttttcttttttattttgtaagagagaaatccttaaccattaatcccttgtaatgcatatttctaataataattatatttgacaaactatataattgatgatacagattctgctgtttaatactctaaagaaatcaaatagaaaatgggaacatagtaagactggattatttaccacttacaagttgtcgttaccttaataaaaaggtccttgttactaaatgctcagcgaaatctttaaaaaatgtcaaaaatctgttgggtaccattcaaatccagattcctttcttatcatcatctctctctctcacactgtttatctgattcgtcttctctgataatcaagagtagtagtgcggttctctggaaaatattcgatttttaaaagactctgatgatgacattaaactcactatctccagctgaatccaaagctatttctttcttggatacctccaggttcaatccaatccctaaactctcaggtgtcttcttcttcctctcttcttatctcctccttgctcaactctctttttcattaaagttgcaaactttctttagttgtcttaggctcttgtgaatttctccacctgggtaatctgttaatttcttcttttcgattttttttggtttgctttaggtcgtaaagtttaaaattttaaatctttggagtgtgtcacaggtgggtttagtttgaggaggagggatcaagggagaggttttggaaaaggtgttaagtgttcagtgaaagtgcagcagcaacaacaacctcctccagcatggcctgggagagctgttcctgaggcgcctcgtcaatcttgggatggaccaaaacccatctctatcgttggatctactggttccatcggcactcaggttttatttctgtttttttgttccatgaagttagattaaggcattattgtgcagttcttgagtaggaccagacntataatttgtcttatgaatgactagactcatagaagaatggtatttttttcttactgagttattgttgcatcatttttattgatgagaacttccattttgcagacattggatattgtggctgagaatcctgacaaatttagagttgtggctctagctgctggttcgaatgttactctacttgctgatcaggtaaaattggtttatagtgtttagtacctccaatttgtcattcagaccacttggaattcaatttaattctcaattcagtgctagtatcataagcaagatattataacactatttattctaaaaaaattagtattgagtctcttcaatttgtcattcagaccacttggaattcagtttaattctcagttcagtggtagtatcataagcaagatagtattaactagttatgtatcagatcaaaccagagaaatcaggttctggtttaggcttttccttctgcgatctcaagaaatctctatagtatggttctgtgactctattttgaatgctggcaggtaaggagatttaagcctgcgttggttgctgttagaaacgagtcactgattaatgagcttaaagaggctttagctgatttggactataaacccgagattattccaggagagctaggagtgattgaggttagttcatttgttagttttgattgcagtgtagatattcacaaaatttctatcctcatagggtatttacttattatgtttcatcaacaggttgcccgacatcctgaagctgtaaccgttgttaccggaatagtaggttgtgcgggactgaaggtatacactcttattttttgttattaaaccttgttaagagaatatgaaaaaagaaagttgcagatgataaagcttgttgcttatttttactgcagcctacggttgctgcaattgaagcaggaaaggacattgctcttgcaaacaaagagacattaatcgcaggtggtcctttcgtgcttccgcttgccaacaaacataatgtaaagattcttccggcagattcagaacattctgccatatttcaggtatcataaatcacagaatttaagtatctcaacttcatattgagttaagcgttggtcttaaagcaagttctacctctggcaatttgagtgaaaaaatcgtcctttatgttctctagtgtattcaaggtttgcctgaaggcgctgtgcgccgt

SEQ ID NO: 149364 - DNA, 1730 bp, Arabidopsis thaliana landsberg
aagaaagagagggaagaaactatggaaagaaaaatgtacaaatcaacggtgttcccaatttgctgtctgttgtttgccttgttcgatcgcggtaatgctctctatggatcttcgtcgcctgtgcttcaactcactccttctaatttcaagtctaaggtatgtccgtgaccgtgatttatatgatcttctctttattcgtttagcagtgtatagcttcggcttaagtgttatatataattttaattacgtatgtagtgatacgtaatgagttaatttcgtttaatgttctccttggaaatggttggcaggttcttaattcaaatggagttgttttggtagagttctttgcaccatggtgtggtcattgcaaagctctaacacctacatgggagaaagtggctaatattctgaaaggagttgctactgtggctgcaattgatgcagatgctcatcagtctgccgcgcaggtttgtgatgttgataccagtcagctaaagtttcaatttttccatgtagccgttgcttgtgaatcatacaagaaaaaaaaaaacttttttactcactataatgcacaaagctcaggctcaggtttgtgatactgatgatgtactctcttgttcaggattatggtattaaaggtttcccaacaattaaggtttttgttcctggaaaggctccaatcgattaccaaggagcaagagatgccaaatccattgctaattttgcttataagcaggtttttcatatgctactacttgattcttcattacactcttttttactgtcaagaaatttctcatcctgtgacatgatcgggtgtatttaaagccccagtcaagatgttcttgctacaacaaacgacctttaccttgttatttcttttggccagataagcagataacatgttctgatagatatgccatagttatgtagaagaagttttatactttttataccttcttgaagctaagtactacaaacatacgttgtggaatcacactaattgtccatcaaacaaaatatactacttagatacgttgtggaatcacactaattgtccatcaaccaaaatatagctagtttagtaaaatttgaatatgaattgaagaaccacaaatggccatcttaagttgcactgcagatataacattctccatcaaacaaacttgtgtacctgcattcagataaacttattgctatttgcttgcattggcagatcaagggtcttttgagtgaccgtttggaaggcaaaagtaaaccaactggaggaggatctaaagaaaagaaatctgaacctagtgcatctgtggaactgaacgctagcaattttgatgatttggtcatcgaaagcaatgaactttggatcgttgagttttttgcaccttggtaagttgtccttatagagccaatgaactggtcatgcctttgaacttcttcggtacatctgaaggtgtaaaatatctttctttttttcctttcttcttaaaggtgtggacattgcaaaaagcttgccccggagtggaagagggctgcaaaaaatttgcagggaaaggtgaaattaggtcatgtcaattgtgatgttgagcaggtaatcactagaaatccttacattttattaacttggcttcagagataatttctatggactcctcccgtctcagcgttatactgatttcttagaaaatttaccatatttacagtctttacgcgtttttatctttgaatcatga

SEQ ID NO: 149365 - DNA, 1545 bp, Arabidopsis thaliana landsberg
ctacttataaagtccaaatcttgaagtgcgtgcacggtgcaccacgaatccacgatccagtgagcagcagcaactccatctccggagctctagattcagataagaacaatggcgattccgatgcctactcgccagctattcatcgacggcgaatggagagaacccatcttgaagaagcgaatcccgatcgttaatccagctactgaagaggtcattggtaagcgcttttctcaaaatccgccacagctcgattagatccaagtaaaaatgtatacttttgtttacttcttagttcgatgtggagatattacttgctcctaactctattcatgactatcttttgctgtatcgactactttctttccatgaattttagttgaagttgatccaaggatttgtatgtgttggatgagataggtgatattcctgcagctacaacggaggacgtggatgttgctgtcaacgctgctcgaagagcattatcaaggaataaagggaaagattgggccaaagcacctggagctgttcgtgctaagtatttacgtgctattgctgctaaggtattcattttatgtttgtgattgtgatgctgtgttgacaaagcctcagttttgtttgggcttttgtgtaatcagttttagtcttctgttatctgatgtgtaggtacatgttagatagacggatctggcacagctcgtggcgcttgattgtggtaaccattggatgaagcagtatgggatatggtactgttgcttccattttgtatctgtgaaatgtagggttttctttgtaggtgtgatcttaaatgtggatgtttgatctttggcaggatgatgttgctggatgttttgaatattatgctgacctagctgaaggcttggatgcaaagcagaagactcctctttctcttccgatggatacttttaagggttatattctcaaggaacccattggcgtagttggcatgattactccatggtactatatttcattgacagatttgaatctaaccgatccctcagatcgttgtgtattatcctttgtcaagttcgcggatttaaattttacatattcagatcacattggtcttcaagtgttctatcttcctttttagacaaaccgtatgttattaggcagctaataatctatatttgcattcaaggaactatccgttattgatggctgtctggaaagtcgctccttcacttgctgctgggtgcacggctatactgaaaccttcagagttggcctccctgtgagtttttgatttctgttgacatcatagctagccacttcaactattagttcattaactcgccaatctgatgctgttttattccaggacatgtttggagctcgctgatatttgccgcgaggtgggtctaccacctggtgttcttaatattctgactggtttaggaactgaagcaggtgctccactggcatcgcatccacatgttgacaaggtctgatcacttgtataccactaccagtgtcctgaaagtcaaacacttatagatagagcacttatttcctttttatggt

SEQ ID NO: 149366 - DNA, 1545 bp, Arabidopsis thaliana landsberg
  unsure (1)..(1545): unsure at all n locations
tctgaacaaagccgctgagattttatcggatctggtgaacagcggtgatgatccgtcgacgagttcggtggcgagtggttcttcgggtcaggaaacagcgtctacctctgagtatggggcagggtcaagttctagctgtagcgaagatttgactagagatagatggtttaagggaagcaagcagagtagagttattgctgctacagggatggtttcttctgtgattgcgaaggannnnnnnnnnnnnnnnnnnnnnnnnnaagagtttcctatgatggaacggtctaaagagctctgtgggaacgggaaaaaagctgcggatagagagaaagctgaacagttcttaagttcaatgcttggagatgattgcgagcttagcatggctgttgttagagatgttttgtgtgagtatttcttcttcttagtcagttaatttttccatgggagaagatgttagtagaaaagtatgatccttaatagttataggattacgttttaatgtgtccgcgatattcgaaatatagccgtaataatgttatgaggagagactagattgttcgatgaattgacatggaagtatctattttttgtaggtcaatgtggctatgatgtcgacatggtaagcagagattgtcttcaaacttacatggggaagtatttagtatattgacagggaagctcctgaaatatgctgatacttgcccgactatttattttaaagcttaatagcgttttcttcttaggctttgaatgtcttgcttgacatgtcttcttcatcaactgatgattcattgagtggtaaatgtttcggcataggagtcagcgatagtgtaagtgattgttttttttgttaatcttcatagatctgtttattttgttttcttacacgataaaataaagtgcaatctcctgacattatttaacagctggcagagtcatcttttgatactgatacttctgattgtgaacttttctggggtggagactatagtcaaaggtacttctatttgcttcttaggctttcatcttgttattgcaattcactgattttggaattatcagagttgatttacacgttagttacaagataacgagctctctgcaacctctccttatcttttaattagtccttatcctcttctatgaaagaacaacaaacgaactatttcatggtggaggattcagttcatgaacacatgatatctaaattactcatgagaccgccaaaacttacattatgatttcttaatttcaacattgtggacgaggtcaaaactaaatatctggcctttttttcttttctttgtctgaatggtagggactacgcaaaagctctcatgagttctcaagatccttttgcaactacccaaggaattgatgagcttggtcttccacaaaaagtgttggagtctctgttcaacattcgccagaatcctaaacatgaatccaagacaacgagttggaggaatgtggcaaagaaaatgcagtcacttggcattgatgcttcttcatctagtggggaagagcctcaccctaatacgtttg

SEQ ID NO: 149367 - DNA, 2428 bp, Arabidopsis thaliana landsberg
  unsure (1)..(2428): unsure at all n locations
agattgttaggttcaaagacaaagagtctcatcaaatattcctcgaaccagagggccgagatgttcctgagatctatgtgcaggttgatgcataccttagttatgttttatattttttgttatcgtcttagtgaaaaagtgtgaaggatgagaaagaaacctagcttgtcgcctatatgttaatatctaaaacatatgcttgtccagaaatttccttatgtatagtaagagcaagcctgaagtttgttactgctcagtggtttaatgtgggcgtttgtaagtcgagttttcaagactagagaaaatatatcttagctttgttgctaattatcaaggcgtggtatatatcttcttatgagtgtaatgtctttgatatcactagcattctcatgaattggtaatttggtattttcgtagggatttttaactggcctgccagagaatctccagttgccacttctaagaagcttgccaggacttgaaaattgctccatgcttaggcctgcctatgctgttgagtatgattatatgccagctcatcagtgttccaggtcccttatgacgaaaaagattgaaggtcttttcttctctggacagatcaacggcacaactggttatgaagaggctgctgcacaggtgactgatctgtacgagtttttaatttccttaattatggaccttgagttcatgaaaaaggtttattcggatgatatggaaaaaaattacgaatactataatgaaaactgctgtttagactttgtacatatatagtgatagcattctctgttattcttttcaaatttagggtattatatctggaatcaatgctgccagacatgcagacggtaagaaacacgttgttcttgagagggaaagcagttatataggtacgttgattgatgatttagtcacaaaggatctcagagagccataccgcatgctaacaaggtaagttccatttcgttctcttgttcattatcctaattctcctgcattcttttatactttcatgatcaatcctccactctactttctgaaatatggtcaggcaggctagagatatgattccgaaattattagaagttgacatctgtgtagaaagaaaatatgttttttcataacattcgctttgtatgcggtacccatctaagtctgtctgatggtaataacagtgacatttttcatcaccaatttttctgcgttacataagagcttgtatgggggaactgaagagagaagcaaaaaaaaacctcgctggcagtactggaataaaacttgactttttaacttttcttgatgcggctatatggccatgacttgttttaacttcttttttttttcttttccacgtgaactattttgtgcatgtactaatagcctattactacttatgtgtgtttagtaacacggaataatcaaatgtgttttttttctcaacgacagccgttcagaacatcggcttcttcttcgatttgataatgcggatagtcgactaacgcctctggggcgtgaacttggattgatagatgatagacgatggaagttataccaagagaagcaagcaaggatttcagaagagaagaagagactgaaaactgtcaagatttcaggttatctccgtattctgattatttcagaacgaacttatgttgctggtccctgcatacatttaaacatgggatagcaaaaattttaaggcttgacaaaactggattaggtgcaatgcatgagttgatgagtgtattgcttgcagttgcagtaggtgatttggctgccgaagtttctagtgtgtcttctcagccagtcaaagaatcagcgacactagagagtctcctaaagaaaccacatatccactacaagcttcttgagaagcatggctttggaaatgaaacattatctagaatggagaaagactgtgtagagatcgatataaaatatgaaggtnnnnnnnnnnnnnnnnnnnnnnnnnnnnnnnnnntatcttgtgttagcttcattactccattaaatactacttgcttactcggatatatggacatggagttataagttatatccttaatagatggtccaccaacaacatagacgacttccagacgatttggattactattcgatgacaactctatcccatgaagggcgtgaaaaactttcaaaggtgtgttaaagtagttttcgagtagaatcagtgtgatttatagattatcttcttatgatgtgaaacaattataaattcaggtgagaccagagacgatcgggcaggctagcagagtgggtggagtcagtcctgccgacataacagctctgctcataacacttgaatcaaaccgaacaagaactcaagatgtgaagacagggaaaatattggaacatgccgtggcagaatccaatccacagtgggtagaataggnccccctgggttactgag

SEQ ID NO: 149368 - DNA, 853 bp, Arabidopsis thaliana landsberg
cttgtggacatgacgtaaactggcatgatcatcaagtacagacttagtgacgcgttgttgcagcttgtcggacaaaaatgcagagtataagatctctaggaccatatcaagtcgtttttcgcggtaaatgttcctcccataaggtggtttcattgagaatgcataacttttttgcctaagaaaaaacgttttgcaactgcaggatctcttatttgcaagcactgacacctttgtgcaaacaacacagtggacagtggcggagatcattaataaccctaatgttcttgagagattgagaggagaaatcgattccgtggtcgggaaagcaaggttgattcaagaaactgatttgccaaacctcccttatttgcaagcggtggtcaaggaagggctaagactgcatccgccggggcctctctttgcaaggttctcccaagaagggtgtaggatcggagggttctatgtaccggagaaaacaacattaatgattaatgcttatgctgtgatgagagattctgattcttgggaagatcctgatgagtttaaaccagagaggtttctagcttcgtcaagatcagagcaggaaaaggagagaagagagcaagcaattaagtacattgctttcggaagcggacgaagaagctgtcctggagaaaatctagcatatatctttttaggaactgcaattggagtgatggtacagggatttgagtggagaatcaaagaagagaaagttaacatggaagaggctaatgtaggactgagcttgaccatggcttatcctcttaaggtcactcctgttcctcgaaccctagtccccttaactcagaatccactgaaccggagttcatga

SEQ ID NO: 149369 - DNA, 404 bp, Arabidopsis thaliana landsberg; identical to SEQ ID NO: 34192

SEQ ID NO: 149370 - DNA, 353 bp, Arabidopsis thaliana landsberg
caggttttaggaaagagcagcttaaggtgcaagtaaccaccacgaggaagctgagagtgatgggagatcgtccagcaggagccaacaaatggatccgtttccgcaaagagtttcctagtccgccaaacatcgacgtcgactccgtctctgccaaattcgaaggcgcaaatctcgttgttaggcttcctagaaccgagccaatgggcaaacaaccttcacctattggtacagccacgaaacctcctccagtttctaaaggaaaccccaccccttcctagcccggcagcgagagaaaaggtccaaccaccaaaggagacaagagagaatgtagacgggctagaaaaacagggccg

SEQ ID NO: 149371 - DNA, 504 bp, Arabidopsis thaliana landsberg
  unsure (1)..(504): unsure at all n locations
cactccgtatacaaacactttacagttattgatagtgggtatataacaaactgctgtcttttttgtagatcctactgcaaacctactgacatctggaccatacgccctcgtattcgcttcttttgtacccttcttcttggatattccagttacaaagaggtttggtgtattgggcgtccacttctctgataaatcattcatataccttgcaggtgtccaggtaaacaataccatatgtttatttgtaggacttcttattcttcttcttattttcattgataattggctcggtttcaatatttgtagcttttactatcatcatggaaaaggtccatctttactggaatttgcggtataattgctggttccttgtatcggctgaacatctttggtattcgcaaggcataggttataccttcccaactcttgcttaaaaacanactacattcatctcctcaaacgtggggcttttgtcactttagtaacacagtggtactaacacta

SEQ ID NO: 149372 - DNA, 2702 bp, Arabidopsis thaliana landsberg
gcggaggagggagacttaaagactttgattgattgatttataaaaggaaccctaagtttccgaactttgtccgtcgccgtctgaaaactctgtagctctctcacttcagctttccaattaaagggaacaaagctttgatttttgccgcagtcagaagcattactttgcaagaacaagtgtgtaaacaaagatgaggagctcccaaaacggcggcgcaatgggtggacgagctgccggaaccggcggaggaggaccgtcggctccagttgacaaagaagttgactacgctcagtacttctgtacttactccttcctataccaccagaaggatatgctctccgaccgtgtccgtatggatgcttacttcaacgccgtcttccagaacaaacatcactttgagggcaaggtataataaagttcacatctttaagcttaacaagtgttggaagactttctatttgtttgtagtcgatgaaagattatctattgcgaagttgtacccattggtctctctgtctttcttgtggtattaatagtttgaattgttgtttctgtaatgtgatgaagactgttttagacgtgggcaccgggagtggaattcttgcaatttggtcagctcaagctggtgccaggaaggtttatgccgttgaagctactaagatggctgatcatgctcgtgcccttgtcaaagccaataaccttgaccatattgtagaagtcattgaaggatctgtcgaggatatttcattgcctgagaaaggtattattcactttcccttttcttctctttcactgcgattagaaaagagtagtaatcagggtttaacttagtggctattgattgagacattgcaatttggttgagttgaacatgtttcttttgataatttttactctactcgacattgcgctaatatctacatattcaatttaatgggcagttgatgtaattatctcggagtggatgggatacttccttctgcgggagtccatgtttgattctgtgattagtgctcgtgaccgatggttaaagccaacaggtgtcatgtaagtggattttctgttattttatttctattctttgttgtaacattaaaatttcatgatgcatgattgttacttatgagcctatggcacttgagagcttgatgctgtgtagctatactgttaatatcttgatagcataatcttttcctccagtgccagttatagaatttcttatcaaattccatgcataaattttgatatcatgtggcacatgttactaatattgaaaacaattgggtaaagatttggttgatgttggcactgtgtgtatctaagcattacaaataacctttgtatacaataggtaccctagtcatgctcgcatgtggcttgcacccatcaagtccaatatagcagatcggaagaggaatgatttcgatggggcaatggcagactggcataacttttcggatgagatcaaaagttactatggggttgatatgggagttttaacaaaaccttttgctgaagagcaagaaaagtattacatacaggtgatttcagaactctttttttctgcaatttaatttatctttagataagttcctcagctgacagttgaacaattaacaaattgacttacagaccttttgctctgacatttcatggaactcataaaattttgtcttttgtgcacagactgctatgtggaatgacttgaatccacaacaaatcataggcactcccacaattgtcaaggagatggattgtttgacagcatctgtcagtgaaatcgaggaagtcagatcaaatgtaacgtcagttatcaatatggagcatacaaggctatgtggttttggtggatggttcgatgttcagttctcggttagttcgtacagattactgtgttgcatcatgttgaagaaactcgtatacttactcgttgcttgtttgtttttgtaactaggggagaaaagaagaccccgcacagcaagaaatcgagttgaccacagctccaagtgagcagcactgcacgcactggggacaacaggtatattactccccaatttttggcctatgatggttaaggcttcgattgtttcaaacgctaatttccgcgtaatggtctgaaactggcaggttttcattatgtcgaatcctataaatgttgaggaaggtgataatctgaatcttggtttgttaatgagccggtccaaggaaaatcaccgactaatggagattgagcttaactgtgaaataaaagaagcatctggtaaccccaaagaatctttcaagaagacttacttcatagagtgattgattgattatagagaagctttccttggggcttgctggttcttgtatcccatgtatgaaccccaaatgtaatgttttattgcttcttgccttttttttctatgtaaacgagattgttataccaattttcaatagatttttatatgggtgatataatttattatttttggtatttgattaaacatccaaaaatttcttcggtattaattttgaagagattttttttctgtgaagattgtttaacttttttgaacatttttcagtggtttagaatatttgttaaagtctaaaaaaacatttttttggtttaattaatatcgaactaaatgtttaaagatttgttttggagtaattattaatatttacgaaccaaatatttggtcgatagagttgtgttg

SEQ ID NO: 149373 - DNA, 1431 bp, Arabidopsis thaliana landsberg
ctgttatgcttgaacgaacagttctgattccatcggctcttgttccacaaatgggaggtagaaatgtaagttaagtctcttttctagaaagatagttgttcacattattcttttcagtctttcattgtacttaaagtttatgattttggcaggaagagaaggcaaagctgatccagacaatattgtttgtagctggattgaacacactgctccaaactgtgtttggaactagattacctgctgttattggagcatcttatacatttgtcccggttactatctcaatcatgctttctgggagattcaatgacgttgcagatccagttgaggttcgtagctcacacttatcccctaattgaattgtgttattatctatttagtgtactatcactatcaataaagttatgcttgaatatgaagttttactctaaattacctttttgataccttatcagcgatttaagaggataattcgggcaacccaaggtgctcttattgttgcttcaactcttcaaattatccttggcttcagtggcctttggcgtaatgttactaggttagaaatacatacatgtagtgagtttcctctgtttcttgatgatggtgttttcaggtctaaattgtagtttttctttctcttgtttaggtttttgagtcccttatctgcagttcctcttgtagccttttctggctttggactctatgaacaaggattccctatggtatgcatacatatcattctcggatagtttttactttcagctcctgagtttgtgttccgcatattacagctagcaaaatgcattgagattggactgcctgagatcatacttcttgtcatattctcacaggtaagtatcttcccataatctaaaaacaaagctcatttctgtgttgtataaccaaaccattttgttgatgtgtgcagtacattcctcatctgatgcaaggagaaacatgttctaacttcttccaccggtttgctgtgatattctcagtggtgattgtgtggctttatgcatacattctaaccattggtggggcttatagtaacacagaattcaatactcaaatcagttgcagaaccgaccgtgctggcatcattagcgcttctccatggcaatagatcataaaactcgtatcctttagtttatctagacatgtttttaaatgctacgcatgcaggattagagtgcctcaccctattcaatggggaggagctccaactttcaatgcaggggatatttttgctatgatggctgcttctttcgtttctcttgtcgaggtctaactctaaatctctcctcgccttttttagtacaacttgagacagatgtgcatgtgattgattcttcttgtgtgatcaatggaacagtctacagggacatacattgctgtatcgagatatgcaagtacgacgaaaatcccacc

SEQ ID NO: 149374 - DNA, 524 bp, Arabidopsis thaliana landsberg
  unsure (1)..(524): unsure at all n locations
gcttactcaatctgcnggagtagatgagctgtcgacatcgtcggcgataaccacgtctggtatatccggtgacgacgcagtaagtgtgaagtcgcacgtttgctccatctgtcataaatcgttcgccaccggtcaagctctcggcggccgcaaacggtgtcactacgaaggaaagaacgcaggcggtgtgagcagtagcgtgtcaaattctgaagatgtggggtctacaagccacgtcagcagtggccaccgtgggtttgacctcaacataccgccgataccggaattatcgatggtcaacggagacgaagaggtgatgagtcctatgccggcgaagaaactccggtttgacttcccggagaaaccctaaacatatacctaggaaaaacttacagaattcattttataggaaattgttttactgtatatacaaatttcgattttgattgatgttcttcttcattgaaaaattatgattctttgttgtataattgatgtttctgaaaaagatataactttttatt

SEQ ID NO: 149375 - DNA, 877 bp, Arabidopsis thaliana landsberg
gacactctccgccacgaccccaccaaagatcgattcccacacaacgagtcgggacctcgagacatctccagcaccggaaactctactccgacgagaaactcgtctacaaatccttcctcttcggacccgaaaaactcgagaggcttaagatcatggcagagacgagatccacgacttttcaaaccctaaccgggtttctgtggagagctcgttgtcaagccttagggcttaaacctgatcaacggatcaagcttctctttgctgcagatggaaggtcgagattcgttccggaacttcctaaaggatattccggtaacgggattgtgttcacttattgcgttacaacggcaggtgaagtgactttaaaccctctttctcattcagtgtgtttggtcaaaagagccgttgaaatggtcaacgacggtttcatgaggtcagcgattgattactttgaggtgactcgagctaggccgacgtaacggcaacacttctgatcacgtcgtgggcaaaactgtcgtttcatactaaggatttcggttggggtgaaccggttgtatctggaccggtcggtttacctgagaaggaagtgattctgtttctgccatgtggtagtgacacgaagagtatcaatgtgctgcttggacttcctggctcggctatgaaagtgttccaagggattatggatatatgaatcattaaaattatttatggtttaatgtttgaatttaaattaactatgatttaaaaagcaaataatgatgatatatcaattacgtgtttgtggtcgtatgaaatattgttcgtcggtggagcaaaaatgtaactaagatgttaaagtatcaagtttaataaagaaagctattgtgtttactaaaat

SEQ ID NO: 149376 - DNA, 665 bp, Arabidopsis thaliana landsberg; identical to SEQ ID NO: 6670

SEQ ID NO: 149377 - DNA, 1416 bp, Arabidopsis thaliana landsberg; identical to SEQ ID NO: 24162

SEQ ID NO: 149378 - DNA, 483 bp, Arabidopsis thaliana landsberg
ttcattgtagtaggaatggttcaacgtcattaagtacactttagagtttcactgatgcaaacagcttctatggtgttcatattgtcaaaaatctgtttgtaataagctattgtggttctgtgtttagtgtgataatggtcatctggcttgtactttgtgctgcaccaaagtgaggaacagatgcccgtcgtgtacaaaaccgataggtaatgttcgttgcagagctatggagaaggttatagaagcatctagagtctcgtgtctaaatgccaaatacgggtgcaagaagagtacctcctatggaaaccgttttagtcatgagcaggtatgtgttttcaccccatgttcttgccccatacttgactgccactacactgggtattacaaggatctcaacaatcacgtccgtgctgaacacaaagatgaaaagatcataagttcgtgtggaaactcgttaaccatagctggacccaatagaagcca

SEQ ID NO: 149379 - DNA, 279 bp, Arabidopsis thaliana landsberg
tcaaacataacaaaaaccaacaaaacaaactcaaaaggattcttcttcaaacacaacatcttcaagaaaacatgaaaatggaaatgggtttagtgttccttacagtttttatggctgtgatgtcttctacaatggtctctgctcagtcaagctgcacaaacgcgttgattagcatgtcgccgtgtctcaactacataactggaaactctacctctcctaatcagcaatgctgtaatcagttgagtagagtagtccagtcttctcctgactgtttgtgtc

SEQ ID NO: 149380 - DNA, 780 bp, Arabidopsis thaliana landsberg
gttccaagaggaaagcacgaagtcaggacgttgagtgtcaagcgaatctcgtaaaagacgaaagatatcttcagagaacgatgaagaagagtgttgtagattgattccaagtcttcctgatgagttatctatacagattcttgctaggcttcctagaatttgttactcgagtgttcggttggtttctcggaggtggagatcggctgtttcgacttctgaggtgtatagtttgaggaaagaacttgggaggactgaggagtggctctatgtgttgactaaaggtcatgaggataagcttttgtggtatgctttagatcctgtgtctactaaatggcagagattgcctccaatgccggttgttgtttatgaagaagagtctagaaagagtttatctggtttgtggaatatgattacaccgagcttcaatgttggtgcgattgtgaggagctttctaggtaggagggactcctctgagcaaatgccgttttgtgggtgcgctattggtgctgttgatgggggtctttatgttattggtggactttctaggtctaaaacagtgagctgtgtttggcggtttgatccgattttgaactcttggagtgaagttagttctatgttggcgagtcgggcttattccaaaacaggtgtattgaataagaaactatatgttgttggaggggttgatcggggacggggaggtttatctcctcttcagtcatttaaggtttatgatccaagcacggatgcttggtcataggttccgagcatgcctttctcaaa

SEQ ID NO: 149381 - DNA, 1716 bp, Arabidopsis thaliana landsberg
  unsure (1)..(1716): unsure at all n locations
attgaatcttttagggattcaagagaatcgtctctctggttcgttgagtcgtgagattaggaatctctcaagtcttgttcgtcttgatgtttcttggaatttgttttccggtgaaatccctgatgtgttcnnnnnnnnnnnnnnnnnaaagtttttcttaggtcagaccaatggattcattggaggaatacctaatcgttggcgaattcaccgagtttgaatctgcttaacttgaggaacaattctttatcgggtcgtttgatgttgaattgtacggcgatgattgctttgaactctcttgatttaggtaccaatagattcaatgggaggttacctgagaatctaccggattgcaagcggttaaagaacgttaacctcgcgaggaacaccttccatggacaagtaccagagagtttcaagaacttcgagagcttatcttacttctcgttatcgaattcgagtttggctaatatatcttctgcgcttgggattcttcagcattgcaagaacttgacgactttggttcttacattgaatttccatggagaggctttacccgatgattcgagtcttcgtttcgagaagcttaaggtgcttgtaatgacgaattgtaggcttactggttcaatgccgaggtggttaagctcgagcaatgatcttcagttgttggatctttcttggaaccgtttaaccggagctatcccgagttggattggtgatttcaatgctctgttctacttggatttatcgaacaactcgtttaccggagaaatccccaagagcttaactaagttggagagtctcactagccgtaatatctcagtcaatgagccatctccagatttctcatttttcatgaaaagaaacgaaagcgcgagagcgttgcaatacaatcagattttcgggtttccgccaacaattgagcttgctcataacaatctctctggacctatttggaaggagtttggtaatctgaagaagcttcatgtgtttgatctgaaatggaatgacttatctggatcaattcctagctcgctttcgggtatgatgagcttggaaactcttgatctgtctaataaccgtctttcgggctcgataccggtttctctgcaaaagctctcgtttctgtcgaggttcagtgttgcttataacaatctctcgggaacaatcccttctggtggtcagtttcagacgtttccaaactcgagctttgagagtaaccatctctgcggggaactcagattctcatgttctgaaggtacaatggatcgcgattctgagagaccattgatcaaacggtcaggaagaaccataggcgccgactttggaatggcggttgggagcgggtttggttcgtttttccttcttactcttctcttcttagctaaaatgtaaatagtttccagagaataatttgttttttttgttcattttaatataaaatttatgattcagatattggagttactagacagtaacttgaagaaacctgactaaacattttaaatgagatttttggttgcttttacatatataatctatattaaatattaaatttgttagctaaaattccttttgaacattcttttgtattgggacagaagtcaattttttgttaaaagggtgtgaaaataatgttgaactcttcttttcttttttttgtcgaaaaaaaatattgttgaactcatttgtatgaaaatatacgtcgccataaac

SEQ ID NO: 149382 - DNA, 2092 bp, Arabidopsis thaliana landsberg
tcatcacagccttacgcacataaaaataaatcatcacaagacaagagttaaaagagagacatgtcgacttcattcacaatgatcggtggcgaaggtcccaacagttaccgagaccattcgaaataccaggtttactatattaattatcatctaatatactcatgttttttttcttctttgaaatcatttctatttagctttagataattgatagcaaaaaacttatggtgtatagggagcattggttgaagctgcaaaggaaaagatcaatgaagccatctccacgaaactcgatatcgactttacttcaaatcttgttaacatagctgattttggttgttcctctggaccaaacactttcaccgcggtacaaaccttaatcgatgctgtggaaaacaagtataagaaagaaagtaatattgagggaatcgagttccaagttttcttcaatgattcttcaaacaacgattttaacactctcttcaagacacttcctccggctagactgtatttcgcaagtggagtaccgggttctttctttggtcgtgttcttcctaaaaatagtctccatgtgggagtttcttcttactcacttcatttcgtatccaaggttcccaaagaaatcaaagaccgtgactcgcctgtgtggaacaaagacatacattgctccggatcttcaaaagaagttgtgaaattgtatctcggtcaatacaagatcgacgtgggaagtttcttgaccgctagagctcaagagctcgtgtctggtggattgctattgcttcttggatcatgtcgtccaaatgcagttaaaatgtttcaaacggttgaaggcatgatgattgatttcattgcaagttctcttaatgaaattgcgaaccaggtaaacttcaaaactcataaaacactagttaacttgtctatatgttagtactaattgatgctaacatgttccctcttttttttttttttttctcaaaagggtctaatagatcaacaaaagcttgacacttttaaattgcctatctatgctccaaatgtggatgaattgaagcaaatcatcgaggataacaagtgtttcacgattgaggcattcgaaaagattagccacgcaaagggggagtatccgttagaccccgagtatttgacgtccgcgtttaaggtcactgttggaggatctgtagcttcactatttggacaagatgcgatggagaaaacatatgagcttgtgaaagagaagacgcaagaaatgcttcctcaaatagccaaagccaaacctggaatgcaatacctcattgtgcttcgaaggaactgatttcatgatatagatctgtgaaatgaaataaatcttgaggcctcagtgatgtcattacttatgtttatgttctgttcttgtcattttaacagtctcttcttttaaatatcagttacaattaatattttccctaagagagataatgtttcccttatcctctcctctccattctattcagctcttaatatataatacatgatgcaagaagacccacctggatcaagtcaacttcaagtttttccacccaaactcataactcctcgtgaaatattcaatattgaccaatagtatggatatttaggcaatacacctttgtagattacagaccaaatcacatgagtgccatgagagctttcctagagtgcccctaattttgcgatttactacttgtttggacattagagctgttgtatttcgagcctatatagctcagctcatttctcattgtaaaatatccattatcattgatttaataaaagtttgttttcttttaaagactatctttgaattgttcttgttctttgtctttagaatctgagtgtggaattcacttcctttctatcaatttacggatttgattgcttgtggaatcaaaccttcttgtttatatgtgattatggaatcaatcacaaactctatctccatcgctaccaatatctactttcgcatgaagtttcaaaaaaaaatatatatatattatttctaattatgatgaaatagacgatgacaaaaaaaaactcaaatccgttattaatagagatgcaactacatcaaaaatgc

SEQ ID NO: 149383 - DNA, 735 bp, Arabidopsis thaliana landsberg
  unsure (1)..(735): unsure at all n locations
tgttttttgtgatttttgcgccacggctagtccacgtgacccaatggcattcccttttatacttcttggtaataaggttgatattgatggaggaaatagccgagtggtaagttactattagtcttaagcttttaaatctgaatagtccatttcctttgtttgctatatatttcctttctttgtgttcaggtatctgagaagaaggctagagaatggtgtgctgaaaagggaaacatagtctatttcgagacatcggctaaagaagattacaatgtcgatgactccttcttgtgcatcacaaaacttgcccttgcaaatgaacgcgaccaagatatgtaagtgttattagtctttctttatgtgatcctctcactttgtgaatctcctccatatgatggatccttattaaactcaagatggaaaaccagaatctctcaattcaaattttcatataatctttttttgcaactcggtgctacagatatttccagccagatactggttcggtgcctgagcaaagaggaggttgtgcttgctgaatgctgaagaaacatttcttactctcttgattatgcattactngttggtgtgtctataatcttaatgctgagaaggaccaataaaacttgtattgttccctaagtaaggttttgttacctttctggttcttcatctttgacatttggtggttcacgatttgtatgtaacaacagttcaagtgtacatgtaatgggt

SEQ ID NO: 149384 - DNA, 428 bp, Arabidopsis thaliana landsberg
  unsure (1)..(428): unsure at all n locations
cgtaccctaaaattcatacatattcattctctattttaaataacgattcttttacgttatgcaaggtttttgctacaaagaagaaatagctagagggaaatactgctcaccgagcacagcgtacccttgtacaccgggaaaagactattacggccgcggtccaatccaaatcacatggaactacannnnnnnnnnnnnnnnnnngttcctcggactccctctcttgactgatccagacatggtggctcgtagcccccaagttgcctttcagtgtgccatgtggttctggaacctaaatgttcgtccagtcttggaccaaggctttggagccaccactaggaagatcaatggtggtgaatgcaacggtaggcgtcctgcagccgtgcagagcagagtaaactattacttggagttctgcagacgcttgg

SEQ ID NO: 149385 - DNA, 303 bp, Arabidopsis thaliana landsberg
cagatggtctttgatagctaaaagagtaccgggaagaacagatatccaagtcaagaactactggaacactcatctcagcaaaaaactcgtcgtagattactcctccgccgtcaaatcctccggagaagacggcgactctccaccgtcattgttcatcaccgccgccacaccttcttcttgtcatcatcaacaagaaaatatctacgagaatatagccaagagctttagcggagtcgtatcagcttcgcacgaggataaacgaaaactagaactggctcaaaaagatgtcctaatggcaactac

SEQ ID NO: 149386 - DNA, 654 bp, Arabidopsis thaliana landsberg; identical to SEQ ID NO: 16820

SEQ ID NO: 149387 - DNA, 2526 bp, Arabidopsis thaliana landsberg
  unsure (1)..(2526): unsure at all n locations
ctctccacttgagcttgttttatctaggccattcatttagttaagctgtgctgggataagttttagttggatcataatcttctatcttgtcctccagatatctgaaacgtggtgtaaacgagaaaggcagggtagctaatgatgttgagacagagcagattgttttcgaggaagctcaagatggtaatcccggccgaataagttctgtagttcagaatcggggttcaattcctttgttctggtctcaggagacctcacgcttgaatatcaaacctgatataatatgtatgatcttctttcttcagcataatatattcttaccaatgtcatttttcttcttctttgcttttttgtgctgatatctcttgtctgtgtaaagtgtcaccgaaagaccccaactttgaggcaaccagactgcattttgaaaatcttggaaggagatatgggaatccaatcatcatactgaacttgataaaggttggtattctaactcctcggtaatctagaggatacaaattttgatatatcgtcctgctaaatcctaattcacttgattgaaaaaacagacgcgtgaaaagaggcctcgggagactattctgcgtgcagagtttgcaaatgcaattagatttattaataaagggttaagcaaagaggatcgtctaaggcctcttcactgggacttgcataaacactccagaaagtacgtgatggagataacctcatatgtttctttgtttcttttcttttcattgcatctttttattaacacactagcgtttttacttttccagaaaaggcacaaacgtgttggcaattctcggcaggttggctacttatgctctgaacttgaccagcatcttctactgtcaattaactccagatcttagaggagaaggatttcagaaccagaatccatccaccttggagtgagtattctatttaccaataggtttcttgcttagcacattattcatctctcttgtattgttagaagctaggctctgatcaatttgattcttccggtaattattgcaggaacgacgatggtgaatgttctacttatgatccacccagtaaagatgaaactgcaccaaatttggtggtggaaaacggtaatgatagtaaggatgctaaggaagatcagcaaaaggaagttaccatgctgcagaaaggagtcctgaggaccaattgcatagactgtttagatcgcaccaatgttgctcaatatgcctatgggttggtagcatttgggcgtcaactccatgctttgggattgacagagtctactaatattgatctagacaatcccctcgctgaagatttgatgggaatttatgagacgatgggagatacacttgcacttcagtatggaggatccgcggcacacaacaaggtctcttttacttctctggccataagtttttgtctcgctagataaaaatcttaggacataattgttaaccaatgatcttacttatgtggccagatattttgtgaaaggcgtggtcaatggagagcagcgactcaatcacaggaattcttcagaactttacaacgttactacagtaacgcctatatggatgccgaaaagcaagatgcaattaacgtgtatgctgggttaaattttctctgttttctttttctatggtatgaaaaattatatgactttgatttgtatctttctacaggttcttgggatactttcagccacaatcagataagccagcgctatgggaattgggttctgatcagcattacaacgcagcaagatttcttgccaattctgtaccagagacttcaaggtatattttctttcctgtttaatgagacacttgtagagaagtttgatacattctatgtttcattagagatgcttacattccattttattgcctttagatcgacgatgaaacgatctctatcagaaagtagcatcattagcgagagcagtccagccgcattgggaccagtaggtagacatggtttagctgaaaaagatgaagaagttaaaggtatttcagattcagcaccggagatctcaacgtctgaaactgccaagattgctgctagtttgaggtaanaaagcttatgatctatgtcaaaganagcttctaaatatataggggttgctgtcagctaaacctgaggaatggctattgttttgcagtgctccaccaccgatattagaggaattaggtttagatgatattcttgaaaacgattgcttctgctgtgatgggaatggtgagcaatgtacatgtgcagcttttgatatggattgggtatcttcttcaggaaactcttgtgaagatgagagttgcggaaggtaaccaacaaaagtcttttcgaatctatctaatgtggctaatgttaatatcaaaccagaaatgttctatagaaagtctttgacatgttttcatttgtgcagagccacagtggttagatcctttgacaccatccctgaaagtagaaaaatagagtcagaaatttaagttgttgaaacagttggttccaccagtagaaagg

SEQ ID NO: 149388 - DNA, 653 bp, Arabidopsis thaliana landsberg; identical to SEQ ID NO: 12863

SEQ ID NO: 149389 - DNA, 375 bp, Arabidopsis thaliana landsberg
ggtcctgatcgagcatttggagaccttattgctaagtcaggtataacagatgaaatgctagatagtttaatagccgtgaaagatttccaaggggtcgaaggattgcctcctctgactgagattgaaaacctgcgtcgtgagaaaagttcaaagaagtcatcaagagctgagatagaactccagatgcaataggacattgccaaagcacgggtgagacaagttgacgaaacaggtagagcctatggaactggaagaagaaaatgtagcattgcacgtgtttggattcatccaggggaaggaaaatttcaagttaatgaaaaagaatttgaggtctatttccctaagattgaccatcgcgatgctcttctacgccca

SEQ ID NO: 149390 - DNA, 1435 bp, Arabidopsis thaliana landsberg
tcctcaaattatgtgattcagctccttcaaacggttctgcaacaaacttggtgagacagaaatttcctctttgttacagccaagaaacaccttctcttcctcggagctgttgatcggaaccgttgtctctacgatggccctgcactccaaagagccatctacaggtttaaatcaatatcaccaattcgtttttaatcctggttttgtgttctttccatcgcaataaagaattttgtttcaaaactctcaaatttgggtgattgtatctgtagatacaatgcttattggcttcccttgcttgctcaatacaccgagtcttcttctatctgtcaaggaccattagtccctcctcttgactgtgaatgggtttggcattgccacaggcttaatccggtatatctatatccgaatccgattatattcttcttctttagattgtatacaaagctcaaaatgttttggtaatcatttcaggtgaggtataagactgattgtgagcaattctatgggagagttctggacaattctggcgttgtatcttccgtaaatggaaactgcaaatcacaaactgaaactctatggaaaagattgtatcctacggagccttatgaccttgattttgccaatgcaatctcagagccagcagatgtctcagctcttgagaaatgtaccacttatgatcttgttttagctgtcaagagacaaagcccatttttctaccaggtaacatcatggtcagcttcttgtctcaaaccactttgttgcaaggttttgtaatagattttgtttgtgtatctttgttgcaggtttcaagagctcatgtagataatgacgtctttctgcaagaagctgtggctagatacaaagcatttctctacttgatcaagggtaaccgagaaagatcgatcaaacttttctgtgttccgacttacgatattgatcttatctggcacacacatcagcttcatgctatctcttattgcaatgatttgactaagatgattggtaaggtcttggagcatgatgatacagactctgaccgtagcaaaggtaagaagcttgatactggtttctctggaactactgctcaatgggaagaaacatttggtcgaaggtattggaaagccggtgctatgaaccgtggtaataccccaaagccagtcacaacttctccttatgtttgttctggaaagaaatcaattgcgaaagaggaagagtcccagaatgtaatccaatatccagaggtgaaagtcattgaagttatcttggagattgttggggttaagaacttaccagatgctcacaaaggaaaggtctttgttctgttcagcaaaactcaaccagattctctgtttaacgctgagcgtaggcttaccgttttatctgagtctgaaaggaaagcaagatgctttgttccagtgtgagcctacaggag

SEQ ID NO: 149391 - DNA, 1256 bp, Arabidopsis thaliana landsberg
agcagaaacatgtccatggagctcaccgttctcggacccctcgccggtcggagtttcgcaatcgccggaaaacctaaacttctgcttcttcgaccaacaaacctccctcttctccgtctctcactcccgctttctcttcccaatttctcttcgtcctctcgttttaattcgcccagtaagttcttctctccctctcgctccaacttcaattttagatttcaaatttgtgtaaaccaatttcttccgaatttcgtttcagtagtattcgctgcacaggagagtaacttgagtgtatccaacgaaaacgaaaccagtgagtggctgatgcaaggtaccttcttatcaccattgatctatcaacatatttcccagtgaatctgaattcttagggttttgatttcttttgtttcattggtgattagatttttatacattgagaaaagatgtagaaatagcatcagctcgtgttgaagagattagagcttctgctaatttgcaacaaactagaacaagagattacaaatctggaatcaaaagctactgatacatcgttttgggatgatcgtaataaagctcaagaaactttatcgtctttaaatgatcttaaagatcgtatgcggttactctctgagttcaaaacgatggtattgttacatatctaaggtttatatgtttatgatgttgaggctttgagataatgtgttgttgcttgaggtataggttgaagatgccgaaacgattgttaaactaacagaagagatggactctactgatgttagtttacttgaagaagccatgggaatcattaaagagttgaataaatctttagataaatttgagcttactcagcttttatcaggaccttatgacaaagaaggtgctgttgtttacattacagctggagctggaggaacagatgcacaggttattattatactctcttagaggtttgtgtgtgtttgtgatgtgaattgaggttcttttaaaacaatgataactttcagtgcaggattgggctgatatgttgcttaggatgtatatgagatggggagagaagcagcggtacaagacgaaagttgttgaaatgtctaatggagaagaggcagggattaagtcagcgactcttgaaattgaagggcgttatgcatatggttacatttcaggggagaaaggaactcataggattgtccgacaatcgcctttcaattcgaaaggtcttcgtcagggaaaaataaggtctatgagctcaaaaagca

SEQ ID NO: 149392 - DNA, 1843 bp, Arabidopsis thaliana landsberg
aggtacattatcattcttcttcgtcttttttttggtccatatgaaccatatttcacaagtatataatgtccatatagggatacaccggatctcagctgtgggacgtgactttagcggtccaagcaatcttggcgacgaatttggttgatgactatggtttgatgcttaagaaagcccataactacatcaagaacactcaagtactttgttcacttaatcatatagactatatattctcttgtgatctgatttatttcattgatctcttgtttcgtaacctgaaatagataaggaaagacacaagtggagatccggggttgtggtaccgacacccgtgcaagggaggatggggtttctccactggagacaatccatggcctgtctctgattgtactgctgaagccttgaaggttacttaactaaatatgcaactcttacatgtttttttgttaatctcctcatatgttttttttttctcaacaagctaaagatgttgaaatttcttgttataggcggcgttgctattgtcacaaatgccggttaatttagttggagaacccatgcctgaagagcatttagttgatgctgtaaactttatcttatcattacaggtatactttctgcattttcggatatattttgtaacatacattttctaaaagcttacttcttccagaacaagaatgggggatttgcgtcatatgagctaactagatcatatcccgagctagaggttaaaccatttcttctttgttatgcttatattcaagacaagattagtggactctcatatcatttgttgtatgcgcatatacataacaggttatcaacccatcagagacttttggggatatcatcatagattatcagtaagatgcgaactagtattacctaaattccatttcaaacaacaatttcttgttgatgaaggattaaaaatccacagatacgtagaatgcacgtcagctgccatccaaggtcttgtgttattcacaacgttaaattcgagctacaagaggaaggagatagtaggaagcatcaacaaagcagttgagtttattgaaaaaacacaacttcctgatggttcatggtcagtgctactaagttggtttttactttaatatatatatgttgcgatttttctatcggtatgctgataaatctttaggtatggctcgtggggagtgtgtttcacctatgcaacatggtttggtattaaaggcatgttggcttcaggcaaaacatatgagaccagtctttgtattaaaaaagcttgtggtttcttgctctccaaccaactttgttgtggtggatggggagagagctacctttcttgccaaaacaaagtatacaccaatcttcctgggaataaatcgcatattgtgaacacatcatgggcactcttggctctcattgaagcgggacaagtgagtttcatccttctctatagaatgtcttattgcttaggtgcaaggcgttacttaatccatattttgggtttgaaggattagtagagatccgatgccattgcatcgcggggcaaaatcgctgatcaactcgcagatggaagatggagattacccacaacaagtgagtaaaatgttttatattcatagacaggttttgttttcactaacctcattgattatatttgcttcttactttttgttcaggagatactaggagtctttaatcggaattgtatgatcagttactcagcttatagaaacatattccccatttgggctcttggagaataccgcaaactcatgttgtctttgtgagtatagactttatctttttctatgttaactcagatctttatctttgtgagaataattaa

SEQ ID NO: 149393 - DNA, 557 bp, Arabidopsis thaliana landsberg
gtctttttttcttttgtgtaacccaaatttgtaatggagatagatagatagcttttgattccttttctgtggtgtattcttctagtgacaaagaagttgataaagccgaaaggacttgagagggttgctcttgcagctggtaactatttgcatatctttgtatatgatcattcgtttcgactttctgaaaaatgttgtgtcttttttttttctttcacctcgacgcaggagttgctgctacgacttttgttgttgcttggaattggtcaagttccaaatatgcagtttcatcccttgatcatatccttagtcaagatgctacacgaatgcagaaagagcttgtgaatgtgtaagcatctgtgagagagctcactctttttgagacttgctgtgttatttgatttgtcaccttcgcttgatttttcttaattctttatttggctggacatttttccaacctaccccttagtcaggtccaacagagaaaaagcttaaagatggcaacttatgtccaagcatttctaccctgaatcgtgtttacggtgataaaggagaca

SEQ ID NO: 149394 - DNA, 409 bp, Arabidopsis thaliana landsberg
ccatcattgctcaataaaacacacacacacaaagggaaagccaaaccggtatattttctttaaacaggatatatagatgaaccaagaagagcacgtaaagcttctgggcttatggggaagtccttttagcaaaagagtagagatggtcctaaaacttaagggcataccttatgagtacattgaagaagatgtttatggaaacaggagccctatgcttctcaagtacaaccctatacacaagaaggtccctgtcctcatccacaatggtagatcgatagccgaatcattggtgattgtcgaatacatcgaagatacgtggaagacaactcacacgatcttgcctcaagatccttatgaacgtgccatggcccggttttgggctaagtatgggatgaaaaggtaatttatt

SEQ ID NO: 149395 - DNA, 1513 bp, Arabidopsis thaliana landsberg; identical to SEQ ID NO: 29068

SEQ ID NO: 149396 - DNA, 1244 bp, Arabidopsis thaliana landsberg
  unsure (1)..(1244): unsure at all n locations
atatgtgagtattggtgaatctggagatgttgagctcttttactactttgtgaaatcagagaggaatccagaaaatgatcctctcatgatttggctcactggtggacctggctgcagctccatctgtggattgctcttcgcaaacggtaacaaatattccattttgtatcctgtaatgagtcttaatatagatgcatgcataagtttataatgaatgttttaaaatgtcatgtttcttgattgctccttaagacaagtctttcaagttgaagttttattgttttttctttctttcttaggtcctttagcttttaaaggggatgagtataatgggacagtacctcctctagagttgacatctttttcatggacaaaggtttgagagataatttcaccaatttttatgattctatttctctctaatatgtaacaacattttgaattcatgtatactcgattgtttttcaggtggctaacattttatatttggaagctcctgctggctctggatactcttatgcgaaaactcggcgtgcttttgagtcgagcgacaccaaacaaatgcaccaaattgatcaatttcttaggagtgttaagtgttgtttttgctttgttacagtttttgatgagtttttctagtgatatttatgtttatcttaagagttagttttgattctgattacttgcagtggtttgtgaaacacccggagtttatatcgaatcctttttacgttggtgaagattcatattccgggaannnnnnnnnnnnnnnnntgcaacaaattttacttggtagccttttcaatcaccacttttcacagttttggtactttttagctcaaaggtttcaatcacattctactatatgaaaacaggaaatgagaagggcctcacaccactcataaatattcaggtgttaaaagggtctattcctgcaataatatgaatactgttgagaaaagaaaacgttttgtagtaacacattcctatataattgagcagggttatgttcttggaaaccctgtgacagataaaaacattgaaactaactatagagttccatttgctcatgggatgggacttatttcagatgagctctttgaggtaatctttatcttcatcaatcatatcatatgattgttgtgacatttggttacaattattcttttttcactacttattacattgcagtcacttgaaagaagttgtggaggcaaattcttcaacgtagacccaagcgttag

SEQ ID NO: 149397 - DNA, 3776 bp, Arabidopsis thaliana landsberg
  unsure (1)..(3776): unsure at all n locations
ctttccctccagtcaccttgagatgtttgtcaagtacttcctttgtattgctacatctgagaatagagccatcactgaaaaacacttctgtgtgaacctgagaatataaaataacaaaaaatcttacggacgcctatgaattcacccatgaaaaaatgagaatgtaacaacaaacatattataaaaagtttgttccagatcgccacaataaaaagtgaagcaatacagatcatacttagtctactattattaccactgaatcaacacctagatgaatgattatcgatggacgaggaatcagatgtgaagaacgtgaactttaaaatctcaggaaaataaatcagtagatgttaccataaaattttgttctggctgagggaatatagtatatggattaagctcctcttcagatggctctgcggtagtttccaccacagctttcttttcctaaagataagccacagaaatgaagaattaaaatcacaatatacacaacagagaaaaaaaaatcaatgaaacctccaatcacctcgactttggcaggcttctccttcttctccttcttttttgtaggtttttcattatcagcagcggttttctcaccaagcagctcatacattttctcatctatgagtttctattgcagacataagactggataagaaaactacgatatcgtttgtgacaagctaagaagacaggctgctaaaaaaaatgttaacgcacctttacaatcttaggatcggcccatggcaaacttttccggacatgtccaaataattcacccactacacaaacataaatacattattcaaccaagaaacagaataagccggttatgtgacaaattatagagaatcagagcaatggtagatatgcctcaaataaaccgaatgccttagacaggaggtatagagcaaacactaacnnnnnnnnnnnnnnnnnnnnnnnaatattgttttcttattctcttcaaagattcctttaactgctttctcaatatcttctggggaaacttcaatccctgttccaaaacaatgatgaagatctcatctccaaatccatggaaaacacacagcaaattgtaacctcaaagcattgtgttaataaagaaaaacagaaaccctacaaacattggcacttaaaagtaagaaatataatacatgctcataatcgcataaacaaaagtgcttaccaacaccacatgcctcttcaaactcattcagcttaaagtcctcaggaccggtactggcaaaaaaggcaaatgcagcttccaattgggctggagttttaatctgcagattcattaacagagagaatcataaaaactttagcccgtttcccattgacaaaacagaaaataacccaatttctgacaaaatcaaggagccatataccaaccttagagttaacaatgtacttgagcaatgtagggcgatgcacaagagcatttgtagggaacttagtagcgacctgttaagtaaaacatagcctcaataactttcttataagcattgaaacaaaaatctgtggaattttggcttaattagaaatatatctcaccgagtataacagattgccagtatttcgatcgcacccatcagtaacagcagcctatacacaagacaaaacatcatgaaaagaaagttttaataatccaattgatcaaatcatgaacagaatcatacatgcaacggattcaaaatcatcaaactaaacatttcgaattgagattacataaaaattggatttaagtcaacagattgatagaaagcaaaactttttcaaaggaaaatgaaaaacttagtcctcttgtatccaatttcatcagatacaataagaatcgatagccaacacacaggaagaaggaggaggaagaagagagagaggagacctcgtggataacggcggtgagattggcggtgaccttgttattattgatggtattacgagctgttttctcgtccaaaccaatactaatgaagagctcaatagatttctcggagttatcgtctttgagaaccatggcgacgaaactgacaaagtaacagaaacgaaagtgagaccaccttagggtttaatggtgtggaggagacacggttttactttaaccagatgtaacccaagtattgggggaaatatttaaaccggagtttattgattggttaatttaaaccgaagatggctaatatagaaaagagatatattggtgcagtttgaaaatttcgaaccgaaccataaacatgaaatgcaaccgaatccagaccttgtccgagccatcgccaaccgctacgccgcgaatctccgcctctgtttgccgctccgacgaacatctctgcagctcgcgcgagccgtccatggaaatatcattactttcgggtttcagccacgtgcccatatcctgaaccgtttgattgatgtttattgtaaatcgtcagagctaaattatgcacgccaactgttcgatgaaatctctgaaccagataaaattgctagaaccaccatggtctctggctattgtgcttccggtgatatcaccctcgctcgaggggtttttgagaaagctcctgtgtgtatgcgtgatactgtaatgtacaatgcgatgatcactggcttttcacataacaatgatggttactctgctattaacctcttttgtaagatgaagcatgaaggattcaaacctgacaacttcactttcgcaagtgttctcgcgggtttagcgttagttgccgatgacgagaagcaatgtgtgcaatttcatgccgcagctctgaaatctggtgctggttatattacttcggtttctaacgctctggtgtctgtgtattcgaaatgtgcgtcttctccgtctctgctacattcagctagaaaagtgtttgatgagattcttgagaaagatgagaggtcgtggacgactatgatgacgggttatgtaaagaatggttattttgatttaggggaagagttgcttgaggggatggacgacaatatgaagctggttgcttataatgctatgatttctggttatgttaatcgtggtttttatcaggaggcattggagatggtaagaaggatggtttcatctggaattgagctcgatgagtttacatatcctagcgttattagggcgtgtgccacagctggattgcttcagttgggaaagcaagttcatgcttatgtattaagaagggaggatttctcgtttcattttgacaattcgttagtttcgttatactacaaatgcggtaagtttgatgaggcgagagccatttttgagaaaatgccggcaaaagacttggtttcctggaatgcgttgttgtcagggtatgttagttctgggcacataggtgaggcgaagttgattttcaaagagatgaaagagaagaatattctatcatggatgataatgatatccgggttagctgaaaatgggtttggagaagaaggtttgaagctgttttcttgtatgaagagagaaggtttcgagccttgtgattacgctttttccggggcaatcaaatcatgtgccgtgctgggagcatattgcaatgggcaacagtaccatgcacagttgcttaaaatagggtttgactctagcctctctgctggaaacgctctgattacaatgtatgcgaaatgcggggttgtggaggaagctcgacaggtgtttcgaactatgccttgtctggattcggtttcctggaatgcgttgattgctgcattgggacagcatggccatggtgctgaagcagtagatgtgtatgaggagatgc

SEQ ID NO: 149398 - DNA, 1389 bp, Arabidopsis thaliana landsberg
  unsure (1)..(1389): unsure at all n locations
cttaccatacattacaaaggaggtgtgatcatttagttttggggattgctttgattagcctgggtaaaatacccgaacccgaagacccaaaccgaactcaacccgaaaaaactcaaaccgaatctaaacccaaaattttaaaatacccaaacagatcctaaacttcaaaacccgaacccaaacctatccgaacctgaacccgatcaaatatccgaacatattcgaaatatatatatacatagaaataatttattagtaagaatcatttttacatcaacttaagtatctaaaatattaggattttaggatattttgtatagttttaggtattttacctacttttcgatagattcggataaaaaatactcgtttaagaaatttttgtatattttcaagtaatttgaatatattttgatacaaaattttgaattttggatactccgggtttacccgaatccgaacccgaaaaacccgatccgaatccgaaccgaatccgaagtcttaaaatacccgaacggatcttagatttctaaatccgaaaaacccaatccgaacccgaaccgaatacccgaacgcccatgcctaattttgactacaaagtggcaatagaaaaaaaacatatataatttacaaattagtctatgctttaagataagattttacatggtactaagattgaaatattttcagtcgttcacgttgaaaaaatatccggctgagctttcgctagtgatgtggatttgtgccatgggaacggtcttaaacaccatcgcttcgctcataatggtgcgcgacgtaagcgcatggaaagtcggtatggactcgggcacacttgcggctgtttactccgtaagtacttttgaccgtttactactaaaccaatctttttataatcatggtcataactcacaagtgttaagtacttaatatcagggagtggtttgttcgggtatggcgtattacatacaaagcattgtgattagggaacgaggtccggtttttacgacatcgtttagtcctatgtgcatgatcatcactgctttcctcggcgtgttagttttggctgaaaagattcaccttggaaggtaataaaagtcacgttaatcaaatctttataattcaagattgaattaagtgatacattactaacgttttgaatggtataatattgtaattttcagcataatcggggcggttttcatagtggttggactatacagtgtggtatggggtaaaagtaaggacgaagtgaatcctttggatgagaaaatagtagccaagaaccaagnnnnnnnnnnnnnnnnnnnnnncaaacaaacgaacggtcacgatgtcgcgggagcgccgactaacggtgtggttaccagtacctgatccaagtcccaaaag

SEQ ID NO: 149399 - DNA, 615 bp, Arabidopsis thaliana landsberg
ttgctccttagacaaacattttcccattatacatgtaatcagtttacataggaatccttttgataagtgtttcatttggttcagctactaaatcaaccttataaatgtttctgagttctctgtatcaaactgaaagaacaattacagacagcagaaaacactgtatataaagctattggaccggctgattcatagaaaatggctaacaagttgatcaatttctatggaaaaatgtttttacctattgttgtatattgttcctgaccagaacaagagttttgaactttacagtgggtgtacagcttcatagtgttcttcttcccaggaggatcaacaaatttgaaaagcggattgcttccgtggcacgcaatgcttggcctgtttgtttacatacttgctgtcgggaatgcagctttagggtttctggaaaagctgactttcttggagaatggagggcttgacaagtatggatccgaagcatttcttatcaacttcacggccattatcactattctctttggtgcctttgtggtactcactgcttctgctgagtctccttctccttctccttccgtctccaatgatgatagtgttgacttcagttattctgctata

SEQ ID NO: 149400 - DNA, 939 bp, Arabidopsis thaliana landsberg
gagattcgttgtggatatagtttttctccttgattctctggttctttccatgatccaattttaagggtttcacggcttcgtttttttgggtatatctagctctatcgttcgtggtggttttctttctggatcaaagttttctgagatctctgcgatttctgggattcgaaaattggagaattagggcttttttacggtaacagggtttcgaagagcataagataagaatgccttcggtgccctctaagcttcttcctctcctgtctttgattccttcgttgactccttatcattctggtttgagttctaatcgtttgaaacctcttgaaaagtgtgattggcgtggtaatcttagttaaacaacaatttctctgtttttttgtttctccgatctcttcagatcttttcaattttctcttcggtttggtttgttttcacgcatttcctagctcggagtaagctaatcgaagaaaacaagcttgttattgatcgatcgttcggtttttgttttgacgttttgtgtgaacgaggtaatttggctatatgattttttggctaaagtgttgtttgagctagagttctcttgttaatggtatttgaatttgtgtttgttgcagttacttttggatatgagctctgtttgtggtgggttggatttcaaagatgcagagagcagctctgcttccagtcccattatatgttctactggcgtaaagcatatctcttgtgttggatctgatgatgctcaagagtctgatggtgatgatagtggttatatacaccaaactgtgattgaagaatccaaagacaaggcgatcagcgaacccatccctgagtctttacctctcaattctttggatgatgaaagtgaagataagaaccttgctactgcattgcaagacatgttctctgagagtgtaagtgaccctatcttatttc

SEQ ID NO: 149401 - DNA, 761 bp, Arabidopsis thaliana landsberg
agatttttatccattaatggaagataatcagcgaagcagattcagaaaaatctgtgtcttttgcggaagccactctggtcacagagaagttttcagtgatgctgccatcgaactcggcaatgaactcgtttgctctctatctctcttctcttcttcttttgattgcttcttgtttggttttgtgataaaaatatgaacttttcttcaaatcaatacagatatcaccttcgctcggtttttgaatgtcaaaatacgaactttttagtttacttgttcatttcaaacaatgggtttggtggattttatttgtgcttgcgtctattgtaagcttttgtggtatttggggtttgttgactctttaaatctaggcatgttgtcatttgacaaaactgtgaaatttcttcaagtgttgaaatgggtcttcctctgtttttttaaatgtgttatctttgattgtgtgatttttggaatgtgtaggtgaagaggaagatagatttggtttatggaggaggaagtgttggattgatgggtttgatatccaggagagtctatgaaggtggtttacatgtacttgggttagtttaagaatcctcaattagttttatagctctttcaatctcttttattttcaaacttagagtgattggattctctgtgattgcagaatcattcccaaagctttgatgccaattgaggtatgtatcttcttctagaagctcatttgtccaggaagtagtaaacttggctggagttttgaagtt

SEQ ID NO: 149402 - DNA, 1416 bp, Arabidopsis thaliana landsberg
tatacagagttttttaatatgttgctgaatatttgtttccacagagaagctgacatgacaaaagagcggatagagaaacttctcaaagctggggccaatgtaattctgaccacaaaggggattgacgacatggcacttaaagtgagaatgaaaaccaatgattttctctatcgtttacacataacttagtttttgaagtattcaagtttagttgcgtttatgtttggttcaccgtaatggattctcatttctcttgtttttatttcagtactttgtagaggcaggagctattgctgttaggcgtgtgcgcaaagaagacatgcgtcatgttgccaaggcgacaggagcgactctggtacttcctgcgctaggctttttcaatacccatgttgtcaaactaaaatttcaactaatatatttatcctttattttaggtcaccacttttgctgacatggagggcgaagaaacatttgatccagctcaccttggatctgctgatgaggttgttgaagagagaatcgcagatgatgatgttatattgataaagggaaccaaaacaagtagtgcggtatgccattctctcagcaatgaatcttacttgattgctgacagtactatatcacacaaaatcaatcttaagtatatttcttttaaagttgtttaacatatcacacagagttttgtctaggtttttcatgtttataagtgtttttttcctgttaggtctcgttgatcttaagaggtgcaaatgactacatgcttgatgagatggagagagcactgcatgacgctttatgtattgtcaagaggacccttgagtccaacacggtaacattcctttactttctgttagacatactccttgcatttagcaaagaacaaacattacatttcttgtttccttgtcaaacaggtggttgcgggtggaggtgcagttgaatcagcattgtctgtgtatctggagcaccttgctacaaccttgggctctcgcgaacaattggccatcgctgaatttgctgatgcgctattgattataccaaaggtgcgacctacaaacctatttcatcaataaaaatctgtcttttgttcttatcttataatccaacgtttatcatcctgttatcaggtgcttgcagtaaacgctgctaaggatgcaaccgaattggtagctaaactaagagcgtaccaccacactgcacaaaccaaggctgataagaagcactattcaaggtgataagcaatctgtttgtgtcttttccctttgaggttctgtttgaaaatgttatatgctcattggcttcatgttgggaaaacgtaaatgcagcatgggacttgacctcgtaaacggaaccatccgcaacaatttggaagctgtagtgatcgaaccagctatgagcaaagtgacaattatccag

SEQ ID NO: 149403 - DNA, 515 bp, Arabidopsis thaliana landsberg
ttctcactctccctcaagccgcttctccaatatcaacggctcaaaacgtaagggccactctttagaaaaacagttcgctatgattgaagaagaaggtcttcttgatgatggagatagagaacaagaagctttgcctcgtcgatgttatgttttagctttcattgttggattctctctactctttgctttcttctctttgattctttatgcagctgctaaacctcagaaacctaagatctctgttaaggtttgtgagagttgacttagtagatcgagatcagatttcagatctagagtcgtgcttacgtttgtagaattgaattttgcagagtataacgtttgagcaacttaaggttcaagctggacaagatgctggaggtataggaactgatatgatcactatgaacgcgacactgagaatgttgtacccgaacactggcactttttttggtgttcatgtcactttttcttcgattgatcttagctttttgcaaatcactattggctctggctct

SEQ ID NO: 149404 - DNA, 412 bp, Arabidopsis thaliana landsberg
cttctccctcactcactcctctaaaaccagaaacaaaaaggcaaagacgagagcttaattaatggcttccccgacgataagaaccgtcgcaagttacaacactcacctagagtactccgtcgatttctttggagacgagttcatcgtcaccgtaacgtgggattcttccgtcatcagccgttggattcgcaacgtcctcttcaacaaccgtttctcctctcaccctctcgtcgttggagttggcgtccagtggacaccgtttagttattactccgatccaagaccgaataactactacgccgatcctccgccgataagatactactcagataatccagcggatattctccagttatgcgtgggtaatcgatgtctcatcatccagttaggttactgtggaccagtacctaac

SEQ ID NO: 149405 - DNA, 1848 bp, Arabidopsis thaliana landsberg
aaattcgcaggaacacatcgtcagatatcctaatagctgccaaacttatgcatcagatttacttttctcttagcctagggttatttgtcttattccattttgtgggggatcaatgtttcatcttgttatccacatggatatatcattccaaacttaagcatcagatatccttcctcaggctatattgttttttctatgtgtgtctaacagagcattgagaatgcgactgccctagaagaattacttcctccaaaagctggtccgaattttatgtattccttggaagaaggtaaagagaaaacagaagaacagcaattgtcagccgaattgagcaggaaggtcaaggaaaaacaaaccgcacgtgacatgatagtgtggattgaagaaacgatatatccagttcatggttttgaagtcactcttacaatagttgtacagaccttacttgacatcggatcaaaaagtttcactcatttggtcactgtcctggagcgatatggccaagtattttcaaagctttgtcctgataacgataagcaggtgatgctattatctcaagtgagtacatactggaaaaacaatgtacaaatgacggcggtggcaattgataggatgatgggttatagactagtatctaatcaggcaattgttagatgggtgttctctccagaaaatgttgatcagtttcatgtgtctgatcagccatgggaggtcagttgcgttttaacagaagtatatttattttctacactctgcagagcaagtttgtttatcttcgtaaatctgtttctgtctctgcagatacttggcaatgctcttaacaagacttataaccgtatctctgatttgaggaaagatatatcaaacattacgaaaaatgttttggttgctgagaaagcttcagccaatgcacgagtagagttggaggctgctgagagcaaactttccctagtggaaggtgaacccgttcttggtgagaatccagcgaagatgaagcgtttaaaatcaacagtggagaagacaggggaagcggagttatctcttcgggagtccctagaggcaaaagaggctcttcttaacagagctctctctgagaccgaggtattatatattagtttaatgcagcagatgatcttattatttccttttatctactaaaagctaattgagttgacttgtgcataggttttactgctcttgctgttccaaagtttcttaggtgtactgaaggaacggctcccagatccaactaaagtgagatcagtgcaggatctaaaatctataggtgctgaagatgacaagccatctgcgatggacgtggacagcgagaatggaaacccaaagaagagttgcgaagtcggtgagagagaacagtggtgcttatcaacacttggctatctcacggcatttacaaggcaatatgcgagcgaggtaaaaaataacttaatagttgggatgttgttgtaagagctttagtagattgaatattgacttgtttcaccatgttcttgtagatatggcctcacatggagaagttggagtcagaagtgttctcgggtgaagatgtgcatcctctctttctccaagccatatcttctgcacttcaattcccattacattaatcttcctctttcaatctcaatcaaacctgtctcttttgttttttgttatgagattctgattctgacatcaagttattaggaaattgaaaagagtcaaaaaacaagatttaaacttttaacaccagtcttgtttctggagctcgtttctcagagtggcctacgcaaatatcgaaagcatttcatttaccaaaaagggaactgcatgttccgatttgagcacaattga

SEQ ID NO: 149406 - DNA, 4982 bp, Arabidopsis thaliana landsberg
ctggtcgatgacgtggccgagtcctggccgccccttcgctgcacacgtcggccatgggttgagcacacgtccatcttggccaaactcacgccaccgcggatcgctcacattgcgtactgcgttcgtactgcgcgcataatgtgggcgtattgcaggcatactgcgggcatagtgcatgcgtactacgggtataatgcggacgtactgcgggttggttttctcgtccttaagcaaactcaacagcccaacttagtcttactcaatgtgagggatattacattctcctccattaaataaaatttttcctcgaatttttatgacttaggggctactctccattcaccttgcttaagatacttgcttttataatcttcttgcaacctctttgaaatcttgtcttctgggttttctttgtcatgatctatcctagcttcgctcctcccctttgattcttctaagtctatttaacacgttccattttgtaaaacttcgactatttcttttatacttcactaaatctattctatttctcctaaggttacatacctgggcgaaggactttattactcatactacacatctaagtcgctattttacaacaaaaggattaggaccctacttaccttcgccttagacttgctattagtcaacctaaccgtaaatactcctacacatagtacatggacaaacgcaactaggccaataaccatctaggcttgccgagtcagctgcagtgggaggaaacacatgatacggactcttagacgatcccgtcataaccaccggccatgcactcgcatagtatcctgtcccgtctaatgcaatatatcgtatcattggggtcccctaatggctggtagtagcggcacatcctcggataatgccctaactttccacacgtgtagcaatagggttcccagagcgtcgatgctagagttgcaagaactccctgataataggattttagtcaattaatcctaaaacactattctgtcgttgtagtattttaggtgtcaatccaaatgggtgtgatgcagacagatgagaattgatcagaagttgctaagtcaagccaagcagaatttggttggttttctaacagtcctactgttgatgtagaaaacaataaaaagtcacagaaatgactgatatactctatcgcagggtcgactggcagaagggaccctgtgatcgagtacaacaggatgagagagtgtgaaaatgcagaaatggaccattttactctatcacgcaatctcactgttagtagactggtgtgatcgagtagaatggttgaaaacagaaaaatactaaaattcaatagcgtggtctccctgatcaattcagttggttaacaaatctcaattaagctatccctagacaacatgttcaacagcagattaattcactcccgtgatagaaatcctcaagcatagctagacacagacttaattcccattagcgatctctaactaaccagcccataaaaaccgagtgttaaagccaataaccgctctaaacggccaatcccttgggatagagacgattatcactggaattagtagatccaacattccattaaacgccttctgggcgctggaacgtctgggatcggattccagttgatcataaaggaataagcagtaaacacaactaattcagaagggattcaataaatctacacttaaccaacagatttgaccaggggttccacaactactctatcccatcctcagaagtcctaatcactactcagacaacatgcttaaatacaataacttagaaacgaaagattgcatactaaaaatatgaaacaaagatgaacaagcaaatgaaagcaaaatctgaataacttagaagaaaaattgaaatacaaagttgcaggaatgaaaagcggctgctgaataatagtgcgaaatttgtgtctctcaaagtgcatgtctcagggcaaaacccttagagacttatttatactaagataagaaagcgggcttcgagcccacttaacggcccatggacggtgtgatcaagagtgtcggctcaaagtgggcttcctgatgggcttcgaatgggcttcgaatgggcttcgaatgagccttctcttctcttctctttctgatgctcaggttgtctggttgagtgcggattgatcagagggtcgaggtggtggtcgagtaggttggttgacagaatggtctgggctgcttcttggcctctgtgatcgagtaagtgtgtcagctgtcaggatggactggttcttctcctctgcgatcgagtataactggtggactggcagaatggactgcctggtctcctctgcgatagagtagaattgcagaatggaccgcctcctctcctgtgcgatcgaggatatctgccagaatggtctgcctggtctcctctgcgatcgagtagaagtgtctggatggactactgagctgactgcttccctctctgctactggtgatcgagtatgtaggtggaaatgtgactttctgttctgtttttcctctttcagagcaccaatagctttaaaacacctgaaacaaatccagaatctagaatgtatgcaagactagtcctagactcgactaaagatgcaaaatgtacaaaaatgatggtgaatgctatgaaagatggatgaaactagattcagaatggtgataaaaggatgtgtaaaagagccttcaaagagtaaaccaatggggagtactaaacataatctcttgtttatctttaaggaaaacttattgaacataacagctttggaaccggttttgccgagtagtattaagtttcttttgcaggactatccagatgtttttcccgaggaaaattcagaaggtttaccacccattagaggcattgagcaccaaattgactttgttccaggagcttataagaccaatcccgtggagaccaagtaactagaaaatcaagtgaatgagctgatggagagaggccatattcgtgaaagtatgagtccatgtgctgttccggtgttgcttgtacctaagaggatggaagttagcgtatgtgtgttgattgtagagcaatcaacaatatcattgtgaagtatcaacaccctatacctagattagatgacatgttaaacgaattgcatggttctagcatcttttctaaggttgatataaaaagtggatatcatcaaattaggatgaaagaaggtgatgaatggaaaactgcatttaaaactaaacaaggattatatgaatggttagtgatgccattcgggctgacaaatgcacctagtacattcatgagactaatgaatcatgttcttagagcttatataggacattttcttgttgtttactttgatgacatcttagtttatagcaagagtcttgaagagcatgttgagcatctaaaaatggttttcgaagtgcttagaaaggaaaagctttatgccaatcttaagaaatgtacttttcgaacggataaccttgtctttttaggttttgttgtgagtacagatggagttaaggttgatgaaaagaaagtgaaagcgattcgggaatggccaagtccaaaatcactaggagaagtaaggagttaccattgacttgctggcttctatagaaggttcgtgaaggattttagcactctagcagccccactcaccgaagttatcaagaagaacgtgtgattcaagtgggaacaagctcaagagaatgcgatccaaaccttaaaagagaaacttactcatgcccatgtcttatctcttcctgattttcttataacttttgaaatcgaatgtgatgcctctaagtaggaattggtgctgtcttaatgcaggataaaaagcccatagcttatttcagtgaaaagctaggaggatctactctcaactatcctacatatgacaaagagctgtatgctttggtgagagcactacaaacgtggcaacactatctttggcctaaggagtttgtcattcacaccgatcatgagtccctaaagcatctcaaaggacagcaaaagcttaacaaaagacatgctaggtgggtcgaattcattgagacgtttccctatgtcatcaaatacaagaaaggtaaagataatgttgtagccgacgcattatctcggaggtatgttttgcttacttctcttgatgctaagattgttgggttttgagcaaataaaagacttgtatgctaatgattctgattttagcaaaatatttcaatcttgtgagaagtttgcatttggaaaatattatcgacatgatgggtatttgttctttgaaaatagactttgtgtgcctcactcttctttgcgagaattgtttttaagggaagctcatggaggtggcttaatgggacactttgaagttgctaagacgtacaaggtaatgcaagaacacttccattggccgcacatgaaaagagatgtcgagcgactatgtgaacgatgtgcgacttgtaagcaagctaaggttcaaccccacagtttgtatacccctttacctattcctttgcatccttggaatgatatatctatggattttgtggtaggattgcctaggactaggactggtaaggattccatctttgtggttgttgatcgcttttctaaaatggcgcattttattccatgtcataaaaccgatgatgcatctcatgttgctagcttgttctttagagaagttgttcgtttgcatggcattcctaagaccatagtttatgatcgtgatactaagttccttagttaattttggaaaactttgtggtcaaagttaggaactaagttgcttttctctactattgtcatccgcaaaccgatggtcaaactgaagtggttaatagaaccttaggtactctcttgcgtgcattgattaaaaagaaccttaaaacttgggaagaatgcttaccacatattgaatttgcatataatcatgccacgcattctgattctaagcattctccttttcaaattgtttatggattcaaaaaccatct

SEQ ID NO: 149407 - DNA, 498 bp, Arabidopsis thaliana landsberg
tagcaaaccctaaaattgagaaagagatagagagagaaagatgggtagaggaaagatcgagataaagaggatagagaacgcaaacaacagagtggtgacgttctcaaagaggaggaatggattggtgaagaaggctaaagagatcacagttctttgtgatgcaaaagttgccctcataatctttgcaagtaatggtaagatgattgattactgttgtccttccatggatcttggtgctatgttggaccaataccagaagttatctggcaagaaactatgggatgctaagcatgaggtaattttgctctctttttaatctaaagtttctttgtctcaaaaatattccatggccaaaatcatgtaataaggttttaatttctttaccaaaaacatgtcaaaagacccttgaatctttaaccctagatgcagatctactatagtgttttgtctcaaaacatatattctgagctagatatcatgaaattgggttatttaatt

SEQ ID NO: 149408 - DNA, 550 bp, Arabidopsis thaliana landsberg; identical to SEQ ID NO: 39956
  unsure (1)..(550): unsure at all n locations

SEQ ID NO: 149409 - DNA, 563 bp, Arabidopsis thaliana landsberg
  unsure (1)..(563): unsure at all n locations
ctgctaacaagaacaaagctgtggaatggaaagaaaannnnnnnnnnnnnnnnnnnnnnnnnnnnnnnnnnnnnnntataatcatgtcatgattgtttcatgagttgttgttgttaacattgagattgatggcctttttatatgatgcagtacataccaggtaccaagatggtgttccctgggctaaagaagccgnnnnnnnnnnnnnnnnnnnnnnnnnnnnnnnnngaatctactgcgcataagtgaatctgatggtggattgattctgagttgttaagtctctatcagatgaggcttttttactttgctatattcttttgccaaataaaatctcaaactttttttgtttatcatcaattacgttcttggtgggaatttggctgtaatgtgtgctgaggctcactttatcgagtacatttgattttatgaggctcattttcctttttttttgtctagaaagcattttctcacttattattggtgcttacccttgaagcacaaaaaagattcgaattatataaaaactattaacaataatggagcaatacatttaacgttga

SEQ ID NO: 149410 - DNA, 2076 bp, Arabidopsis thaliana landsberg
  unsure (1)..(2076): unsure at all n locations
gagagctatncggcatgcaatccaggatcatctccctattgttgttgtgatcaataaggtacatcatgcntaaagtgtgaaattttatattttcatacatttgcatgacctttgcttnttgtctgcncaacaggttgataggctcataactgagctcaaactacctccaagggatgcttactacaagctgaggtatacaattgaagtcattaataaccatatatctgctgcttcaacaaatgctggagacttacctcttatagatcctcaagctggaaatgtatgtttcgccagttggcacagccgaatggtccttcacattgcaatcttttgctaaaatgtatgccaagcttcatggtgtggccatggacgtggataagtttgcatctcgactttggggagatgtatattatcaccctgatactagggtattcaagacaagtcctccagtaggtggtggagaaagagcatttgttcagtttattctggagcctctatacaagatatacagccaagtgataggtgaacataagaagagtgtagagaccacccttgcagaattaggagtgactctgagtaatagtgcatataagctgaacgtcagacctttacttaggttagcctgtagttcagtgtttggttcggcatcagggttcactgatatgttggtaaagcacattccttcacccagagaggctgcagctaggaaagtggaccattcatacactggaaccaaagattctcccatttatgaatcaatggtagaatgtgatccatctggacctctcatggttaatgtgacaaagttgtaccccaaatcagatactagtgtttttgatgtgtatggaagagtttatagtggtaggcttcaaacagggcaaagcgtacgtgtactaggagaagggtattcacctgaggatgaggaggacatgactataaaagaagtcacgaagctatggatatatcaagctaggtatagaataccagtaagcagtgcccctcccggttcctgggttttaattgaaggtgtagatgcatccatcatgaaaactgcaactctgtgtaatgcaagttatgatgaagatgtctacatattccgggctctcaaatttaataccctcccagtagtcaagactgcaactgagcctttgaatcctagtgagctgcctaaaatggtggaagggcttaggaaaattagcaaaagctatccccttgcgattaccaaagttgaggagtctggggaacatactattctaggcacaggtgagttgtacttggattccatcatcaaggacctcagggaactctattcagaggtccaagtaaaggtatctctaatttggctctatgactgtgatttcgttgtgcaactgattactaagatttgtttgtttcctctcgctttcttaaatttgtagacgtgggtatgtcacatctgatgttccacaacccggggtactcctgcttatatcgtgaaggttagttttgtgtgtgtctttctccttccttactttgttcctgttatttgagtgagtgatgatgattcattgagtgttgttgatgcagacttttctgcctgtgatagagtcgtttgggtttgagacagatctgaggtaccacactcagggccaagccttttgcctatctgtgtttgatcattgggccatagtccctggagaccctctagacaaagccatccaatatcgcccacttgagcccgcccctattcagcatctagctcgggaattcatggtcaagacccgccgtagaaaggtatttattatttcctttgttttagtgctcatgccaaaactttgtttctgattacgcttcaaccaagtagcaccagctataatttgatggatacatcctaggctagttatatgatagactcatttggttgtttggatcctcagtttcaggctctcaccgtatgtgtgtataatttgttggtattgcagggaataaacgaagatgtcagcgggaataaaattctttgatgaagcgatgatggtagagcttgcccagcaaacaggcgatctccatctgcagatgatttgatcatctctgcacttt

SEQ ID NO: 149411 - DNA, 1561 bp, Arabidopsis thaliana landsberg; identical to SEQ ID NO: 9074

SEQ ID NO: 149412 - DNA, 386 bp, Arabidopsis thaliana landsberg
gactttggaaaccctaggcgtcctagtcgattgcgagatccaaccttatctctctggtaagtttcttgctcctgatctctctcgctatttcttcatcggaaaatacacgatttcggctgtgttccaatctcttttcctaggtttggttaggttaggtttttagaagaagattcgtcttgaacgatgaagaagcctacgaacaagcaggctaaggcttaacattggtcttttgggacatcattaactctccggttccagatggttgtgaccctcgtgtggtccgtccgagtattaaacggcttttggagaatgaaggctactgtggtcctctcaccgtcactgctgttggcaaactagcgaacgtccctactgacaccctgagagca

SEQ ID NO: 149413 - DNA, 1085 bp, Arabidopsis thaliana landsberg
tattttccgatgatgaagcggcgatgagtgtcgtcgtcgagatagatggttattagatcggagagtactctggtgcggagggactataaggctcctccgagtcaagcaattcccaaagctcgattacaagtttggttctttagagtttgttcttgcattttggtttggacttgtttgattcagctcttttggcattcccaaatcttcactggtttaaccaatcacatttctagattctctctccctgttgaatcagttccattaacgcctcctcctcctccaagttagttttgttgtcttcttcattgagttttgttttggtgattgagaatttgagagatttaaggaaaagtttggattttttttgcagggaattacacaagtaatggaattttactagtgtcctgtaatggtggtttgaatcaaatgcgtgcagcggttcgtgtaactctctctcatttgctgaatttagggttttgcaatatcttgatgcttgttttgtttcagatttgtgatatggtgactgttgctaggctattgaatttgactcttgttgttcctgagcttgataaaaaatccttctgggctgatacaaggtatatgttggtgtctcatatcaatgatcctacaagatttttttgtagtttaaagcattcttttgtttcttccttttacagtgactttgaggacatttttgatataaagcatttcattgattcgttaagagatgaagttaggatcataaggagacttcctaaacgttatagtaagaagtatggattcaaattgttcgaaatgccgcctgtgagctggtccaacgacaagtattacttgcaacaggtttatttgcaactttctttggtgtttttgttttgcctccatgtgatgaatctgaaatgcttatgattgatcggattttttgtttgtttcaggtattgccgcggtttagtaaacgtaaagttatacatttcgttcggagtgatacgcgattggcgaacaatggtctttctcttgaccttcaaaggctgagatgccgagtgaatttccaaggactgagattcactcctacgtggcatgagcactaa

SEQ ID NO: 149414 - DNA, 1699 bp, Arabidopsis thaliana landsberg
cacaagtttaataaaaagatctagctcttgttagccctgtgagttgggattgttgttgcaatctgctgttcactccttaacttcacggacagtaatgagatggtgcatagtgtattgtctgtctttatgttctcctgtcttgctgaatctttgttgtgtacttagacatgaactagatgtgacaaatgctttttgtctggaatgcttcacgtaacttatctcccgtttcatgtctctaaatccattacatcttttgcaggtttttgttatagctgtgctggcagtgctacctctaataccaaagaacctctcaaatagggcttatcgtctatctttcatgggaactgcatgctcatctctatattccttatactccttatacggggtacgccatgtgaatttcatgttttctttctctctagtgatcatgcaatgcgaaatttttgttacttatgaattgtaattttataatctgcagaggccaagggcatggaatatgcaagggctgcaagtttattttcaatcaattgtggcagcaaaggatttcatctacttcatctactgccttacattcgtcacttcacatctctgtctcaagtgtaagaatttattgaaaactcttttgtgaatgtcttcaaatcacgtacattcttatgactagtctcattatcaatctgttgcagttgctttgattcccatcttgtgccgggcacttgaacaagtagccaagttcttgaggcgtaactttggtcggtccactatatacaggtagttgcatcgagctgattagcaggtttgaatgtagtagtaggttccatgtgtggattcttactgatgcttatgttgtacatgtgtcttgttctgtaatggttatcagaaagtacttggaagacccttgtgtgtgggtggagtcaaacactactaccctcaacatcttgtcatcgcaggctgagatagccattggcttccttctgattatctctctgctctcgtaagctctttgaacctgttagaagcgataatagtttattttcgcacttaagtttatattctcactaagttcccagctttgcattagctggtttcacttatctgaacaaaattgtcattttacttactgcagatggcaacgtaacattatacagacgttcatgtactggcaggtacgtatcatcttttggttgtagtcatcagttctttgtgatggctcaacattcccaagtagaacccctgttttctttgtttaatttgatccaagtgaacatataggaagaagcatttccgtaataacaccttttttgttgctttgatgatcttctgtcactgaaagtgttacatgggctaagaccatcaggatagtaatgagaactgtgttttgtttttttttggttaaaaatcttgtgttcttgttataaaatctgtcaagttcaaaaaccttttcctcatattcttcctaaaacaaagatctactaggttgtttgcaggattgttggttggatcttgagagttgttctcatgaactgagttttgttattttggtggcagctattgaagctgatgtatcaagcaccggtaacagctggttaccaccagagcacgtggagcagaatagggaggacggtgactccgattatccaacgttacgctcctttcttgaatactccggtcagtgccgttcagagatggtggttcaggtgat

SEQ ID NO: 149415 - DNA, 536 bp, Arabidopsis thaliana landsberg
acctgaacaacaacaacaacaaccccccctaaaatctcggaagccataatgagcagagcattgttcaggaagatagccgtcgacaccgctcggctcatacggcggaacgcggcggcgtcaacagaccaatatggtaagaccggagttgctcaatcgagaccttatttccggtcacgtcagcttctcgaaagagcaaaagaaacaggagtctcaccttctccttctttgggtttctcttcttcttcatctccgtcgaggattgggttcgttggatggtatcttggtatgattaaatcacgcccagttgtgaccaaaagtgtcacttcctctcttatttacattgccgccgacttgtcttctcaggtactaacttagaaattggcttttactggaaaaaggagtttccttttccaattatggtagctaaaaattacgtctttttgtgaaatttgtactctttagctatgagattcacaaatataaaatggcttaagttttgtttgggagatgtttctaggtctttgatactaatatca

SEQ ID NO: 149416 - DNA, 931 bp, Arabidopsis thaliana landsberg
tcatgtctctttttctatattttttcacattgcaggagctatgagctaatggagaaaaagctcaaggtatatgtctacagggaaggcaaaagacctgtactgcataagccggtgctgaaaggaatatatgcttctgaaggatggtttatgaaacaactcaagtccagcagaacatttgtcacaaaagaccctcgtaaagctcacctattttatcttcctttcagctccaaaatgttggaagaaactctgtatgtcccaggttctcacagcgattagaatctcattcagtttttgaagaactacctggacatgatttcttccaaatatagtttctggaataaaactggaggatcagatcattttctggttgcttgccacgactgggtaaaaattctactttatctactatgtcactgttttgtgatctcgatgaaacccatttgatccactttctctttgtttgttaaccatgctttcaggctccttccgagacgaggcagtacatggccaagtgcatcagagcattatgcaattctgatgtttcagaaggttttgtgttcggtaaagatgtagctcttcctgagacgactattcttgttcctaggagaccgcttagggctctcggaggcaaacctgtttcacaaaggcaaatacttgccttctttgcaggcggaatgcacggttaccttagacctctcctattgcaaaactggggaggaaacagagatccagacatgaaaatattcagtgagatacccaaatctaaagggaaaaagagttacatggagtacatgaagagcagcaagtattgcatctgcccaaaagggcacgcagtcaatagccctcgggtcgtggaggcattgttctatgagtgtgtcccggttatcatatccgataactttgtacctcccttcttgaagtgctaattgaa

SEQ ID NO: 149417 - DNA, 578 bp, Arabidopsis thaliana landsberg
aaaaaaaaatgtggacaggactctctcaaagtttacccacagaggaagaaaaatatatctaacaggagctcctcaatgtccatttccagacagattaatggcaagtgctctcaacactaaacgttttgactatgtttggattcaattctacaataatccaccgtgttcatacagttcaggtaatactcaaaacctcttcgattcatggaacaagtggaccacttcaatcgcagcccaaaaattcttcttgggtctaccggcagctcctgaagctgccggaagtggctatatcccaccagatgtactgacttcacagattcttccgactttaaagaagtctaggaagtatggaggtgtaatgctttggtctaaattctgggatgataaaaatggatacagttcatctatattggctagtgtgtgaaaagaatcgttatggccattgtatgtgtatcaattctctcgtatgtgtatcaattctctcgtctttggtttctgaagaattgttgtgtgtgtgtggtgttagtagtctaatttaaattgtttgtatcaatatacttaatcaactttgctttttc

SEQ ID NO: 149418 - DNA, 1910 bp, Arabidopsis thaliana landsberg
aacagaatgggtggcgtgaagaggaagattgctatagagaagattcagaacaaaaatccacgagcggtttcattctccaaacgtcgtaagggtctgtatagcaaagcttctgaactttgtcttctctcggacgcagagattgcgatcatagcgactcctgtttcttctaattccaaccccgctttctacagttttggccactcctctgttgataatgtcgtcgctgcttttctcgccaatcagcgtccttgtgatgaaaggttttggtgggaagatgagagtcttctaaaatcagagaatctggaggagttgagagaggcgatggattcaatgtcgactatgttgcgagatctcaaggagttggagaagcaaagagatcatcaaacgcaaaccctaattcatcagccgtgttctgcaagggtttgcattcaagattatgtaactgtgaatttcgatgggtttaacacggaagagcaaaccctagcggtttctgacaatagtaacaacaacggtttacttggaaacttggatgagtgcaatgaagattttgatgatctcgatcaaatcttcgatacggtgacaaactactgaatttttatcggtgaatttggagatggatgatgtaactgtgaattctgaagggaacacggaagagcaaaccctagcggtttctgacaatagcaacaacaacggtttacttggaaacttggatgagtgcaatgaagattttgatgatctcgatcaaatcattgagtatttgacaagctctgaagctttatccatgaatttaaagatggatgatgtctgatgcatgcctctatggtgacaatttgtgtttatgttgaaattggatccttgatttaagtattgcttcggtttaatatttctttgtatgtcttttatcagcttatgactttatttgatctgcgtgatattttcgtatatctaaccaaaacataagagcatccccaaccacaatacaccaaattttaacaccaaatttgatattttggtgtttcaattgttttatcatctccaaaccataacaccaaatttcacactaaaaatattactttttattattatattattaaacttaagattttctttatttttttaatagtttgatatacataacatatttcataactaaattattttaacttaattaatataaaattacaatcgataaattgaaaataacaaaaaaaattacattgtactaattctcagaattagtatattcggaccacaagtgttcaattaatgcatttcgaagtttaatatgagcttcacggtctttgattttcctgtgtcgaactaaaaattcttgaaatcgaccatcatcgatcgtctcccgccgtttcatcttctagagttgggacctcggctctttcttcaatacttgcatcaaaatcacgttcatcctctatgtcatattatgcattatgatacaagtagttataatatcatgtaacactttcttactccaaaaacgtgttggtccagccacaattgcaaaatctgagatctttcatagtcaaccaagaccaaaaagatctttacaaactcgaatgacaacgattctttctgctgtctccaagctaagaggatgtgtaaccagattgaaaacaagaatcctagcggtgcttccgagcatgacattgtaaatatacatacttgagttagttgttcatgctctaccattattaatttattttacttgctaattttcatttttcttgtcaatatcaaaacagttaaaccaagcgaagatgttattaacacaatatggcaattacaagacaggattcaaattcgatcatgtttggcctatccttaaaggtattgagaaatttcaaataaccacattaatagaggcgatgcatttcaagaagaaagtcgtaatg

SEQ ID NO: 149419 - DNA, 2079 bp, Arabidopsis thaliana landsberg
  unsure (1)..(2079): unsure at all n locations
aaatcgctttactaatgcgtaatgggtctcgctaatcttcgagagtcatcatcacttgngctccgttcaatcgcgttctccatcaagaagaggacacagagaacacagttctccatcaacccttttgatccgagacctatgatagccgttcactcaagcggcgttgtagcggccatcagcgaggatttggttaaaacgctgcgtattagcactgtcggtagaaaacaagagaagcaggaagaagaggagaagtcggtgaagtttaaggtgagagcagttgcgacggtgaggaacaaaaacaaagaggattttaaagaaactttggttaagcatttggatgcttttactgataaaatcggtagaaacgttgtcttggagcttattagtacccaagttgatccaagtaagtcattacaaattttcattgtgggtatttttaagtcgtctaatttaacatgggtttgggtcaaagtttttttttttttcttggactaatttacccaaaatttgttgtcaaactttttgtaacagaaacgaatgagccaaagaagagtaaagcggcagttttgaaagattggtcaaagaaatcaaattcaaaggcggaaagagtccattacacggccgagttcacggtggattcagcctttggttccccaggagccatcaccgtgaccaacaaacaccaaaaagagttctttcttgagagcatcaccatcgagggtttcgcatgtggccctgttcacttcccctgcaactcttgggtccaatctcaaaaagaccatccatccaaacgaattctcttcactaatcaggtaattaattaaatcttgaccaaagcataagcaaaatcacatttaatgtgaatttgtgaatatcatatagtcatgtcatggtgggtccaaatatccaagactggttttaattaacaaatgtgacgtccaactacatatcttggattgaaaaattaactgttgttgaaaattttcttccgcagccttacttgccgagcgagacaccgtccggtctaagaacattaagggagaaagaattggagaatctaagaggaaatggtaaaggagaaagaaaattatcagacagaatctacgattatgatgtgtacaacgacataggaaatccggacatatcacgtgaactagcccgtcccacacttggtggccgtgaatttccttaccctagacgctgtcgaaccggccggtcttcaaccgacaccgatatgatgtctgagaggcgggtggagaaaccattaccgatgtatgtaccaagagatgagcagttcgaggagtctaagcagaacacttttgctgcatgtagacttaaggcggttttacataaccttataccttcactaaaagctagcattttggctgaggacttcgctaactttggtgagatcgatagtctttacaaagaaggcttgcttctcaagttagggcttcaagatgatatgttcaagaaattccctttaccgaagatcgtcactaccctccaaaaatcaagcgagggcttgcttagatacgacactcctaaaatagtttcaagtaagtacattaattatttcttacagcttttaatcttttgacagctattacaacatttaattatgtcactaattcgtttatctgaaaaatatttcgaaagattaacacatgtgccatcacatgcccgtttatggaccaatccttaaaaaggaatcctaatgattctcattacctttattttatggtttgctatagttctatcacttccgtgtgtatttggaaccaacagtgaaagttccctttagattcccttcaacaaggaaatatgattcacgtgctctattcatttgtttatttgttgtttccactaaaagataaattttgctatagtggtggactggtggtggtagttgtaagagattgcttttatataattaaaagcgtggttctgttttatattactagctctttaaactgcttacttataggtcttgttattatatagtttaacttgtctaatgaatcttttttactttaatgtagaggataaatacgcatggcttcgcgatgacgagttcgc

SEQ ID NO: 149420 - DNA, 4139 bp, Arabidopsis thaliana landsberg
ctagaaaactctatactgtcacacgactcccatttaaattcttaagtttttgtatctatacggataaatagtgaaagatgtgatacaacaattactaaaattctttttacaaatcagaaaatctaccagaattttttctgaataggcaattactcgtcctcaaccaaaatgaataagagatgtagtgaaaattatacttgtcgaaaacggtccagtctaaattgataacgcaaaatcgagtaaaaaatgaacagtcaataatacttgtcgttgaatagtaaagaaaagtagaaaacttaggaaacatgaaaatgtcgggatgatcatgacagacaatgaatctgcacaatcttccttagaaaatacaaacatgattttgagaaaatccaaaccaatcctcacattttctcgtttcaaaacaactcgggaattgcttttgtttactttactaagatatacgtaacaaatgtataaccacagcaataacataaataataatgacctttcattagtacataaacctaaacctttactcacatcttttgatcactaattgtccacactcttaattagttatacaacaaaatggagaagaagcgatcatactacgccttattgatacctactctcttgaccgtatggctagcatgcgcgggtcattcttgtgcccgacatgctaaggcaaaaccccccatagctggaccaccacggtgtccaaactgcggacctatggttgtaccttatcctctaagcacgggtccaacctgcggggatcaagcctataggataaattgtgttggtggtaagctttatttcggtgccctccatgggtcatcttatgtcattacgtccatcaactcggtgacccagaggatcgttctacgcccgcccggtcttgctagctcggtatcttgtatctcagctgatgtctctaaacagggcctcgagcttgacccgcatctccctttcagcatcactagcagcaacactatcttgctccttaattgctctcaggctatgctgcaggtaaggcaaaaaagtttagtttgttaggtgtgaagattgtagaacaatattggtttacgataaaatttgagatcagttttagtttggttattaggtttgggttcaatgaaagtagatttcgattaaaatgtaatggaacccggttttcaggactgaccaagagattttggggtctgcaggcgccaatagattgtagtcctactagcttatgctacagctacatcaagaacaatgcatcaccttgttctaaggctcccttgtgttgcaccttcagaaccgacgggtctcaaaccgcttacacgataaggatcaacggtgggggatgcctcgcgtaccaaagcttcgtggggctgaatccaaacaaagaggttcctcctcccgggaaaaaatggcctgacacggggctcgagttgcaatgggcattgcctaaagaaccagtttgcaaaactgatgtagattgtaacctcttgttgggtaaatcaaaatgcttgcctgatccaacgagtctcggcctgaaacgatgctcctgcaaaaaaggtttggaatgggatccggttaacgcaatatgtaagtaaactgcatagcaagtgaactattcagaacaaatttcttgaatcagatcattgtgtttgattagttcttggcatacatgtaataggtggtaaatgtcgccatgggaaacactgcaaaaagaagaagaagaccgttgttttcgcaggtacagaggatgaacattcgaaccagaacttctattcaaatgcctacaagaattgtaaaccatcttaacttctttgttcttgaaggtgcggctgttgcggttgtgggagttacgctagcgattgcggtagcggttattgcaaccaaacatagccaccaaaaggttaaaaaggatatccacaagaacattgttaaggagcgagaagagatgcttagcgcaaattccactggaaaatcatcaagaatcttcactggcagagaaatcacgaaagcaaccaacaatttctcaaaagacaatctcataggcactggaggttttggagaagtgtttaaagctgttcttgaggatggaaccataaccgcgatcaaacgagcaaagcttaacaacaccaaaggcactgatcagatcctaaacgaagtccggattctctgccaagtcaatcatagaagcttagttaggcttctcggttgctgtgttgatcttgaattgcctctcttgatctacgagtttattcccaacggaacgctgttcgaacatctccatggcagttcagaccgtacttggaaaccgctgacttggcggcgcagactgcagattgcataccaaaccgctgaaggattagcttatctccactccgcagcacagccacccatttaccaccgcgacgtaaagtcaagcaatattttgcttgacgagaagctaaacgccaaggtttcagactttgggctgtcaagacttgtggatttgacagaaaccgctaataacgagagccatatcttcacgggtgcgcaaggtacattgggatacctcgatccagaatactaccggaatttccagctaactgataagagcgatgtgtacagcttcggggttgtgcttctggagatggttacatcgaagaaggcgatagatttcactagagaagaggaagatgtgaacctggtgatgtatattaacaagatgatggatcaagagagattgactgaatgcatcgatccactgctgaagaagacagctaacaagattgacatgcagacgatacagcagctcgggaatttagcatctgcgtgccttaacgaacggagacaaaaccgaccttcgatgaaagaggttgctgatgagattgaatacatcatcaatattctgtcacaagaggttactgagacatagctgtcttagaaaattaccaaaatgacttgtacccttgccctgtttccggttatggattggagaaaaacaattcatagaaatggatttttgtaaaatcattgagatgggttttgtttgatatcatatcaagatccaaaacatggtatgagacgatatagcagctaaaaaccaattaaagaaagataaaccaacagaaatctgaaacctatcgcaagagagagcgggttgctgcctgcaaaactcagtgtctttagtgaataaaacagtaactcctgcagaggaacacgcggctgcaagagcgagaagtgcagtgacctgcagaattccaaaagaaacctatcaaacacataacctttaaaacaacaagacaccaacagtgaatgagcattactagctataatgaaatggagataagtttattacccaatcaccaacagtgaaaaggctcaataagatagggcttcgtaaatcactttttctccttatcgcatatacatcaatacacgcaagtccaaagctccatatcaattgaagacccatagatgcgactaagaagctgaaatcattagcaaaagccttcatcatcttgtatcttttgagataaccgtatccagtagtcaaaatatataaacaatcccatttacacatatttttaccaaacaaaaacagaataattgtcaaagatccatgcaaatgtcaaacggctacaaatcatacgcgataactagttctcttagctctttcttcaaacaggtatacaagacaaagttaagatagatttttggtatatcttcaactaaacaaaaccaaaacaccaatgagattgaagatagacaattaccagaaagcagtgtaattagagaagtcgtaagaagaaaccataacaccaatggaagcagcagcagttgcacattgccctaatctcagaaacaacccactcattgttccaggactcccaatcatcttcttcattgatcagaacccaaaaacaaacacaataaacagaacaaaaccaagactttctatcctgttcctcaccaaaatccccgggggaaaaaaatcaggaaaaattgatcataaaaaccctaaacccataattttattcaggaaaatttcacgaacccaaatctcaaaagttgacttatgatcataaatcgtacggaattgggtaattaagagcatatatcaccaccagaaaaccaatattaaaaacgacaactttttt

SEQ ID NO: 149421 - DNA, 1421 bp, Arabidopsis thaliana landsberg
  unsure (1)..(1421): unsure at all n locations
attgatgaagaagaaaacgaagaagaagactcttcaaatgctcgcgcgaactcacttctgacgaaaaccatacttcctcagtctcattccctttccgacgaactattctcctgaagaagaagacgaaaatggcgaacaagctcaaagtcgacgaactccgttcaaaactcgctgagcgtggactcagtactaccggaatcaaagccgttctggtatttctctgaattgcattgaaatactctttctattttgttgatattcgaatttgtttattgggtgtttcgtgtaggtggagaggcttgaagaggctatcgcagaagacactaagaaggaagaatcaaagagcaagaggaaaagaaattcttctaatgatacttatgaatcgaacaaattgattgcaattggcgaatttcgtgggatgattgtgaaggaattgcgtgaggaagctattaagagaggcttagatacaacaggaaccaannnnnnnnnnnnnnnnnnnnnnngcaatgatgctaataacgtttccaatgcaccagtcaaatccagtaatggtttgttcaattctctggactattgagaaatttggtaaaaattgagtctttttaatgttgttattgtcattgtgtattaagggacagatgaagctgaagatgacaacaatggctttgaagaagaaaagaaagaagagaaaatcgtaaccgcgacaaagaagggtgcagcggtgttagatcagtggattcctgatgagataaagagtcagtaccatgttctacaaagggtgaggattatcaaccttatcttgatgtttttgcatcttattgtgttcatgaatgtggttagaactgggatttttgtttaatgttgtagggtgatgatgtttatgatgctatcttaaatcagacaaatgtcagggataataataacaagttctttgtcctacaagtcctaggtcagtcttccaaaaccttaaacaataacttcaaagattaataaggcaatgattgtcttgttcgagtactggaaacctcttgaagcagcttttgatgactctttgtcattcttcttggttccagatactatcatcattgatctatcttatctattgtgcattgtgtagagtcggatagtaaaaagacatacatggtttacactagatggggaagagttggtgtgaaaggacaaagtaagctagatgggccttatgactcatgggatcgtgcgatagagatatttaccaataagttcaatgacaagacaaagaattattggtctgacagaaaggagtttatcccacatcccaagtcctatacatggctcgaaatggattacggaaaagaggaaaatgattcaccggtgagtgttttggaatcctcacttctctatctcttcttactatttgttgtgtggtatgatccaagggc

SEQ ID NO: 149422 - DNA, 774 bp, Arabidopsis thaliana landsberg
  unsure (1)..(774): unsure at all n locations
tataaaccattcttctccttcctctcatttttatatattcttctccttgtccttccttactctctatatttttctcaattctccgatttgatccaacgatttcacagatctctgatctaatggcatccaacggtgataaaggactgatcgttagcttcggcgagatgctaatcgatttcgtccctaccgaatcaggcgtctcactcgccgaagctcctggattcctcaaagctccaggtggtgctcccgctaacgtcgcaatcgctgtttctcgtctcggtggacgatctgctttcgtcggaaaacttggagacgacgagttcggtcatatgttggctgggattttgaggaagaacggtgttgatgatcaggggattaacttcgatactggagctagaactgctttagctttcgttacgttacgtgctgatggagatcgtgagtttatgttttaccggaatcctagcgccgatatgcttcttcgtcctgatgaactcaatctcgacctcatcagatccgtacgttttaaatctctctctcttcgctatagatttttacgattttgggattgtagaaagccagatctagaggatnnnnnnnnnnnnnnnnnnnnnnnnnnnnnaaacgaaattcgattaggagtggtagttattgggaatcgcgttattgaatttagaaaacgtaaaagatgatctcactcactggcggngacttttctattagatcttttttatgttcgcgggtcttatttagatccacgtgatgccacgtgat

SEQ ID NO: 149423 - DNA, 750 bp, Arabidopsis thaliana landsberg; identical to SEQ ID NO: 5836

SEQ ID NO: 149424 - DNA, 1158 bp, Arabidopsis thaliana landsberg; identical to SEQ ID NO: 6526

SEQ ID NO: 149425 - DNA, 1094 bp, Arabidopsis thaliana landsberg
gagaagttactgaggtaatttgacatcttcttacctatactatggttgtgatttaatttatcttgtgctgagtttggtgtgatatcaacaggttaggataatgagggaaaaggattctggtgatggaaaggggtatgcatttgtaacattcagaagtaaggacttagctgctgaagcaattgatactctaaataacactgacttcagagtaagttctttgacccgattcttagtaaattgtctggctcttatttgtttatttacttgatgtaattcaatagggtaaaaggataaaatgttcgactacccaagcaaagcatcgtctctttcttggtaatgtccctagaaattggatggagtcagacattaagaaagcagcaaatagaattggtccagtcgttcaaattgtcgaactcccaaaggtttgtctcctgcaacttggataagtttcagcctatagtgtatattaagttagttctgtaactttcatctcaacttcacgtataattgtaaatgtagaaattaatacatttcttgatcagtttttctatttggttttgttaaaatcacaggaaccacaaaatatgggccggaatcgtggatttactttcatcgagtattacaaccatgtatgtgctgaatactcaaaacaaaaatgtcaaatccgagtttcaagcttgatgataatgccccaactgtaagctgggctgaatcaaggagtggaggagaaggagactcttctgcctctcaggtttacttctttagaatctatcttacaaataaattatagtagcagcaacagtaaccttaccaacaaaatgtcactaccaagaaattattatcatagagacgtgttctgcaaatattcttctttctaaacaatgaaaagctgtgtggaatgattgcaggtcaaggcattgtacatcaagaatttacctagagatataacacaagaacgtctaaaggcattatttgaacatcacgggaaaatactgaaagtggtgatccccccagcaaaaccaggaaaggcaggcaccagatacgaatttgtgccctacaaaaagaaaacaagcgtaatgcgagctttaaaaccc

SEQ ID NO: 149426 - DNA, 790 bp, Arabidopsis thaliana landsberg
atgaaggctatatgtgatagatttgttccttcaaaatgttcttcatcaagcacaagtgaaaagcgtgatatatcatccccgacatctctagtttcagattccgcgtctagtgataacaagtcaaacttgacgttatgctcggatgtggttgcctcttcctccccagtttctcaactgtgtagggaagcttcaacttcagggcataacccagtttgcaccacacatagtagttggacagttattttaaaaacggcttctatggctagcggggcaattaggagatttcaagaccgtgtattagggccgagtaggacgggtatttccagcagtactagtgagatatggctcctgggtgtctgttataaaatctcagagggtgaatcctcagaagaagcagatgctggccgtgtattggccgcattcagacaagatttttcatccttaatactgatgacatatcgtagaggtttgtatgctccgccccctcaaactcaaaccagcataaaactgttgacagaatactcactgtggcatttccaggttttgagcctattggagacacaacttatactagtgatgtaaactggggttgcatgcttcgaagcggccagatgctcttcgcacaggtagttattattatcattttgctggaggcttcagatttcttaatgcatggtctaaaattatgtatcttcaacaggcgttgctatttcaaaggctgggaaaagtcttggaggaaaaaggattccgaggttagctttgttatccaatatatgttctagtaaataat

SEQ ID NO: 149427 - DNA, 2034 bp, Arabidopsis thaliana landsberg
  unsure (1)..(2034): unsure at all n locations
atccggcgaaggagagaatccagcaaagatagagaaagagaaaaaaaaacagaaagaagatgagagagaagatgagagagaagatgagaaaaaggatgtttcagtaattttatttgcctttccgacaagatactattgtccatagtcatttactctatttttattgatttcatagttatttcttacatatactctaaattttaattgacatgtgatgatcgatgatcatttgcatccttgttagatttgagtttaatcatatactactaatttatcatttgttaacttaaatgttaagatttgaccgttatttcaaatttgggctttagtgggccattaaggtgggctgttactaggtcgagttataatgacatgtgaggattgattttactcatgagtaataaaatacagcttttttattccatgacctaaccattattcaagttgcaaatggatcgactgcgaaactggattagaatataaatccatcttttctccacaactatagtataaataattaatgcatcgatcgttgacttattgggcttggcccatgtaaactaagcatttaggcaaaaaccagatccaaccctaacacgtggccgtatataattggaagttcagtaacaaagctcgtcaagcgagtcaaacgttcgcaacttgtaacgctattttgctctctcgattcctttctctcttctcttatctttgctgcttcttttgctccgccgtcttcagctcagtcctgcttcagctctccggcgaaattggtaagttcttcttccctttacctcaaacgtttcttattgttccgtgaatctattgtgattttggtaattcgctaggatgtctttagtgtaatccattgtcgtgtttcttaggttccttagctttttagttttcgccggattttgtttttgtgtgagtggacagtaactcgattttggttgagaaattgacggaaatctcaaacgattcgcagatcccgaagtagcttgccattgattttactaatccattagcttggtagtgataaaccttgattttcataactttgattgtaattggatttcgttattggtaatgcatttcagaagaagaaggttgcaatggctgatcccagtgaacaaaaagaaaaggttgtgaaagaaaagaaagaaaaggttaagaaagaaaaggttgtgaaagaaaaggttgcaaaggcttcttcgagtggacagaagaagaaggacgtcaagaaggaaacgggtctcggactcagtgttaagaaagatgagaacttcggggaatggtattctgaggtttgtttatatgttcaacgatgagtgtttccacattcttttttgtcccaagctggttatatgacatctgcttttctttatgtctgtctaggtttgtaaacaagatatgattgagtactacgatatctctggatgttatattctacggccatggtcaatggccatttgggagattatgcaagtgagtatcatcgtttctttattgtgatttgagttaatcacattgattgaaagtggaatcaagtgtgtgaaatgatcattttgttttcattggtttttccatagattttctttgatgcggaaatcaagaaaatgaaggtcaagaattgctatttccctctgtttgtatctcctggtgtcttagaaaaggagaaggaccacatcgagggattcgcccctgaggtttgtatatcttgtagatcttgtttgtgaagaaaaaggccttcttataacagatctcattgttttgtttaggttgcgtgggttacaaagtcaggtaaatctgacttggaagtcccaattgctattcgtccaaccagtgagacagtgatgtacccttactacagcaagtggataagggggcaccgtgacttgcctttgaagcttaaccagtggtgcaatgttgttagatgggagttcagcaaccctaccccatttatcccggattntattatcatatactctttctactttgtctgttcattatcatgttagtactttttttcttgagcta

SEQ ID NO: 149428 - DNA, 652 bp, Arabidopsis thaliana landsberg
acagtttttagatggctaagatatattccccttcttttcccggtactctctgtctttgcatttttactctcttgacgctaatgttcattcgggtttccgctcgacccgcgacattcgtcgaggatttcaaagccgcctggtcggaatctcacatccgtcaaatggaagacggaaaagctatccagctcgtccttgatcagagcactggtacaccaacgccacagttatatttttaaacggaaacattttgaaataaaggtgttttatgtaattactctaactgacatgtcatatttgtctttaaaggatgtggatttgctccaaaagacaattctattctgacgagtgagcatgaagatcaaaactcattcccgaagactctgacggtacggtcaccgcattctacgtaagtctatcatataactccactagttttgaatttttacacattcacacaacaaaaaataacattttcttgaaacactaacggtcaaatcattgatatgtctatagatgaactccgatacggccacggtgagagacgagctagatattgagttcttgggaaacagaagtggtcaacctaactcagtgcaagcaaacatagttgctcatggcaaaaaaaatacagaacaaagagttaatcatttgg

SEQ ID NO: 149429 - DNA, 1359 bp, Arabidopsis thaliana landsberg; identical to SEQ ID NO: 60702

SEQ ID NO: 149430 - DNA, 1286 bp, Arabidopsis thaliana landsberg
gatggttcgggagattactgctctgttcaagacgcaatttattttgtacctttaggtaacacttgcagaacggggattcgtctctcacctgggatttatcggcaacctgtgtatgtacccaagaggaagaatttcattaccttcgccggaatctcaccggagatcacggttttgacttggaacaatacagcttccaagattgagcatcatcaggtaacgttgctatgttcttagtgttcttggtacgtgtacggctctgattggtttgttttgttttgcaggcgtctagagtcattgggactggtacgtttgggtgtgggagtgttattgttgaaggtgaagattttattgcagagaacattacttttgagaactctgctcctgaggtaatcatttaaagtctcttcctttattattacacaaagtttagaaactttactcaacttagtttagggatctataaagtcgcttcctttgtatgttcttattaatgttcagattcaaagtttggaaatttcttctgctgagattagaatcaagagttgtgtatggtgaatgttatatttggtaatgcctagttttgttatttgaccattttgtatatagggatcagggcaagctgttgcgatacgagtcactgcagaccgttgcgccttttataactgtcgatttctcggctggcaggttcgtttagcagtcctttgattcaaatgatttgtgtaaacttgtggaaactttgtgttggttgttcatagtttagatgtggtatattgctagtaggcttatgcaatcttgttatagcttatttgcaaaatgtgaaatgcaggatacattgtatttacatcatgggaatcaatatttgaaagactgttacatcgagggaagtgtggatttcatatttggaaacagtaccgcactcttggaacactgccatatccactgcaaatctcaggggtttataacagcacaaagccgaaaatcgtctcaggaatctactggttatgtattcttaaggtctgcttcacaaggattacttaccgtttcttacttacagcttctacattcttccaaggaaactaagtttctactgacttgtgtgcaggtgtgtgatcacgggcaatggtcagagcgggtatatgtatctcggaaggccatggggaccatttgggagggtagtccttgcttacacttacatggatgcgtgtatcagaaatgtcggttggcataactggggaaacgcagagaacgagagaagtgcggcttttatgagtataggtacatcatat

SEQ ID NO: 149431 - DNA, 607 bp, Arabidopsis thaliana landsberg; identical to SEQ ID NO: 15163

SEQ ID NO: 149432 - DNA, 413 bp, Arabidopsis thaliana landsberg
gcttgttgcaccgtcttccgtctcctcctctttccctctctctctctctccaaaccagtcctacttctctctctagaaacctagggaagaagaagaagacggtgaagcgagcgatgtcttcggacgacgaaggaagagaggagtatctcttcaagattgttgttatcggcgactctgccgtcggtaaatctaatcttctatctcgttacgcacgtaacgagttcagcgctaactccaaggcgacgatcggagtcgagtttcagacgcagagcatggagattgaaggtaaagaggtcaaggctcagatttgggacactgctggtcaggagcggtttcgtgccgccacttccgcttattaccgaggcgctgtccgggcccctgttcgttaccacattaccccgccgccccacttt

SEQ ID NO: 149433 - DNA, 832 bp, Arabidopsis thaliana landsberg; identical to SEQ ID NO: 52904

SEQ ID NO: 149434 - DNA, 1441 bp, Arabidopsis thaliana landsberg
  unsure (1)..(1441): unsure at all n locations
gcttcgtcgtctgacatcagcgcacgttagccaccgtcgtcgatatcatacgcccaccaccgccgtaggtaattttgcgccccttcctacacgccgtttcgagctgatttaaaagcgaaaacgaaaccctaactcgtcgatttttccatcacttaagctctgcgtttgttcgacgctggttttatcaaggatcgaatctgagaattgattgtttaaaattggtgaatttgattcaggggagattcttggattgattttccaatttttgatcaattcgtcactctagtagatctgaggcaatactctgcgaacaaatttgactgggagaagaatcagatctaggtttaaggtttgatgcgttggggatgttcagtgaccggcggaagcgggaaatggctaatcatggagatggaaacaagttctgcgtctgtgaatctgaataagtcttatggatatcaatctcatcatcagtataatcaatctggaggttatgggcgcnctnaanntnataaaagaagaacttcaagaattgttgtaacgtgtcacacaagaaatgattgtgatgacagcgtaaccaaacaaaactgtgacggagatgatggatttctcggatctttcctaggtgaagttgtgagagagcgtgaatcactaccacgtccactccgttgtacggaagagcaagtcaaagatgtgaagatagtcatcaagatcctacctattttcatgtctaccattatgcttaactgttgtctagctcagctctcgacgttttccgttcaacaagcttccacaatgaacacaaagctcgggtcctttactgtcccacccgcggcattaccagtttttccagtggtcttcatgatgatcttagctccgacctataaccacctcctcctccctctagcgagaaaatcaacaaaaaccgaaaccggcataacccaccttcaacgcatcggaacagggctagtcctttccatagtcgcaatggcggtggcagccttagtggaaacaaaacgcaagcacgtcgttgttagttgctgctcaaacaacaactcatcttcttattcttcttcgccgcttcctataacgtttctttgggtggctattcaatatgtgtttctcggatcagccgatctattcactctagccggtatgatggagtttttcttcaccgaagctccttctaccatgcgttcccttgcaacctcgctctcatgggcgtctcttgcgatgggatattactttagctctgttctcgtctcggctgttaatttcgtaacaggcttaaaccatcacaatccatggcttttgggggagaatctaaatcagtaccatctcgagagattctactggctcatgtgtgtgcttagtgggattaatttcttgcattatctcttttgggctagtcggtatgtgtaccgggcgaaccaagggtaaatcc

SEQ ID NO: 149435 - DNA, 1619 bp, Arabidopsis thaliana landsberg
gctatgcttattgcttcgtaagtgttttatgattcttcctctcttgtgtttgttgtcattgtttatgtatggaagctaatggaagtattgaaatgttgtaggaagtatgaagagataagtcctcctaaagtggatgatttttgttacattacggataatacgttttcgaaacaagatgttgtgaagatggaagctgatatacttcttgctcttcagtttgagttgggaagaccaacgattaatacttttatgaggttagatttgtgtgtattgctgatgattacttattggatcgtcttagtttcattggtctgattctgtgtgttggtgtttgtgtagacggtttactagagttgcacaagacgatttcaaagttccacatttgcagctagagcctctttgttgctatttgtcagaattgagtatattagattataagactgtgaagtttgtgccgtctctgttggctgcttctgctgtttttctcgctcggttcatcatccgtccgaaacaacatccttgggtaagcatatttgtctcagtctctttcaggttttagtctgctgtggtcattgtttagaatgagacactaatgatttatggttgtgaatatgtaaacagaaccaaatgttagaagagtacacaaagtacaaagcggctgatctacaagtgtgtgttggaatcatacatgacttgtatttgagcagaagaggaggtgctttacaagctgttagagagaaatataagcaccataaggtacttaaacattacacattgataaaatcatttgaataagcaaagctttcttgatacttaatgttgcttcttctcggtacagttccaatgcgttgcgaccatgcctgtttcaccagagctgccggttaccttttgggaggatgttaccatttgatctgaggttatgctatcttaagcaaatgttacggagctggattaccgaatcttgtttcaaatagtataatggacacagatcttcaagtgaagctagaagagtaagaaatatagaagtgaaggcaggagcaaataagtctgcgttatgtgaagatgtgtgatgtattattgaaatctcttcttttttatttacaaaattttagtgtgaaattcggaataatataattttatacaattatgcaatatgatataagtatttatgtgacatgatcttattttgtttaagcattgagcctacaacggtatgtttaacttaatgaaaatcctagagggctaaaactctagaagacatgttgttatttaaagaaactaataaaatctcaagaacaaaagaaaagaacagattgtctatgagattgataatcaagtttcctaaagagagattaaacttgagaaacaacaaacaagggagctttagcgatgacttgaaaagtttcggtgtgaagatccaaagacaaatccatggtttcaactttcaccctcgtgtgaaccagtgaagtgagccatcaacatacacaggatcttgggtgtgagaaaccagataaggggatgcaggacaacgtacctccaagtgttggttgcaaaatcaaaaacttcacaagttgtagcgttgtcgtttaggcctaactcagcggaataagcaaatcaaa

SEQ ID NO: 149436 - DNA, 675 bp, Arabidopsis thaliana landsberg
attgttgcgaattgcggtgactcaagagcagttctttgtatgaatggtaaagcagtacctctttctacatatcataaggtcaggctttatctctttctaactctttcttgattcgttcgatttagtggattttaactcttgtttacgtttgaaaatgaacagcctgttcgtccggatgagctggatcgaatccaagaagcaggaggacgagtgatatactgggacggtgcaagagtcttaggcgttttagccatgtcacgagccataggagacaattatttaaaaccgtacgtcacttcggagccggaagtgacggttacggatcggactgaagaagatgagtttctgattctagcgacggacggactatgggacgtagtgacgaacgaggcagcgtgtacgatggtgcgcatgtgtctcaacagaaaaagtggtcgtggaagacggcgaggagaaacacagactccggggaggaggagtgaagaagaagggaaagaagaagaggagaaggtggtggggtcaagaaagaacgggaagagaggagagatcacggacaaagcatgtacggaggcgtcagtattgctgacgaagctggcgttggcaaaacacagtagtgacaacgtaagcgtcgtcgttattgatctcagaagaagaagaaagagacacgttgcttga

SEQ ID NO: 149437 - DNA, 1113 bp, Arabidopsis thaliana landsberg
catacacgagctggtgagcgtgttgctgttgattcgagaaagcgtaaccctgctgattttgcattatggaaggtttgaatatattttttctttttattatattcaatttgaggcttgcacagtatatgatgaagtgaagtttgaacataattctatgcaggcggcaaagcctgcatgagccaagttgggagagcccttggggtccaggaagaccaggatggcacatcgagtgcagtgcaatgagtgttcattatctgtctccgaaatttgatattcatggaggtggtgcagatctaaaattcccgcatcatgaaaatgagatcgcccagacatgtgctgcatgtgaggatagtggtgtaaattactggttgcataatgggcatgtcactatcaacaacgagaagatggcaaaatcaaagcacaactttaaaacgattagagaagtatgtttcttatttgctactagtataataatcaactttttctttggatgttgttcccatggctaaatgcagaattattgacaggttttcattttttgtttcaatctgtgtagataaccgctagctaccatccattggctctgaggcacttcttgatgagtgcacagtaccggtctcctctgagtttcactgcctcgcagctagagagttcgtcagaagctttatactatgtttaccaggtacagtgcttcagatttgttttcaaaattatatcaaacttaactagcatgtccatttgcagtattttgtattaggaatatgtgaactaaaagtaagacaccatcataatttatgcccagttctgactttaatctctgatttttgtttatcagactttacaagatcttgatgaaggtctgtcaccatatcaagacgcattgtctgaagatggtggaaaatctgaacaaactgcagaaggaaaagacatcattaagaagctaaaaactgagtttgaatcaaagatgttagacgatttgaatactgcccatatactaactggtgcttaccaagatgcattgaaattcatcaatgcttcactcagcaagctcaaggttcttgcctcttgccttcttctcaaaacagagccacattgccttcacaactatgcata

SEQ ID NO: 149438 - DNA, 1267 bp, Arabidopsis thaliana landsberg; identical to SEQ ID NO: 57793

SEQ ID NO: 149439 - DNA, 1059 bp, Arabidopsis thaliana landsberg
agtgctcttaaagacatggccttgttaagaatcaacagaacagagctgaagaagccattgacgatactcaatcctttagagatctctgttcaagacaagctcaagagtcattagacaatgtcctcatcgatctatataaggtaactaaactctgaccgagaccattctcttgtttctctcggttaccgttttattagatagtgaaattgacaaacttgggattccgaattttgttgaacagaaatgtgggagaatagaagagcaagttgagttattgaagcaaaagctttggatgatatatcaaggagaagcattcaatggcaaaccaacaaagactgcgagatctcatggcaagaagtttcaggtcaccgtcgagaaggaaacctctaggatcttggtaagactaataatctcacgactagtctttagttgtgattagatttctcaagtctcttgatcagtgaactgatggaatttgaatgaatgtggtgttacaggggaacttgggatgggcttatatgcaactaatggactatacagcagctgaagctgtgtatcggaaagctcaattgatagagccagatgcaaacaaggcttgtaaaaagttggcaaacataaatctaatgcatcgttttaaggttggttgttatatacaaattgtggcataatcttggcttgttatgcgtttggatctatctatttgatcaaagttctggtatcatattacagattcaagtatattcagaaccagagtcttcttaaagtggatgagtcagacgatgaaccacttgacacaaaacaaatcagctctttgaacctctttcaacaagatttcgatgtggaaggacttttaatcatttgtgaaggctatatctgatgtagattttgatgccagaaacaacaaatattgtgagatctcatggcaataaattttaagtcacaatcgagaagaaaccactaggatcttggtaagagtaatctcactagtctttagttttgatcagatttttgaagtctcttgatcaatgaactaatggatttgaataaatgtgagtgtta

SEQ ID NO: 149440 - DNA, 1554 bp, Arabidopsis thaliana landsberg
  unsure (1)..(1554): unsure at all n locations
aaatctcacctttcaattcggaaccggttccatttttgtgattaatatgcctacttggtggggaagaaagtcctgcaagaacaaggacgataatcacagaggaatcatctccacagatagagatatcaagagctctgctgttgttgttgatcctcctctcactcctactcgtggtggtacacctcgttgcagtcgtgaattcgctggagcttcttctgctttctctggttttgactctgattctaccgagaagaaaggtcaccctcttcctcgtcctttgctctctcctgtttcgatccatcatcaagatcatgtaagcggatccacttctggatctacatctgtttctagcgttagctcatctggatcagctgatgatcagagtcaacttgttgcttctaggttcgctttttcccctttattagtatctgtgcatctacttgtatggatccagaacctcttaatcaatcaaagtttacgtctttttgctgctttgattgtgggttttgtggttataactcaatagtcatatagcaggggtcgtggtgatgtgaaattcaatgtagcagcagcaccacgtagtcctgagagagtttctccaaaggcagctactattactactaggcccacgtctccacggcnnnnnnnnnnnnnnnnngttgtgagcttagagtcttctacagggaggaatgatgatggaaggtcctcctctgagtgtcatcctttgcctcgaccacctacttctcctacaagcccttctgctgtgcatggttccaggattggaggaggctacgagacctctccttcggggttttccacgtggaaaaaagggaaatttcttgggagtggcacctttggtcaagtctatcttggtttcaacaggtgagataatcagattcttctactctgattcgcttaaaggaatgtcatagttttagataaggaacatcttatcaagtgagtgagttgacttagtttctaggtgacaagagttagttagatagctaaccttggttgtagcaaagccttcacacttctttagatcacgtaatgtgtgatgtccagatagatagggcgtttgatactagctttctccataggtggaaacaatattgtatcgtgtggatccagaggccattaacatatatctctaggtcaatagctatctttaaccagagatgcttacatgtgatgggtttgtgtatatgtgatgactcctgactcctgagagggcttacttgtgatatgctgttgagttatgtttgtgggccgtgtggacaattctgatggttcatgtctgcaattacttgatcaaaatnnnnnnnnnnnnnnnnnnnnaatctagataaaggcaatagaaagaaaaagtttctattatgctagctctttacattgtaactctaaactgcttgtttccatcgtataatgttttcgccaacttacagtgagaaagggaaaatgtgtgctattaaagaggtcaaggtcatttctgacgatcaaacatcaaaagaatgtctgaagcaactaaatcaggtatatctaattcgcctcatc

SEQ ID NO: 149441 - DNA, 546 bp, Arabidopsis thaliana landsberg
tactttccaacaaaccagctggtatgcctttgaatttgcttctcttatcctattgcttgcctatccaaattttctcaaggtcattgaaaattataactcctaggtcccaagcaagcaaaatcacatggaattggaggtgggagcaactcatcagccgaagtgcaagctctgtcaaaggaggtaatcaaacatctaatcatccctcttaaccattcggtttcattctttccttcttgttaaaaaagatagacttataatgaaattttcttttcacaataccaggtagaagatctcaaggtctcggttgatctcttggaaaaagaaagagatttttacttctctaagctccgggatatagagatactatgtcagactcctgaactcgatgatcttccggtaaatgtcatcatttttgttgtcgatatgctgtctttgtttttcttagtttgaactcaaaccatatatgattttgttgaaaccacaatgtgtgcagatagtggtagcggttaagaagatattatacgcaaccgatgcaaatgaatctgt

SEQ ID NO: 149442 - DNA, 1361 bp, Arabidopsis thaliana landsberg
tggggtttatgaggctttgcctagctttagagatgttcctatatcggagaaaccgaatctctttatcgggaagttgagtatgtgctgtgttgtttttgactttagtgatccgtctaagaaccttaaggagaaagagattaagaggcagacattgcttgagcttgttgattatgttgcatcagttggttttaagtttaacgatgtttcgatgcaagagttaacgaagatggtagcggttaatctgtttagaacttttccttctgcgaatcacgagagtaaaattcttgaaatacatgatatggatgatgaagaaccttctttggagccagcttggcctcatgttcaagttgtgtatgagattcttctcagattcgtggcttctcccatgactgatgcaaagcttgccaagagatatattgaccattcttttgtcttgaagctcttagacttgtttgattctgaagatcaaagagagagggaatatctaaaaactattctgcatcgggtgtacgggaagttcatggtgcatcgaccttacatcagaaaggcgataaacaatatcttctacagattcatatccgagactgaaaagcataatggcattgcggagttgctagagattcttggaagtataattaatggttttgctttgcctttaaaagaagagcacaagctcttccttttgcgagccttgattcctctccacaagcctaaatgttcatcagtctatcaccaacagctttcgtattgcattgttcagtttgtagaaaaggacttcaagctcgctgataccgttattagaggtcttttaaaatattggcctgtgactaacagctcaaaggaagttatgtttcttggagagttagaagaagtcttggaagcaactcaagccgctgagtttcaacgttgtatggttccattatcccgacaaattgctcgatgcctcaacagttcacattttcaggttcgagtctttgactatcatcacaacttcatatctatctctcttgataaagtcttgtacctatatatgaagttgtactttttgtttgtcaggttgctgaaacagcattgtttctatggaacaacgatcacataagaaacctgatcactcagaaccataaagtgataatgcctatagtcttcccagctcttgagagaaacacgcgtggacattggaaccaagcagttcaaagtctgactataaacgtgaggaaagtattatgcgagattgaccaagttcttttcgacgagtgtttagccaaattccaagtagaagcagtgaatacaacaaaggttaaagcgccacgggaaaggacatggcaacggttagaagatttagctacttcaaagaccgttgt

SEQ ID NO: 149443 - DNA, 1615 bp, Arabidopsis thaliana landsberg
acaaaaccacagacgacatacgcgagaaagaaaaaaaaacaaaatgaaaacttttgccggctttgcaattctgtttttattacaaagcttattgtttcctctttacagttcatgccttcatcaaacttcagatgattcatatccatttccttcttatttcctctttggctcagcttcttctgcttgccaggttccttgattttccttctttttatatccctgcaatcagtttttggagtcaatttataattttagtttttatttgatgtatttagtatgaaggtgccttcttaaccgatggaaaaggtctgaacaattgggatgtctttgcccatgaaaaccctggtatgtgtttattttggattctgtctatggttagcttggtttggaatgagtcttgaagaatgtggaaattgaactaacttggactttaagttgaatattttttttcccatccaattatgttttggcttagataagctaacaatatgatttttatgttttgaatgaatcttgtggtttagttctgggttcaattaagtttgtgtttatttgtagttatttatatatccatgcatatcatatttaaaataaattacagtttagctttctttgattggttctcgacaaagtttttttatcttataaatgccatgttgattccattgacaatattatattaaaaaaatgcagggaaaatagttgatggaagcaatggagacatagctacggaccaatatcatcgatatatggtaaaataaacaaattattataatattttgttccttttacctgaataaactatttgctttatatgtttttaattctttatcttattgacatctatctactatatatgattacaggaagatatccaatcaatgaattttcttggagtcaatagttacagattatctatttcctggtctagagtcttacctagtaagtctttatcttcttaatcatgactgtaataattaaatttggtttgaaattaaacttctaccatcaattgattggttcagatatctaaaccggaaacaatatgttaaaagtgtgtagctttcctttgatatatagataaaaataaaacaaactgttaacttatgtaataaaaatacagatggaagatttggagttattaattataagggaataaagtattacaacaatttgatcgacgctcttattaaaaaaggtaatatttactctccctacttcttaatttttaagttagtatctattgaagcattacatacagaaattttaacttcaaaagattgctatttttcatgtaaatgtttacagggattacaccatttgtgacgttgaaccatttcgactatcctcaagaactagagaaccggttcaagagttggttaagctccgagatgcagtgagttgataaattaagtctttagctattttaccataactaaaactgattcattcactgtttataaatcaggaaagatttcgggtacttagctgatatatgtttcaaacattttggagaccgagttaaacactggatcacgattaacgaaccaaaccaacatataagcttagcatatcgaagtggtttgtttccaccagcgcggtgctccatgccata

SEQ ID NO: 149444 - DNA, 688 bp, Arabidopsis thaliana landsberg
cgcttgctctgtgctcatcgttctcttcttcactttgtaagcttcctcatctataaagttaccatttttccgatgaatcgtgaaggtttattgatgaaattgggctatatttctgcagattcatggtggtttagttcatgattttggatgttttaagaactttttctactagaactcgaaatcttccaagttctggtttttattcgataagtactagtataatgcgagatatcaaagtcaaatctgattctaaggagtttctaacatcatctgatgaagaagaagaatcagtttccattagagtgtcgtcttcttcttccttgagtagtgttaaatcgacgcctgagattgagaaaaagtatgttcatcgagtttacgatgcgattgctcctcattttagctctactaggtttgctaagtggcctaaagttgctgcctttctcgaatcgttaccgtctggatcggtgattctcgatgccggttgcggtaacgggaagtatttggggttgaatcctagttgtttcttcataggttgtgatataagtcatcctttgattaaaatctgttcggataaagggcaagaggttttggttgcagatgctgttaatcttcctcatagagaggagtttggcgatgcaacaaaagtaaagcggttttgcatcattataggccagagaataaaaggcag

SEQ ID NO: 149445 - DNA, 812 bp, Arabidopsis thaliana landsberg
aaattttttgagccttcaagccgcttgtagaacagtactgccccatggagaccgaaaatccccggaaagtaagaatacttaaagatcaagttgtgtatcccttcctagattccaaaatgttaacctctcttaatattcctgcagtttgctgtgttgtatggagcgcgtgctaacacagggcttgataggatgaaaataataaacacgatcgccaaatctattcctgcccctcacaaagttgatttgagcaatccggagatgacgatcgtggtggaaattattaaggtaaacaaggagaaaatttatgttttgcttcatcagatttggtcggttataaactcaatacgggtttcgtgttgcaatttacagacagtgtgcttaattggagtggtagagaagtacaaggagctagcaaagtacaacctcaggcagctcacgtcgaccaattgacacatcttcttttatctttaactatgtttcgtttcttaagactgaagatgcttttgtgtttagtgttacagagtttctggcttaacttattaaaatggctgaagttgccctttatactctctttggtctgatcaataaagttttttctttgataaagtttgtttgattgttgagcgtaaaacatgttggtacaatgggatcacttagatttgattttgtcgaatggtggtggttcaatcaatcaaaattacaggtttaggaaatggattcgatatgtcaacatcacctccccttttgcctgtgtggatagaggacaaattggcggatacattttcgaaaaaaaaatcaagtcaagagaagtt

SEQ ID NO: 149446 - DNA, 2220 bp, Arabidopsis thaliana landsberg; identical to SEQ ID NO: 3915

SEQ ID NO: 149447 - DNA, 757 bp, Arabidopsis thaliana landsberg
gttccttccgtggtgaaggtggtggacctggtggtggtcgtcgtggtggattcagcaatgagggtggtgaaggggagcgtcctcgaaggacctatgagcgtcgtagtggaactggcagagggtcagtcttattctgttgtggcataatctgccattgaaatgactgtgtcaatctcataagttggagtttgtattttggataggagtgacttcaagcgtgacggatctggtcgtgggaattggggaactccaggggaagagatagctgcgtaagtaattgtttatggtttattgcatttgtttaaaaaagtatgtattaatgtgattgtgattgggaatttggactaaaagaagctttctctggattttaagtgagactgaagcagtagctggtgttgagactcagacggatgttggagagaagccagctgttgatgatgtagctgctgatgctaacaaggagaatactgttgttgaggagaaagagcctgaggataaggtaaacagagaatggaatagaaatgctaggctcctctttagtctttactatactggtatcagtttttttttttttttcactgattgtttattgacttgtgtttcgacaggaaatgactcttgatgagtatgagaaaatactcgaggagaagaaaaaggcacttcaatcattgaccacctctgagaggaaagttgatacgaaagtgtttgaatcaatgcaacaactgtcaaacaagaagtctaatgatgaaatgttcat

SEQ ID NO: 149448 - DNA, 1747 bp, Arabidopsis thaliana landsberg; identical to SEQ ID NO: 59497

SEQ ID NO: 149449 - DNA, 1059 bp, Arabidopsis thaliana landsberg
gcctcttctctcttctcttcatatgtgtagggtcgaagacttgttcgacaccgtttcaagggttgcaattggcagccttttgattggtctctcttctctttgcccaaccaaaaacaacctttgatgatataaagatcagccaactttgtccatcccaattctctctttttttttttgtttccctaatgttttagacaaacacaattttccataattatttatttattcaatttttatctgtttttgggttacatatatcatcatcatcggagactgccatatttgttaatcgtgatattaatttaaataaaatgtctcaaacaagctactaccgatcaccgttcggagacacgacttacaccaaagtgttcgtcggaggattagcgtgggaaactcctaccgacgaaatgcgtcgttacttcgaacagttcggagagattcttgaagccgtcatcatcaccgataaaaacaccggcaagtctaaaggctacggattcgtaagtttatacaaaaccttgttcctatatgtagaaagagaatggatgttatttgtgtatattatatagttaaaagaggaatcaactaataaactaaagttaaatggtgatgatgatcgatcaggtgacattcagggaagcggaggcggcgaggagtgcttgtgtggatgctacaccggtgatcgacgggagaagagcaaattgcaaccttgcctctctcggtcttcaaagatccaaaccctccactcctaaccatggttaatacatatatatcatctctctatctttcttcttttcaaaagtctagatgcttatgtgtgtgtgtgtataatatatacacgttcatgatgctatgagttagatcaagaaaaaggataattcttagttactactactatatatggttagctatattttctatatacaaagttggttttataagaaatttgtgtggtcaagcattaaaattaactcatacccttaatattaatagttggtgatgagggttcatggaacaatatgtcgatcatcaaagtgatagtgatgatagtggttaactgtg

SEQ ID NO: 149450 - DNA, 5927 bp, Arabidopsis thaliana landsberg
atggctgttacagtacttccttccgtctccggtctctctgccgtcgcatcttcatcgaacctacgacgtctgacctccgcctcgaaccatcgactcacggcgataaaatccgtaacatctacttcttctcctcctaccccttctagtggtgttcaacggagacggaagaataatgatgaaaacagagccacggtggcgaaggtggtggagaatccgtattcgaaagtggaggcggcgcgtccggatttgcaaaagaggttgtcagattttttggaagaagctagagagttcgtcggagatggaggaggtccacctcgttggttctctccattggagtgtggcgctcaagctacaaactctcctcttctcctatacttacctggttcgtccgctatatcttctttagccttccaatttctatggatttagattttagttccattccatggaactctgaaacattaagctattcaagttaacaaaaattgcagggattgatggaactggactaggtcttattcgccatcacaagaaacttggggagtaagtaatatggttcctctgtttctggaaaattcctctgttttctccttttggtttgtccaaaaaatttgattttaggtagcttttgaagtaagtgatctttatttatattgtctttgaataggatttttgatatatggtgcctgcacataccagtcagtgatcgtactcctgttaaaggtaccttctcgttgccctttcgaagcactaccgagaagatagttaatgcgagttaaagccttattgtttgtgttctgttgtattcagacttggtgaagcttattgaggaaaccgttaagtcagagaactttcgtttaccaaatagaccaatatatttagttggagaatctattggagcatgtcttgctttagatgttgcagccagaaatcccaacatcgatctttctctgatcttggttaatccaggtacagaagttcgccttattttgtcggtgaatgtcacgaatgtttctcatcatagacattgttttgttgcagccacacatgtcaacaactttatggtgcatcctatttcaggaatgctaaatgttttacccgatggtcttccaacgctattggaagatatctttgattttggttttaagcaaggtacacttttgttctcttctcatattctatcttgaatcataaattaaaccaactaatcagttccttgtagatcaagaacttattgaaacgtgacaaaaatgtatctctttgttacggtaggcgctccattgactggaatattagaagctttgtcaaatgaattttccgtccagcgaatgggcggagtgggtggagggatgctaagagatctctttgcagtttcagctaatcttccagtaagtgttccttcttaggaactcatgatttatagtttatagtctatacattttcagtttcacttatcaagttcttaagtaatgcgatcaacaccttgaaaattatatttgtagactctgagtaggatgttctctaaggacacactcctttggaagcttgaaatgctaaagtctgctattgcttctgtaaattctcacatatactcagttaaagctgaaacactgatacttccaaggtccaataattttctttgttttagaaattatgaatctcttttacttttttcaaagagatgttatagcttggagcataagtgtaatgtgattatgactatctcagtggacgtgatcaatggctgcttaatgaggaagacattgtcagatactcgcgaacgttgccaaattgtattgtacgtaagcttgatgacaatggacagtttcctcttttggtaagtgatctctcttcatccaatacttagggtttaatattgatactactattaaataggttcttgaaatctctatatatcctacacttcaattatctctcttttacatctcatgttaggaggacagcttagatctggctactatcatcaagcttacttgtttttatcgccgtgggaagtcacatgattacgtttcggattacattaaacctaccccttttgagttacaacaactattagacgagcaccggtaaatgccttactaattgctatatcttagtttttctatatgtatatagcaaaagaaataaaaggttatagtaaatactgaatggaatattccgccgtgcagattgctaatggatgctatttcacctgtaatgctatcaactctagaagacggtacaattgtcaggagcctcgaaggattaccttcgcaagggccggttgtgtacgttggatatcacatgatattggggtttgagttagctccaatggtaggtctactcatgacagagaggaacattcacatgcggggtttggcacatcccatgctatttaagaatctccaagactcattagtcgacacgaagatgtttgacaaatataagataatgggtggagttccagtctcccatttcaatatctacaaactactgcgtgaaaaggctcatgtgcttctgtatcctggaggtgtccgtgaagctttgcatagaaaggtgatatatagtttgtaaactttttccgggtttctgcattcttgaaacttgttattttagaggctttaatgaacaaacaaaatttgcagggtgaagaatacaagctgttttggccagaacggtccgagtttgtgagagttgcatctaaatttggagccaaaattgttccttttggggttgttggagaagatgatctctgtaagtaagcaaaatctcttcttcttcgttttcgtttcagtatctggaattctttaaaactcttttgaaaaatggaattgattctcaggtggtcttcgattacaatgatcaaatgaagatccctttcctgaagaatcttataaaagagttatcacaagactctacttacttgaggtatttagtttttgtttctttgttttgttttcgactctctgttaaatgtaattatatgaatgttatataacattggaatgatgataatatatgtttaggaacggtgaagaaggagaagtaggaaaccaagatttgcatatgcctggaatagttcccaagatgccgggacggttttacgtatactttgggaaaccaatttacacagaaggtagagaggaagagctaaatgataaagagaaagctcatgaggtttacttgcaggtcaagtctgaggtagaaagatgtatgacctatttgaagatcaaaagagaaggtgatccttatagaaacattttagcgaggtccctctatcacttctcacatggtttctcttcccaagtcccaacctttgacctccgaaatcaataattttagttactggatttgtgacttaattaactttgtggaatttggatatgttattgtaacttctaaaagtacaagtctgttgatgtagaaattgagtaagttcggggtgttatgttaaaaattcatgcaagtttgtgttcttacaacatatctagaacgtttacgttgaagccttgaaggtttgtgtattttgactattttctattttaatagaattgagtaacttttgggagtgttgggtgaagaatattgcaatgtacaataaactgtgtaatattcgaggttagttttattaataaatagttaaactaacccagatttggtttaaccaaaccgaaccagcttgtcgtgtttaatttaagcaaatttatcaaatttgaaaatattcaaactgaaaaaatcaacgtggcatattataatcgtttttctcgtgtgcacgagcttgtcgtgttcgacctatcagagatgaagaagctaaacaacaaaaaccttcttccaactttctctgatcgtctatggcgattattactactactactgttcgtttcactgatggaacctctcccaccttcttctcctcagcttcgacaaaggcttacaatctccattttctctactcgaattcaacccaacgacttacgaatccgaaattcggtatcggcgggaagttgaaggtgacggtgaatccgtattcgtatacagaggaagtacggcctgaggaacggaagagtttgacggattttttaacggaagctggagatttcgttaattcagacggcggagatggtggtccgccacggtggttctctcccttggaatgtggcgcacgtgctcctgaatctcctcttcttctctacttacctggttcgtcctttcaatttagggctgaaatcaattctcgtttgattgattcgttattctgattggaacaatggaagttaacaaaactaagaattcaacattgtagggatcgatggtactggattagggctcattcgccagcataagaggcttggagagtaagtcttgtttgattcaatcttctttattaccttagagcctaagataagctctccattgtgcacaggtcctgtttcaatgtttaaaaaacttcgatttatcaataagtagtacaaaatgacttcaaaagaagaaggaatctactgaatactctttgtttacgatctcattatctttttgatcataggatatttgacatatggtgccttcactttccagtcactgatcgtacccctgctcgaggtgcttctttgtcagcattctctgttgtttcagtacggatcccaaaccaaatggattaatgttatgtggatgaaactcttgctgttgttttcagatcttgtgaagctcattgagagaacagttaggtcagagtacttccgtttaccaaagagacccatatacatagttggagaatctattggagcttgtcttgctctagatgttgcagccagtaaccctgacattgatcttgtcttgattctagctaatccaggtaaagcaagactcgttttttctggatcattgagatcctttattgtgtttctctagatattctaggccaaagttatgcaagaacaaccgatcaagctcaaatatggctcatgagaaaaataccaacttcatgatcaaagccagttgttttgcttgttgcagtcacacgagtcaacaacttcatgttgcagcctttatcgagtctattggaaattttgccagacggtgttcccagcttcctggaggagaattttcggtttgaacaaggtgaactttcaactccttgtatatcttccagtcgaagacaaatgagatgcagagacttctttatttattcgatctccaagatgggtttccagtgtcaggatttggttcaaatcacagctaactgtgttcctattatataggttatccgtttgcagcaatgttcgagactatgctgaatgaaactgatgccgcacagatcggtggagggctattaggagacctctttgcaacttcagttaacctgccggtaagactttgttttagaaaagcaaatgatagatgcatgtttgtcttgctgattatagagttaaactagtaatgtgctcttgtttgttcttcattttgttgtttcagctatgttttcatgtgattaactcacgaaaacaaatttcttacagactctggctaggatctttccaaaggacacacttctatggaagcttcaactgcttaagtctgcttcagcatctgctaagtctcacatgtacacagtcaaagcccaaacacttatacttttgaggttaataaacttgtaaacttccctgcttcaataagtagaagttcagcgatctcttttttcgtcaaaaaatttcttagctggcagctgagttgtagctttaataagactgtatattgcagtggacgcgatcagtggttactaaacaaggaagacattgagaaactccattgtacattgccgaattgtgaagtccgtaagttcgagaattacggacagcttctctttttgtaaggtgctctttttctgatgtagaaagttttcttgatttgttataactagagtagctcac

SEQ ID NO: 149451 - DNA, 1574 bp, Arabidopsis thaliana landsberg
  unsure (1)..(1574): unsure at all n locations
agagttcaataggattagcatttctaggactcgatatagaatttgagagattcgattgtgttcaactcaattcctgttgcttnttaggcaacatacgagaaaggaactgatgatgagattgctgagtttatttaccagactttggatgttaatggcaatggggtcttgagaaggtatccatcttgtggcttcaagttgcttctgttatccaagtttcattacctgttttgttgtatgtccattactggtctcttgatccacttaacatatttggatagaaaatgaattgagattgttagattagatggggttattctctgaatgtgacacattctagtatgtcttcaggtctgatttagagtcgttcctggtggtgattttgaagagtgtgttctccactgagagttctgatgcggaatcaagtgattacaaggagatggtagatgcgctactcgatgccgctactttctcaaaatctgatgatggttctgaaaaaggaatgtcttttgaagacttcagaagctggtgctcactcgttccaactatcagaaagttcctcggaagcttgcttatgcccccgagtacaggtttattctttgtcttctctcatcttaactcatttcttgttgacaaaactggtcaaaattttcctttttttcacttttttatatcctctgaaccttgttatatagtgagacctggatatcaagtcccgcatctgctatatgaagatagtgtgagttcagataggctactattaaagaaggaatacgcttggcatattggaggagctcttcctcaccacgagcttgtagagtggaagctgttgtatcacagttccttacacggtcaaagcttcaacacattcctcggacacacatcgtgagtgtttctcaacagtaacataacatcatttaaacttgactgagtagaatcaagacagaatttgtgtgtgtaggcttgtaagctaacgtaagatatcttgcagaaacactggtatgtcgacatctgtgctaatcatcaaagacacagaaggatatgtgtatggagggtacgcctctcaaccttgggagaggtacagcgatttctatggagacatgaagtcttttcttttccagcttaaccctaaagcagccatttaccgaccaactggagcaaacaccaacattcaatgggtatggcctctacagacactatgatacttctacatatgagaatgtgattataagcatattctaatataagttcactcggtcgggcagtgtgctactaatttcacatcggagaacattccgaatgggataggatttggaggtaagataaatcactttggcctgtttatatcagcaagcttcgatcaaggccagacattcgaatgcacaacgtttggtagcccgagcctttccaagacgagcagaattcagccagaagtgatagaatgctggggaatcgttcaggcctcaaatgaacaagacaccaaacataacgccatgaaaggtactgttctggagaggtttaaggaagatcgcaacatgctcaaactagtcggcatggcaggcaattcaaatgattga

SEQ ID NO: 149452 - DNA, 2383 bp, Arabidopsis thaliana landsberg
ctccaaccttggaacagatgttgtctctgtagacagtgagacctgtttctgtttccattaccagagttctgagtcgatccaaaatccggagacgatgaggaagcgtcatccaaaggcatcagatttaacagagccatcttcttcgagtaaagaaactgatgcttcttctgataaagatgctctcgataaggaagtgcaggctgatgttaaaagatcagggaaagtatggttgtcagtgttgattttgatcacttactcatcttggtttgtttacaattatcagcttgggaatttacctaaacccttaaccgcaaaacaagctggtaaaaggggtttctctgaaattgaagcaatcaaacatgttaaagctttgactcagtttggtcctcatcctgtttcttctgatgctcttgtccatgcccttgaggttttgtttctttttagttattttttccatttttttcttgatttgggtgtgtactcagaatttgttatttgttcgtctctgtagtatgtattggcagaagttgagaaagttaaagaaacagctcattgggaagttgatgtgaatgttgatttctttgaatccaaatttggtgtaaatcgtttggttggtggtctttttaaggggaagtcacttgtgtattctgatataagtcacattgtactaagaatcttgcctaaatatgaatcagacgctggagacaatgctattcttgtctcttctcacattaatactgtcttcacaacgtatgttgcttcatctcctatccgttgattttggattattgttcaccattttgctactatcaagtgtgtgtgttaaatttgtttgtgaatgtatgaagaggtggggctggagattgtagttcatgtgtagctgtaatgctggaactagctcgatctgcttcccaatcggctcatggattcaagaattcgattatattcttgttcaatactggagaggaagaaggtcttaatggcgctcatagctttataactcaggtatatatgatacactgaccttaatggctttgagtttgatgtgattccctctctctcttaactttgacttggtcggattgatcggattagatatcttaattcctcaacttatggtttctgattcacattgtgaattactgatgcagcatccatggagttccactgttcgtttagctattgatttagaggccatgggtacgggtggaaagtccagtatttttcaggtataatcttatgcactacctctcgttcatcacagtttttaatataaactataagagatacttagtaagaagtacaatgtcttttcatcatgtgagtttcccccttccttgtaaaacatcaaaaggaattggtatgaaaacaaattgcatgtgaagggtttttgtcatttttactcaattttggctatggtctttattcttttttttttgggagttaagttcttatactgaacgtaattactattgtttggtgccttgtacgtgaaagaggaacccggttttcaaattgtttctctttactccaagtgtgaattccgaccttctgattgttgttatcttcccggtataggctggcccgagtccgtgggctattgagaattttgctttagccgcaaaatatccatctggtcaaatcatcggacaggtatgtactttcaactgatgtttctttcccctcttactggtatatacagtatctatatgtcaatgctaatgctttactatgacaggatctgttcacttctggaatcataaaatctgcgactgatttccaagtatacaaggaggttgctggtctctcagggttggactttgcttttgcagataatactgctgtctatcacactaaggtttttcccttttttgttttacatgatgttcttcacttcttcttgttttgatcccagtttagatgtctaatatgtcattgcttgcgtcgcagaacgataagatagaactgataaaaccaggatcgctccagcatcttggggaaaatatgcttgctttcctccttcgggttgcttcatcttctgatctgccaaaggataaaacgctccagggagaggaaagatccaacccggactcagctgtctattttgacgttttggtgatcacagaactaactctgttgttataatctattaagatatgtacttacatagctttttctttgtcatgtcctaatggcgctcctttatttctatgtcaatttttaggggaagtatatgattgtagaccggcaaagtttggcgacgatgctatatgtttcagtgatcatgcaatcgattcttatatgggttttgtctgtgttcatgggtggttatccggctgttgtgtcgctgattttgtcgtgtttgagtattatcctcgcatgg

SEQ ID NO: 149453 - DNA, 467 bp, Arabidopsis thaliana landsberg
gtgagtttgcgtaaacgtcttcatctagattccgtagcgcattgtgttgtcactttcattgtccttgcttcttcagtggtatcaccttttcaatttcttaacaggatggaatggagcttgcagagaagatcggcatgttcttcattgagacgtcagccaggtcagccgataacataaatcaactgtttgaggtgtgcacttctttcgtgcctctgattgatgatcgtttttcttgtcctctgcattcagtgagctcttattatccgtttctttcattgctttggaattggaggatggcaaagtgataggcagtgatatgcagctagatatgagatttaatttcttgtagtttgtggaggataatagttttgcatgcagaaagatggattaatacgaagtatatgcgtttttcgcttaatgagaaaactcatgtctgataggaaattggcaagaggctacctcgtcct

SEQ ID NO: 149454 - DNA, 607 bp, Arabidopsis thaliana landsberg
aaaaccgaaaacaatcgcagccggttctgacctcggcatctgcattccccatttcggttataccgtcatcatcatgtggatgaagggattcgtagtgctttggtgttacccggttcaatgttctcatccggtttaaccggttacagatcctccaatctcggtttcattgttttggaaaacttattctcaaccgggccaatgatgacagagcatcatcctattcaagagagtaactacaacaattcaacattctttggaaatgggaatctgaattggggattaacaatggaggaaaatcaaaatccattcacaatatcgaatcattcgttacagaaccattcaaattcgtccttatacagtgatattaaaatcagaggccaatttttttggcacagaggcttcaaatgttggtatgtggccatgttaccagctccaccctcagcaacatgcatatggccatatataaatcttcttgtatattataaggtgtggaatctttttttttttctcaaatatggatttttttaaaaaatgggttgtgtatatagtttgtgttatatacttatatatcatttaatttaacagtattggtttttacatttttttg

SEQ ID NO: 149455 - DNA, 521 bp, Arabidopsis thaliana landsberg
  unsure (1)..(521): unsure at all n locations
cttctttttttgtttctctctcacaaacacaacaaatatggaatacagctgtgtagacgacagtagtacaacgtcagaatctctctccatctctactactccaaagccgacaacgacgacggagaagaaactctcttctccgccggcgacgtcgatgcgtctctacagaatgggaagcggcggaagcagcgtcgttttggattcagagaacggcgtcgagaccgagtcacgtaagcttccttcgtcgaaatataaaggcgttgtgcctcagcctaacggaagatggggagctcacatttacgagaagcatcagcgagtttggctcggtactntcaacgaggaagaagaagctgcgtcttcttacgacatcgccgtgaggagattccgcggccgcgacgccgtcactaacttcaaatctcaagatgatggaaacgacgccgaatcggcttttcttgacgctcattctaaagctgacatcgtggatatgtngaggaaacacaactacgccgatgagtttgagc

SEQ ID NO: 149456 - DNA, 1367 bp, Arabidopsis thaliana landsberg
gatacttccgtggaaaagatacaagtctcttgtactgtcaagtaagtttacatgttgtgctcatgaaatttactgtcaagttagatacaagtctctactcagtactctctactgtcaagtaagtttagatgttttgctgatgaaattaactgttgtttttactgataagtttatttccttttatttgtagctgaaattgtttttcccaaccgtaacttttgcgaaaccgaaaagcagccgcaattcaagtataggtaaaagaatagaactttcacatgtgcaaatatgatttgcttactcaaggcttaatcatcaaagacgtaaatgttgctttttaaaagagattctgattacatgttctccactctgtttctatagaggcttttgcaggctgcgagaattactctccgacagaaggatttaacccgagagatctgcatcgtctcttggagaaagtcggaagcccttcaggtggaagcgatctcggtaaaaatctcttggcttcagcttcaaaattctgaagctcttctagttagacacaactaacttatgcattgttgagtagtacactttcaatttactcttcctcaacgtaactctcacctaaaaaatgctctctcttcatgtgaagttaaccttttgggcaagacaaagaaatcttcttaagtattattatgtcagattcagaaagagaatattttaacctctttttttttttgcgttattattgtgcttgagattttgtattttcttggtactctgcagattgcagtagtggttggcttgaaggacccaacaaagtttatataccattcttggcatgtggtgacttaaccggttatgactcagaccggtcttacccactccctagagaagaagatggatcatcataccagagtttggacccgattcaacctccgatcgcaccgccttataaacgagctcttgagctcaagaaagcttcagcacaaagcttcaactcttgaagaaggtgataccaaaaaagaaaaaggaacaaacttttcattggattctgtagcctgtcgtaatgatatattcagggacctacaatttctataacgcttaatgtttttgttatgatgaagttatattttttatagaataagagattatattattacttttgtttaatactgctaggaagaaatcaaatattgggtcaacaaaagaagaagctttttcagtcttatggtcctttgatttcgacccttctttttgaattctaaattggcccacttcgtttttcgtttttagtttgtaacgaaacttgaaaaaaaaaaatggattaagatttgaggaattataacttttagtagtcactagctagttgaataaatgaatcgata

SEQ ID NO: 149457 - DNA, 849 bp, Arabidopsis thaliana landsberg
taagccatgaagaaccaaagcagcttctccattgttgctcttcttctcattttcttttcctcatctgtctttgctcagctgcagacaaatttttaccggaagtcatgtcctaacgtggaaactattgtccgcaatgccgtccgccaaaagttccagcagacttttgttacggctccggccaccctccgccttttcttccatgattgcttggtccgtgtaagttttttttaaatcgatatattagtttacattttgtaaacgataatgggtaaaaaaagcatattgaacgtgtttttaatgtaaatataaatattaaataagtaaataaacaacatcaatatgaatatatttgttttaaataaagtgttattggtaatttcatttgcaaaaaaaaaaaaattaaatagattttatttctttttgtctatggattctataatgattttgtagttctatgaattttgaatgttgttaaaataaagattctaaatttataaactaaaaactaaacattcaaaatactacgaagttatcataatgttttaaaaacttatgaaaaaataaagaaatctctcctgtatattagtataatgtttggcccgtgttcaaaaaaaaaagtatatattgtttgactatttaacgttatatacagggatgtgatgcttcgatatggctggcatcaccatctgagaaggatcgccctgatgacaagtcactagccggagacgggtttgatacggtggcaaaggcaaagcaggcccttgatagggaccccaactgccgtaacaaagtctcatgcgctgacattttggctctcgccactcgtgacgtggtcgaaaaggtacaaaa

SEQ ID NO: 149458 - DNA, 2774 bp, Arabidopsis thaliana landsberg
gtttcaatggcttcagctacttccgtcatagcctggtcatttctctttctattctacctctttgtttttctccattactgtttctgacttgtgctagtgctccttcgtttgattttttggcacaggggttctggagaagatgggcaactaggacttggaaccgatgaagaaaaggaattggcttccgtcgtcgacgctcttgagcctttcaacgttcgctccgtcgtcggtggtagccgcaattccctcgccatttgcgatgatggcaaggttacttatccaatttcctttatgtgtccttgttgtgtcttctttggttggtttcgcttagaactaactaaagtacaatgctttgctttgattttgcgatttgattctaagccatgtctttaagattttcttagttcgctttacatagggtttttgagatctgtaggaccaattaaaaagggtttaaagctcgtattttttttcttgtcctgaagtccaactaaaatgcaaccaatatgtttgtctgaggttactctcgaatagatcatcagactctggttcttgtctccatggtgtagtttatgattgatgtgtcaccaacatatagaaataatatggtctcttaaatggtttctcagctgtttacatggggttggaatcaaaggggtacattaggacacccacctgagacaaaaacagaaagcaccccaagtctagttaagtctcttgccaacgtcaagattgttcaggtaaaacttcttacaattatttaagtatttttggctctaatgctgtttcctcgttgtgatttactctgaattgccgtttctgtaattgatcataggcagctattggtggctggcattgtttagctgtcgatgatcaaggccgagcatatgcttggggtatgcattttctctctcagcttctttctaatgattgtgacctcaatgatcttaatgatcttaagttgttcacctttttgttatataatctacttaggtggaaatgaatatggacagtgtggtgaagagccttccaaggatgagacaggtaggcctgtgcggagggatattgtaatacctaagcgttgtgcccagcaacttacagtccgacaggttacttatgctgctaacctctcttcatttacctcaatttttagttctctttttttcctgtctaaaccatctgttctcgggtttgtatgattaaaataacaggtagctgcagggggtactcactctgtggttctaacccgtgaaggttatgtatggacttggggtcaaccgtggcctcccggtgacatgtattaaccaaatttcctttcatttatggatacgacatttgcattttcttgtcttctgttggtttatatggtgtttcctgtatatcgcagaaaacaaatttctgttcctgtaagagttcagggtcttgaaaacgttcgtctgattgctgttggagcatttcataacttggctctgaaagaagatgggactttgtgggcttggggtaataatgaatatggacaacttggaactggagacacacaaccgagatcgtatcctattcctgtccaaggccttgacgatctcactttggtatgtagtctaaaacttctggtttaagcactcattattataactgatcccttcagatatgtgaactataaaggcctatgttaaagcttaattcctcctctgaattcatgttaggttgatatcgctgcgggtggatggcattcaacagctttaaccaatgaaggagaggtattagaactcatacattctcttactaatctagagtctcactttttattccatctggctcttgatcgagtcattactgggttgtttctgagcttgatgtagatctttactctaaaaatgttgtaacttggctatgtccaatattaggtgtatggttggggaagaggagagcatggaaggctcgggtttggtgacaatgataagagcagtaaaatgcttccgcagaaagttaatctcttagctggagaagacatcattcaggtaaaaagtacaaaccaccagttcttgactcttctcatagctttgaaagctcttatcgtttttttcctctcaggtctcttgtggcggaactcattcagtcgctttgacaagagacggtaggatcttctcggtaagtcctcttagagagtataaaacattgttggttagaaacccaaagtcaatctctaaacccctcctttatattgattcctgtgatcagtttggtcggggagaccatggtagactcgggtatggaagaaaagtaactacgggacaaccattggagcttcctatacacattccaccaccagaaggacggttcaaccacaccgatgaagaagacgatggaaaatggatagctaaacatgtagcttgtggtggccgacacactctagcaattgtggaatggaagtatgatcaggaggaaacagaataaccatgaagaagatagagcgagcaaaaaaacaaaaacacaagagggactctagagataagcatttgttatagagaaaaggggagcaaaagcatatggttaagcttttgacactcccatgaatgatgaatctatatgaaagaggaagaactaaatataatatcatcatgattttgtttttgataatataaaatagattgaaaaagagaaacaaatgagaggaacctttgaaaggatggtttaaacctttaaaccattattgattctctcggtttaaaggtttttcaacaaccttgacaagatgaggaaccagatagggaaga

SEQ ID NO: 149459 - DNA, 594 bp, Arabidopsis thaliana landsberg
tatttcccaaaatatcttcccgaaattttgaaattaactccgacgaccaaaagaaggaaactgaaaaagacaatgagcagcagcagcgatactcatgccggagaatctcgtcatcgccgtaacccgatccggtggctactcggtttcggtttcttcgtacaaggattcagaggattcccatggcttggagccaatttcttcctcacagaacagctccgtgttaatccttcagttcttcagcttcttcaaaactcagccaatcttccaatggtcgctaaacccatctacggcgtcgtttcagactctgtctacttctttggccaacatcgaatcccatacatcgccgttggaggtataagacctaaccacaaataaaattgatagagaaagaatttggaattgtgattgagagagatcatttgttgttactattgcagctttgttacaagcaatctcatggctagctatagcattcttgtcaagatccaatgtatcaatcttagctctatcgatatatcttctccttagtaatctcggcgcttccttagtagaagtagcgaatgatgctattgttgctgaatccggaaagcaaaa

SEQ ID NO: 149460 - DNA, 1397 bp, Arabidopsis thaliana landsberg
gctaggacacttctggacatgcttatgaactctgtaagcaataacccgaatcgatgtttttgtttccacagttggttttctgggtttggctgatatagtttttcatgaatttgcaggtcaaattaacagagctttttccctcgatcgttgcatcatctaaaacccttgcagtgatttcatcgggattgcgtggaaaccatggagatgcattgcatttggtaaaaacaaccactactattaaaaccatgtgtgtgtgtgtgtgtgtgtgaaacttttgatttactttgcttttgcttgtgttagatgattgaagagcttcaagtgctttcaccattggtaacaacgcgtgagttctgtgtgctaagatattgtcagcaaatcgaacatggaacttgggcaatagtaaatgtctcatatgagtttcctcagtttatatctcaatctcggtcatatagatttccttctggttgcttgatccaagatatgtccaatggctattcaaaggtgtgtaactgtcctgtttgtttcattcttttagcttcttgaatcatttgattgtatcttttgaatgtaaaacaacaggttacttgggtcgaacacggtgaattcgaggagcaagaaccgatccatgagatgtttaaagatattgttcataaaggattagcttttggagctgaacgttggattgctactctccaaagaatgtgtgagagattcacgaatctattggaacctgcaacatcatcccttgatcttggaggaggtaaataaagacatttttttgaaatcgtaattgatcagctaagtaaaccataagtaactcatttcaaataaattcagtgattccatcgccagagaaaaagagaagtataatgagacttgctcacagaatggtagcaacttctgcttgagtgttgcacatctaacaacacttgctcaacggttgtctcgggactggatgaattcggaatccgtgtgacttcgcataagagccgacatgaaccaaatggaatggttctatgtgcagccaccagtttctggctcccaatttctccacaaaacgtcttcaatttcctcaaagatgaaagaactcggcctcaggtactacaatgatttaacattaccataaaaacaagaatcatttggtgttttaaaactgattaaatcatgtggcattttcttccgttttatagtgggacgttctgtcaaatggaaactctgttcaagaagttgctcatatcacaaacggatcaaatcctggaaactgcatatctgttcttcgtgtaagcttcctcatttgaaactatacagatttttggattcttgattcttcaaactgataatttggttcctttgttttcatcagggattcaatgcatcatcatcacaaaacaaca

SEQ ID NO: 149461 - DNA, 411 bp, Arabidopsis thaliana landsberg
gttgaaataagcccaagatcaagatccgaacagatatgtttcattttattttacactaaattgtgtttatctatgtgagatcttgattgtgacagattaagctttgtttgaagaacaagaatggtattttttcagtcccagagatcgaaaatatccctacggagctagacctaaccgagctgcgacttccggttattggaaagcgactggtacagataaaccggtgatttcaaccggcggtggtggtagtaaaaaagtgggagttaaaaaggctctagtgttttacagtggtaaaccaccaaaaggagttaaatcagattggattatgcatgaatatcggttaactgataataaacctactcatatttgtgacttcggcaacaagaaaaactctctcagggtatattatta

SEQ ID NO: 149462 - DNA, 1509 bp, Arabidopsis thaliana landsberg
  unsure (1)..(1509): unsure at all n locations
atggtggctggtttaagagatttcacgctcagaaccgaagatggcagcgggaaaccggtactggatgtatctaacggcgaggaacttatgcacgttcagacttccgtcgcggtcgctctcggaaaccgtcccattgagtctcccggaactctctacatctcttacaggcccggcaattaactcaaaatctagtccttctaaattaagataaatgtcttagcttaatttggtgatttgatttcaggaaattaatttnnnnnnnnnnnnnnnnnnnnnntaaaggatacgcagttgatttcttatcaatatcgcttcacgctgtttctagagatcctgaggcttattcatctccttgtatatatactcaggtattcaactcttgcaatttttctgggttttgttagacttggtagcttaaaagggaattagtgttgttctcgttgattgtgattagttcttaggcctgtactgtaatgttgcttgttgcaagtgcttgctggaatttgagaaagtggcttacacgttttaattggatttgagaggtgtgattaagtcttttctgttctcattttgctaagtttttggtttaatgttttgaagattgaagttgaagaagatgaggatgatgagtctgattcagaatccactgaagttttggacttatcaaagatcagagagatgaggcttgttccttctgactctacccagtgtgagttgttatgtagcaatctttagagctattagaatcggctgtttcattatataagagtcttggatattattaagctgatatatcgttttgtcttgtcatatgaaagtggagacgctgtttgatgtattctgcgagtgtgctgagctgaatcctgaaccagttcaaggtaaaacatataattactggtttaatagtatcactaattgcattttttggttacctagccatttatatctttggtttcattgcatctttcagaagaagaaaaagaaaaaggacataattgggtgtttagtgctgatcagatggatgttcgtggaggaggtaattaatgttttcatatgacttagaccgaattaaagagtgtgttaatgtattcatcttgaatggtacgaatgaaatgtgatggttttctatgtgtttgcaacagatgatgatgcagagtggcaaatatctcagagtccgactagtgtaattggtcattccaatggagatgaaggtcttaatcagcctatgcttgaggtaatacaaagttacaaaactctgctttcaatttttcctcttttttttgttttaaaaaaattgagcgtggtttcatctgccttttgtattcacactgcagctccaaatcaatgatcagaggtttgaggatgctgaagagatggttcatgaaagtgagaccaaagatcactagactcttcacaattgtactcgaaaacatagtagttgtgttattttaacgatgaaagagttgtattatgttcaacgatgaagtattatgtgcgcgatacttagct

SEQ ID NO: 149463 - DNA, 1723 bp, Arabidopsis thaliana landsberg
tatgaagaaatcagaaagtgaagttaatttttgggtaatttgatttgtatttttggtgtgtagctttaagaggagtgcaaacattgaaggcgagggcaatgaaggaagtgtggaacattgcatcagtgattccaagggaaaaaggactcacttctacaggaggaagcagcaataataatgttaatggtagcaatggaagctcaagcagtagtcacagtggtgaacttgtacaacaggagaatttcttgggaacttgtagcagagaatggcttgctagaggctgtgaacttctcaaacgcactcgcaaaggtaaccaaaattcaatcttattatattttgaaagtttttacattttagttgttgaatcttttgtctaatgatgttgtgtgacttttgcaggagatctccactggaagatagtatctgtttacatcaacaaaatgaatcaggtaaagattctttttcttattgtgcctcgagtttcgtttcactttaggaaatgatcgttgttgatctgatgaaaaagattaaagagagccaaattatttgtgaatcagtgggaatctttagttacttcacatggatgttaactttgttatatgaaacacacaaaaagatgagaaaagagaaatttcaaacggcaggaaaagaagagaaagtagaaacaatactaaagcttaaaaataaaaagcactgttttgataatgatgatgatactgaaatcatgggatccacttttgtctttgctgcttaagcatctcttacagaatcactaatttgttttgatttattgaacttataggttatgttgaagatgaagagcaggcatgttggaggaaccttcaccaagaagaaaaagagtaagtgattatttactctttttacatactataagtataacaccactttaaaccctgaatagtttggttggagatttctctaattccttccaagacatttcagatgattcttctaatgggtttaaaaacaaagaatgtttctttagtttgatattgaaagctttactttttgtcactatctactgtcaatgagtcaattatatgtgaacctggtaaagagaattcaaaactttgaggtgggtctgctttagatatggggatttgagacgagaaaaggaaaaaaaattgaaaaagcaacagtgtatatgtgactaaagtaactataggatcaaatcccttcaatcttttactttttgtcttgcttttgaatgtgaacttgaagaagactcttctattaattattttactatctttccaattttgttacagacattgtgcttgatgtgatcaagaatgtcccggcctggcctggacgacatttgctagagggaggagatgatctaagatacttcggtttgaagacggttatgcgaggtaatgttgaattcgaggtcaagagccaaagggaatatgaaatgtggacacaaggtgtctcaaggcttcttgttcttgctgctgagaggaagtttaggatgtgaataaacgttcaatggctgcttggtttaagtgtgagttttttttttaacttatgtggtcaaatttcattagtaggggttcttttaaggtaatggttttttgggttgggtataggataaaatggacccaccagtcaaggtgaggaagcatttgggtaaacaaaacttaaagggggtgatctgtaatatctatgttcttagttttgttttggttgttgatggtctttc

SEQ ID NO: 149464 - DNA, 679 bp, Arabidopsis thaliana landsberg
tttctcttcttttagggcagtgcttgagaatcattgaagaaggtgatcgctggtgctgttttgataactcaaagccgttttgctgaaagagggttaccaaagttagaagctcaagaacttggagctgtgtcttctttttgtatcatgccatattttattcagaggcttttcaatacttgcaagtcatctctctcacctaatggtcctgtgtctgaggaggccttagacaaggttcgcaatgtcttgggtacgacgacattattgatccactgtcttgcaaattttcttcccttctatttctgcaatcttgcttgctccattatgttctttaggcacactgtgttgctcgttatgtctgaattgcagttctatattggttatcgcaccttcttgtggcattagacaactgttgtttatcgtgtctattacttgcagacatacgtgatacttgtaatttttatttcagagaaaatcaagccgtctgatgttggtctcgaacaggaagctcaattggtgcgtaattggcctggtcctgggaacgagcgtaatggaaacaatcattctctgccagcaataaaataccttcagttacatgagtgtgacagcttctcggtgagcaaacattcttgcacgatggtatcgcatgtagttttcaccttttaaagttggagttggcctt

SEQ ID NO: 149465 - DNA, 746 bp, Arabidopsis thaliana landsberg
atgggaaactgttgcagatctcccgcagcagttgctagagaagacgtgaaatccaactattccggccacgatcacgcccgcaaagacgccgccggcggtaaaaaatcggcgccgattcgagttctaagcgatgttcccaaggaaaacatcgaggaccgttacttactcgacagagaactcggccgcggcgagtttggtgtcacttacctctgtatcgagaggtcctcgcgtgacctactcgcatgcaaatcaatcttaaagaagaagctgaaaacgtcgattgatatagaggacgttaagagagaagttgagatcatgaggcaaatgcctgaacatcctaatattgttactttgaaagagacttatgaggatgataaagctgtgcatttggttatggagctttgtgaaggcggtgagcttttcgataggattgttgctagagggcattatacggagagagctgctgcttcggttattaaaacgatcatcgaggttgttcaggtttgtgaaacttttatctatgaatcttgttggacggtattgatttgtaacattgcttgaaaggcacgtttttatattagagtaatgtggtttattcaatctgtgttgcagatgtgtcataagcatggagtaatgcacagagatttaaaacctgagaacttattgtttgcaaacaagaaggaaactgcatgctttgaaggctattgattttggtctctctgttttctttaaaccaggtgaggtat

SEQ ID NO: 149466 - DNA, 489 bp, Arabidopsis thaliana landsberg; identical to SEQ ID NO: 56523

SEQ ID NO: 149467 - DNA, 629 bp, Arabidopsis thaliana landsberg
  unsure (1)..(629): unsure at all n locations
tgatccataaagtaccggccatgctattctctaccgnagggtataccggaaacctctatcatgagttcaacgacgggcgtattcctttgtatataacatctaaacgtttcaacaaaaaggttgtctttgtgattgctgagtatcacaagtggtgggagatgaagtatggagatgttctctctcagctctctgattactctcttatcgatttcaacaaagacaagagaactcactgcttcaaggaagccattgttggtcttagaatccatggtgagttaaccgtcgatccttctcagatgcaagatgatggaactaccatcaatgagttcagaaatgtacttgatcgagcttatagaccccgaatcaacagactggacagattagaggagcaacgattccacgcaagactagaaaagagaagaaaggctaagaggccaaaactagcattgttttcaagaaccgggtctcgagggataacaaacgaggacctaatggtgaaaatggctcagaggatcgggtttgacatcgaggttttgagacctgacagaacaacggaactggcaaagatttacagagtgttaaactcaagcaaagtcatggttgggtacatgacagccatcccattttgt

SEQ ID NO: 149468 - DNA, 500 bp, Arabidopsis thaliana landsberg
tcagggaaatgatgtgggaacccaataccgttcagggatatatttctacaacccggagcaagagaaactagcacgcgagtcactggagcggcaccagcaacaagttgacaggaaggttgtgacagagatcttaccggctaagaaattttatagagctgaggaacatcaccagcaatacttgtctaaaggagggaggtttggtcttaagcaatcaacggaaaaaggctgcaacgacccaatccgctgctacgggtaaaagccttgcttctaaccgaaagcagaggatgcttccacttatctatgatagattatagcaattatcgttgaaaaataaagaagccgaggctacttatgtaacttgttcttgttcataaaactttttaagtgttcaatcctttaggtatatagtattgtttggatgttctcgattgaatttgttcttgtaagattcatcaaaactagtttgagtaaaacgtaaaatgattttttagtgtctttta

SEQ ID NO: 149469 - DNA, 525 bp, Arabidopsis thaliana landsberg; identical to SEQ ID NO: 80564

SEQ ID NO: 149470 - DNA, 627 bp, Arabidopsis thaliana landsberg
ggaaaatcttcaaagtgtttgcagagaaatctaaattcatcaacagttttttacaaaagaaatggaaaacggagaagcaaaacagagtgtacctcttctcactccctataagatgggaagattcaatctttcccatagggttgttctagcaccattgacgagacagagatcgtacggaaacgttcctcagcctcacgctgccatatattactctcagagaacgactccaggaggttttctcatcactgaagccactggagtttcagatacagctcaagggtaactcaaaaaccctttcttttgattaaagtttacgtttttatttgtgggtttttgatctgatccttaccacatgtgtgtgaattgatcttgaagatattaagatactcctgggatatggactaaagagcatgtggaggcatggaagccaatcgttgatgctgtacatgccaaaggtggtatcttcttctgtcagatctggcatgttggccgcgtttctaatcgcggttttcagccaaggaggcaagctcctatctcttgtacggggaagccaattatgcctcaaatgcgtgctaatggcattgatgaagctcgctttacccctccaagacgtctaagtatcgaaga

SEQ ID NO: 149471 - DNA, 600 bp, Arabidopsis thaliana landsberg; identical to SEQ ID NO: 13253

SEQ ID NO: 149472 - DNA, 552 bp, Arabidopsis thaliana landsberg
cgctcttgcttcttgccattgctgtttcgagctctcctcaaagccctaattttctcctcctcttcttcattctctcaccatgaagctcgtcaggtatggtttctactcggattctctttatttcttcggtttaattggaatttgcttcgaaattttgagatttctctttgttttcatgctcttcgatgtttgatttcgtatctggattttttcgcaggtttttgatgaaattgaacaacgaaacagtttcaatcgagcttaagaacggaaccattgttcatggaaccattactggtacgcttctcttaaaaacccagctctattcgctgtttagggttttgtgtaaaatctacgatgcttacctgtaatcgatggttactcgcgtattcacaaattctgatggtgtagtttgagtttagctagtgtctttcccctaataatgctttgttggtattaaccctagtgacactggtcaagtcagatgcagatgagtacactagattttacttgaatcgggtttatgagatagtttagttcttcttcaaactttga

SEQ ID NO: 149473 - DNA, 1370 bp, Arabidopsis thaliana landsberg
gatcctgttccttcttgcattcctgggattctgattacagatgtctctaagtcaatggtaatatagttttgttgcgttcactatacagttatttcctccctcgtcttttccttaacttggaatgccattttttcttctctaggatttgattgattactacaatgtcacaacgtcaagagactggatgggaagggtaaaggactttaaagctgaaggaagcattggagacggtttggaacccattcttcacaaatccgcacctgaagttgctctgttctcagctcgaggacccaacaccaaagatttcagctttcaggatgctgatcttctcaaaccagatattcttgctccaggctctttaatatggtctgcctggtctgcaaatggaacagacgaggctaactatatcggtaagcatttccaaaaatcttgtcagaattatccataagtactctagaccaagaaccaaaatgtttagtttttgactattgagcaggcgaaggatttgcactaatttctggcacaagcatggctgcaccacacattgcgggtattgctgctctggtgaaacagaagcatcctcaatggagtccagctgccattaaatcagctttgatgacgacttcaacagtcatagatagagcaggaagacctctccaagcacaacaatattctgaaacagagacagtaacacttgttaaagcaactccgtttgattatggaagcggtcatgtcaatccaagcgctgctctagaccctggtctcatctttgatgcaggtaaatactcttactccattgacataaacctcagttttcgtcactccctcttcaatctctggtcactaggacactcattggtattattcttgtatggccatacactttgtgattgattgagttttcttgaaggttatgaggattatatagggttcttgtgcaccacacccggtatcgatgctcacgagataaaaaacttcacaaacactccatgcaatttcaaaatggttcatccttcaaacttcaacacgccatccatagccatctctcatcttgtcagaacacaaaccgtaaccagaagagtgacgaatgttgcagaagaggaagaaacatacacaatcacatcgaggatggagccagcaatagccatcgaagtgagtcctcctgcaatgacagtaagagcgggcgcttctagaaccttttcggtgattctaacagtgagatcagtgactggagcttatagcttcggacaggttacattgaaaggaagccgagggcataaagtgactctccctgtggttgctatgggacaaaggcgataaacaaaacgtatgagattttgaaacattattattgctattattgttgaaat

SEQ ID NO: 149474 - DNA, 1256 bp, Arabidopsis thaliana landsberg
gatttcgttaaaatgtagccaaaaatgggtatgacagatgaatttgaaacttcatatcaagttcttcgaggatttgagactgatattaccgctgaagttaatgaaatcaaggtaacactaccacttaaaatctttccttccaagagttacatgaagactggttttcaaacgctaatttttcatcttttctgcaaatctgcagagatctgtggcatcatctacaaagcgaaatacagttcggtttgtagatctcaaacgcaggagatactatttcccacttatggtacaaatattgaatatctttccttggaatatactttgtctatcataagaaacattatcttaaaacttcttttttgttgtgtgtgtgtgtgtaacaggttggtatagggttgcttgtacttcaacaacttggtggaattaatggtgtcctattctattccagtacaatatttgaatctgcaggtagggtttttctaacacctgaagcttcttgtttcatattattactttaatttttcattttccgtgttttcatgtttaggagttacatcgagtaacgcagcaacatttggggtcggggctattcaggtagtagcgactgcaatatccacttggttggtggacaaagcaggtcgtcggcttctgcttactgtgagtattaactcattactttcatatctttccgacttccctctacagaaagatttaagacatatccaagattaactaatgcaaatggaaaatattttccagatctcttcggttgggatgacgattagccttgtaattgttgcagctgctttctatcttaaggtactttttaaaatcttgaacttccatacacatcatttcatcttctgcaacaaatccaagattcgactttctgagttttacatctcttcttttaggaatttgtgtctcctgattcagacatgtacagttggctgagcatattgtcagtagttggagttgtggtaagttagttatatagcggaactttctagaatgcaatgaatgattatttgtgccttaactctgttgaatcgttataggcaatggttgtctttttctcattgggaatgggacccaataccgggctcattatgtctgaggtaatgagttggttagaagttagaactaagtgttgtaagaaccgaaaagcgaaaaacttattgaactctacctttgcttgctttgtttgttgtttgataaacagatccttcctgtgaacattaagggtttagctggaagta

SEQ ID NO: 149475 - DNA, 1686 bp, Arabidopsis thaliana landsberg; identical to SEQ ID NO: 33993

SEQ ID NO: 149476 - DNA, 1439 bp, Arabidopsis thaliana landsberg
  unsure (1)..(1439): unsure at all n locations
aaagggaagtccaagggcttggggtctgtcaactttgaaaatgctgatgatgctgctagggctgtggagtctctcaatgggcacaaatttgatgataaggagtggtatgttggtagagcccagaacaagtcagagagggaaacagaactaagggtccgttatgaacagaatttgaaggaagctgcagacaagtttcaaagttcaaacttgtatgttaagaatttggatcctagcatttcagatgagaaacttaaagagatcttttctccttttggtaccgttacatctagcaaggttcaatgtccctctctctctctctttatttgtagtgagttgactctcctagttcattatttaagaagttcttttattaaatattacaggtgatgcgggatcctaatggaacaagcaaaggctcaggttttgttgctttcgcaactcccgaagaagcaactgaagctgtaagtcagttgtatcgtcttgttgattgtatttatgaggactttgattgttagtaacagtggaatactgtacagatgtcacagttgagcggtaaaatgatcgaaagcaagccactctatgtggctattgcacagcggaaggaagacagaagggtcagactacaggtttgcttctcttggaatcacctcgtcttgtgatacacttactactcctactttgcctgttggagtttcaactctaaacaattggacccatcatgtacaagtcttagaatgtcccactgcgtataattatcaatactgatgctgattcttctttataatcaagtgcaacaatatataaagcataaacaacatatgtcctagtatttttgtatcacagaaaaatctcttttttctcctgctgctgagtatttgcattgatgtgaataggctcagttttcccaagtgaggccagttgcaatgcagccgtctgttggtccccgcatgccagtgtatcccccgggtggtcctggtattggacaacaaatgttctatggtcaggcccctcctgccatgattcctccccaggtaatcttcatgttactctactttaagtagccgtgtacgattttacacaaagatatgcacatgtttattttctaccttgggtataatgaattacaagctgacagatgcttttaagtcacatgaaaagtttttaaattctttagctctatagttgctatactcatacttgagcctttccaaatctattttgaaactgctgggataatattaacctgtacttatgcaatgccacagcctgggtatggataccaacagcagcttgttcctggaatgagacctggtgggggtcctgtacccagtttcttcatgcctnnnnnnnnnnnnnnnnnnnagcgtcctggaggaggaagacgtcctgggggaatccaacactcccagcagcaaaatcccatgatgcaccaacccgtt

SEQ ID NO: 149477 - DNA, 1007 bp, Arabidopsis thaliana landsberg
atgaattacaggtgttgtttattctctggaggttggtgatacaatggattctactgctgcaaccaaacgtgttgttgacccacttactgtatgttttttcaattatggggtttcttctcctttttactagttgtaattgtgattctttgtgtggtttgttctgtttttgttgttgttatagtgtatttttgggtttggttaatataggttgggagtgcgtttgtcaatcagtactactacattttgtgtaacttgcctgagcatctgccccggttttatcaagagatcagtaaagttggccgtgttggacaggacggagtcatgcgtgatttctccacttttcaagtaagtagttcttagtagtttagttgggttcggttgaatgaggatgagactatatcatttttatgatgttaaggattagtaaataacatggggttgggctggagtgtcatttggtatggtggaaattggatggcagtttaagtaacttgctaaaagtgtctctcattgatgcttattctttgtgcagggtataagtgaggagcttaagagactgacttatggagattgcaactcggctgagataaccagttatgatactcaagagtctcacaatgggggtttccttctcttcgttactggatacttcactctaaacgagagatcgagaaggaaattcacccaaacttttttccttgctccgcaagaaaagggtttctttgttctgaatgacatcctcagatttgccaatgatgatgctaaggataatgttccagagaccatagatgggcaagttgtttctgggataaactctacaacacccagtaatatcaatggtaagttaaacttatatttcttctaacgcacattctattccaatccttttcttacactttagctcctacaggcattaagggctcgcagcaaactgcatgtgttgcagtagatcctgtttgtaagaaagtgtccaatcccttgcataatgagaatgctaagcataatgt

SEQ ID NO: 149478 - DNA, 949 bp, Arabidopsis thaliana landsberg
tatcagccttctcgttgggaccatcaccatctcctctcggtcgaaaataaatttgtggtacgtagatatcccgtaaacactctaacttttttacagtgacgtaatgttgaatactatgttgataaattttttgtaatgttccatatattgcatacagaaagataaaagggtacgagagagagatttgttgaaggaaaaagtgagaaagatgctcaatgatgagcaaaagacttatcttgacaaattggagttcattgacgatctacaaaaactcggggtttcttatcattttgaagccgaaatcgatcacattttaacatcttcttataaaaaagatagaacaaacatccgggagagtgacctacatgccaccgcactcgagttccgacttttcaggcaacatggtttcaatgtttcagaaggttattatctttactctaaaaatcaaaagtttaaaagaaagataattgcttatatatatacgttaaaattttgctgtctaaaaaatatctggtcttatatactagtgaattttgtattacagatgtattcgatggtttcatggaaaattgtgggaagtttgaccgtgatgatatatatggtttaatatctctttacgaagcatcatatctttcgagaaaattggataaaaacctgcaaatattcatcagaccttttgctacacaacaactcagagactttgttgatactcatagtaatgaagattttgggtcgtgtgacatggtggaaattgtggtccaagcgttggatatgccctactattggcaaatgagaaggctatccaccagatggtacatagatgtgtatggaaaaagacaaaattataagatccttgtcgtcgttgaatttgccaagattgatttcaacatcgtacaagctattcatcaagaggaactcaaaaacgtttccaggtaatattaaatcttag

SEQ ID NO: 149479 - DNA, 1439 bp, Arabidopsis thaliana landsberg
agccattggaagggtatgtgttcctttccacaatgcttaagcattgtttctttttttggctgaatttcttacactgaaacaggttaggaacgagaaagctcgaagatacttgagcagcatgaggaagaagaagcctattcctttttcacataagttcccacatactgatcctcttgctcttcgtcttctagaaaagatgttgtcttttgaacccaaggaccggcctacagctgaagaggtggttcatacatttcgttctttacactccttatgatgtaactttggttatagctaactaaatggttttatgtgttacctcaggcgcttgcggatgtgtacttcaagggtttagctaaggttgaaagagagccttctgctcaacctgtcacaaagttggaatttgagtttgaaaggcggaggatcacaaaagaagacgtccgagagctcatatacagagagtctctggagtaccacccaaagatgctgaaagaatacttggatggatcagagccaactaactttatgtacccgaggtaccggcctgagctgacctgcttcatattatactcctgtgtattatccatgttcttatggttaatgtattattcattctgcagtgcggtggaacatttcaagaaacaatttgcttacctcgaggaacactacaagaatggtacttctcataatccccctgagaggcaacagcatgcatcattaccaaggtatgctttacgtcctttaaaaatttgatcatttgggattctttcgaaacagctcaacaaagcctctttttatgttttgcagggcttgcgtattgtactctgataacaatcatccggtggcacaacagagttcagctgaagtcactgatggactctccaagtgtagcattagagacgagagacctcggggtgcagacaggaatgcccagatgccaatgtcgagaattcctatcaacgtccctcaaacaatccaaggtctctcaccctctctgtatataatgttatgatgcagaataactctgtctcctgaacatttatctggttgtaatgaagcaggtgctgcagtagctaggcctggtaaagtagttggatcagtgttacgctataacaactgcggcgcagccacaggcgttgaagctcttgaacaacaacagagaaggatggtcagaaatccagctgctgcgtctcaatacccaaagaggactcaaccttgcaaaagcaacagaggagatgaagattgcgccaccgctgctgaaggtccaagtagattgaagccaaacactcagtatataccacaaaaagtgtctgcagcacaagatactgcgatgagtcgctggtattcaacaaaatgttacagttctagttttagctttaccacctcaagtagggggagagctaaaaagagaaaccctctgagtcatccattgtgtcacgggg

SEQ ID NO: 149480 - DNA, 884 bp, Arabidopsis thaliana landsberg
atgagaactaaagcacaagaaatagttttggtaagtaaacagaaaatgcaaaaagtgtgagagtattaaggggccaaaccatggtattttcatgcgcataccaaagttgtgtttctctacacttacgtaagtaaatatcaaaaactttcttctatgttttacagtttgcgtataaaaacttcagtgtaaggtagatgttacaatgtacatcaaacttacatcattaactgttgtttcacatcgtcgaagcaaaaatgattatatatctaatttcattactccctatcatcgtcgccaccctcatgctttatcaacgatggtggagatccaacataccgccgggaccaaaaccaaagtttctgcttggaaaccttcatcaaatgaaaccactttggacgcattctttctcggagtggtcagagacttatggtcctatcatatcggtgtggatagggtcacagctcactgtcgtggtctcgagctctgatctagccagacaagtgttgagagacaaagaccatcagttgtctaaccgacacaggatcgcaaggatgactcagaccggtactgatcttgtttggtccgattacagtccacattatgtgaaactgaggaaactctgtacactcgagctcttctctctgaaaagcatcgaaaatttcaggtccttgagagagatggaagcaagatcgatggttgtgtcgattctgaaggacttaatgagcaattcaggggatgatcaggagcgaaaaccggtgattgtgaggaagtacctagctgcggttgttttgaataccatctcaaggttaatgatagggaaagagttcgggtctgaagaaagaaaagagtttaaagccatcgttgagaaagaacatcttctcagt

SEQ ID NO: 149481 - DNA, 1012 bp, Arabidopsis thaliana landsberg
gcccacaaatatctttctttctttttttatggttcttcttcaccccaactgtattagtactgttcgtctttcagaaaaaacaataatagatagaggaaaaaagaaagaaacagagaagtgagaaaaagcccttaaaactcaaacactaaaaaatttcagtgtcgattcaaaaagttttgttatttgatctgtttctgtgtaaaaaaaatggtgaaagatctggttgggtatagattttatccaacgggagaggaattgataaaccattatctaaagaacaaaattttgggtaagacttggctcgtcgacgaagccattagcgagatcaacatctgtagttacgaccctatttacttgccttgtaagtttccttacttcaaaatcatcatcgttgtctcatcatcggtcatttctaattctggatttgtttggttgttgtagctttatcgaagataaaatcggatgatcctgtgtggtacttcttctgtccaaaggagtatacttctgcgaagaagaaggtaacgaagaggactacaagttcagggtattggaaagctactggtgttgataggaaaatcaaagataagagaggtaatcgcggcgagattgggataaagaagacgcttgtgtattatgaaggtagagttcctaaaggtgtttggactccttgggttatgcatgagtatcacatcacttgtttgcctcaagatcaggtataataaactcagagtttcttgaatttgagcttctgtgttagtttgacttagcgttatgtttctgttagttgatcttcttgaattggatttgggtttgattcatctgtccctgtgttggttgctatctttatcccaatttgaggttaaagtcatgttcttgtaagaatagatttgggtttgacttatcttttccctatgatgcttagtacatcaagtttaggttctgtgtatcagagtttgaagtgttatatatagaagttgtggcctagaaggctagtgtatttgcttccctgtgg

SEQ ID NO: 149482 - DNA, 1399 bp, Arabidopsis thaliana landsberg; identical to SEQ ID NO: 6832
  unsure (1)..(1399): unsure at all n locations

SEQ ID NO: 149483 - DNA, 508 bp, Arabidopsis thaliana landsberg
tcaagaaaaaacaacaatcatgacaaaacaatgtcaagctctctttctactcctctccgtctcctacctcttctcctcagacctcacggctgccaccgtcaccgcggccggaacttctacaaaagcactaaacttcattcaatcttcttgcaaagttacaacgtaccaatccctgtgcgtggacacgctctcggtctacgcaaatacgatccaaacaagccctcgacgcctcgtggatgcagctatcgccgtgagtctgaaacaagcgctgtccacgaagctcttcatctcacacctgaggaagagccagttccaaacccttgcagactgccgaccaacaaccgaaacatacactacagatgcgcagtgttctgtcgaagaactccaagaggtggtgaattgtaacagttggaccgaatgcttgtttcacacaaacaatgctgaagtctgtgccattgcgggtgagtatatggtcgagaattcttgctccagccccgtcgcggatccg

SEQ ID NO: 149484 - DNA, 2194 bp, Arabidopsis thaliana landsberg
  unsure (1)..(2194): unsure at all n locations
gttcagagcaaggtttctgcagatagaatagcttcttacntgcaacaaagcgagactcagaaagatgcagttgagtattgctcaaatgatcatacagaatttagtgttgaaatagaaaatggagcatttagttgggaacctgagtcaagcagaccaactcttaatgacatcgaactgaaagtaaaaagcggaatgaaagtggcggtttgtggagctgtaggatcaggaaaatcaagcttactctcttcaatcctaggggagattcagaagctgaagggaacagtcagagtcagtggtaaacaagcttatgttccacaatcaccatggatactaagcgggactataagagataacattttgtttggaagtatgtatgaaagtgagaagtatgagagaactgttaaagcatgtgctttgataaaggactttgagcttttctcgaatggagacttgacagagattggagagagagggataaacatgagtggaggtcagaagcaaaggatacagattgctcgagcggtttatcagaatgctgatatatatctacttgatgatccttttagcgccgttgatgctcatacaggaagagaactctttgaagtataataatgttcatgacaatttgttcgtttgatcctttctctctttaaactccacacttgactatgttttgtttttacttgttttgcaggattgcttaatggggatactgaaagacaaaactgtactttacgtcacacatcaagttgagtttcttccagcagcagatctaatcctggtaagagaaacagccgttgataataagcaaatgcaaaagaggctgttagtttttccattaacattagtgtgtgtactttgtatactaggtgatgcaaaacggaagagtgatgcaagcaggcaagtttgaagagcttctaaagcaaaacataggttttgaagttcttgtgggagctcataacgaagcgctagactcaattctatcaattgaaaagtcaagcagaaacttcaaagaggaatgaaaagatgacaccacatcaattgcagagagtctccagacacagtgtgactcagagcataacatttcaacagagaataaaaagaaagaagcaaagctagtgcaagatgaagaaacagagaaaggagtaattggcaaagaagtttacttgacatatttaacaacggtaaaaggcggattgcttgtgccattcataatattggctcagtcttgcttccaaatgctacagattgctagcaattactggatggcatggactgctcctccaactgctgaatccataccaaagttaggaatgggtcggattttacttgtttatgcacttcttgctgcaggaagttcactttgtgttttagcacggactattctagtcgcgataggtggactttcaacagcagagacgttcttctcaaggatgctctgcagcattttcagagctccaatgtcatatttcgattcaactccaacaggaagaatcttgaacagggtgaagtaccagaatcaatttaacaaaaaacatggttttgttttttataatcaagactgaaaatacctttggttttttcatgttttgtaataggcatccacagatcaaagtgtcctggatttggaaatggcagtcaaactaggttggtgtgctttttcgatcattcagattgttggaaccatcttcgtcatgtcgcaagttgcttggcaagtttgtgtcatcttcattccagtagcagtagcctgcgtgttttaccaggcaagagagaaaacaaatccaatttcttgacaatgatacaacaaatcttgcttacttttttgtttactcgtgttgtctttagagatattacacaccaacagcaagagaactgtcacgcatgtcaggagtagaaagagctccaattctccaccatttcgctgaatcgcttgctggtgcaacaacaatacgtgcttttgatcaacgagatcgcttcattagctcaaaccttgttctaatagatagccattcaaggccatggttccatgttgcatcagcaatggagtggctttccttcaggttgaatttgctgactcatttcgactttgcttttttcttggtgttacttgagactctccctgaaggtgtcatcaatccaagtaagtctgatacatcataaaccataaaatacattgtctaatgggatcagaaat

SEQ ID NO: 149485 - DNA, 639 bp, Arabidopsis thaliana landsberg; identical to SEQ ID NO: 53630

SEQ ID NO: 149486 - DNA, 408 bp, Arabidopsis thaliana landsberg
  unsure (1)..(408): unsure at all n locations
ttcttctcttctcattgttttgnctacataaagaacatcatcaatccaagcaactatgttaaaagctaaaccttcaagaactcttgaataactctctaacacagcttttccaacatcctgcaaaccacaaaccataaattgttataatattcaataaaacatgattcaggtcactgtttgtttcttaattaccttgttgcaatgaatcttgcaaatatctaacgatgtctgagacaattctgggtaccgttgtttcaaacagaagagcaaagactctgctctctcagccaaaacatagttcttgtcacttctctctgtaattgacattaaatcttttaccatattccatgaagacttggaattgttaagacaagctttgcgtcttcatgtgtacattgaagcttttac

SEQ ID NO: 149487 - DNA, 223 bp, Arabidopsis thaliana landsberg
  unsure (1)..(223): unsure at all n locations
ctacgagtcngactgtagaggatgatcaagctgcgggtagccatgggaaatctccagagcggttaagcccaggaggacccgacccacaacatcactagttattntgtgtttttcaatttcttcgagatgtttattacttatcaataatttggttgcaacgaagctgtttttcttttttgtaataaatttgcgaatttacgtttgtcataatactacaaaatta

SEQ ID NO: 149488 - DNA, 939 bp, Arabidopsis thaliana landsberg
ggttgctttttaagcgaacgtattgtgtaagtgtacatgtcatatctttacatttgattattttttttattttgtttcgtacaatagtaatttttctactatacgtaatatcaaagtataattgcttactttaaaatgtgaatatataggcctgattttgtggagtatgcaaacttcacgttccacgagtatggggacaaagtgaaaaactggattacgttcaacgagccatgggtctttagccgttcgggctacgacgttgggaagaaagcaccaggacgttgttctccttacgtcaaagagtttggaaagctttgtcaagatggacggtcaggattcgaaccttatgttgtcagtcacaatttactcgtgggtcatgctgaagctgttgatgctttccgaaaatgcgaaaaggtaaaaacagaataccctatttaatcacattcgtttctccacagtgacatataaaccaacttttttaaaagttttacttattaatttttcggttttttgaaaaagtgcaaaggtggtaaaatcggaatcgctcatagtccagcttggtttgaacccgaagatgtggaaggaggtcaagcgactgtaaaccgtgtgcttgatttcgtcattggctggttaaaaacacaaatcatcaactcttgatatattttaatggtattcttgattatatacataattgcaacattgtgtttttctttttctttaggcatttggatcctaccacgttcggggactatcctcagtctatgaaagacgcggttggatctcggttgccaagatttaccaaagcccaaaaggcaaaactgaaagattcgacagacttcgtgggaataaactattacacttccttctttgcaaaggctgaccagaaggttgatagtcggaacccgacttgggctacagatgctctagtcgaatttgaac

SEQ ID NO: 149489 - DNA, 987 bp, Arabidopsis thaliana landsberg; identical to SEQ ID NO: 25166

SEQ ID NO: 149490 - DNA, 3582 bp, Arabidopsis thaliana landsberg
  unsure (1)..(3582): unsure at all n locations
tataattgtgaagtttgcttctttctaggctggaaggcttccggtggcttcagtatctggtgaaataacctatgggcctgagcgcctcatcattgtacctcaaggcaagcctattcctccctaatggtggtggtccccatttttccgtattaggtccgttatgttggggttaagtaagcctttcgttttaacctacaggaagttgaccatttcaaaaagatcttatatgctgatggaatcacctatggggagcttttcttggaaaatgagtaaaagcctgatatacttttatggatttttatcaaacattatcgaacttattctgtgttttgagactgatagttgggtggatattacaggaaggaaatgagctcatattatttagagcatgctagtgtggatcgccttcaaaagcatttcgattattttgatgaagaagcacgttccttgcttgccttaggacttccaatccctgcgtatgtttatcacaatgctcacgatcgtcaattttcttgtccatatttaaccactgcctcttgaatttaacaaattgctgcttgggggcatgctaggtatgaccagcttctgaagacatctcacgcttttaacattttagacgctagaggtttcattggcgtaactgaacgtgctcgttatttcggtcgaatgcgtaggtaagatctgttccagtttttttagagtgtattattgagcaatccaacgagcttgattaaccagagaggaaatgcttttaaacaagtcgttacttgtaaaaatatttatgatgtgcattttttgcttctgtgcatcctctttgaaagaatagcttggctcgccaatgtgcccaactgtggttagcgacacgtgagtctcttggacatcctcttggtgttgcctccgaaccagttcctcccgtttgtcacagagctgctctggaaaaagtggctgaaaaggttggcttgttttctaattagagaatttacaattggagcttttgttactgattaatgattatttccttttgatgagttgtgacttgtgagatattagtttgtgaaattttttggtgtcgccatcttcagcattacttgcttatatggtctatttacgcatcaaaagctgggtattttgatatagaaatatatttctgaagatgtcaaatacgatatagtttccttttttgttgtttatgtggtgttcaatcgttacaggtttctgaagatccaagatcgtttattattgagatagggactgaagagatgccacctcaagatgttatcaatgctagtgaacaagtaaaatttcatttcatttggagaaacttgacatttctctcgctatcactcactcatggacacttgtgggccgctcgctcatgctgcaccattttaacttcccaaactccctagattatgtgcttcttggttttccatttttcctgcgttcttttaatagaacatcaagtaactgtccttgttaatattgcagctcagggtcttagtgctagaattactagagaaccaaagattgcggcatggtgctgcgaaagcatttggcacacctcgcaggctagtggtaattaataagatcttttcacatttacatattattgctaattgatgtcaactccataaaagcatgaatccaatcttacagagaaaggattggttaacatcaaacttccttttcgtgcttagcattattggtcactgttaaaattttcgcttatgacgtttaaaagctggcttttcatgtgaggatgaanaactaaatttgatttatctgaacgttttttttttcaaatgaatcatggcaccccttgaagcttttctggaattcattattcttnttcttcttcttttaaggagttttaagtgaaggctcctttttcaggttttagttgatgctatgtcctcgaagcagctggaagaggaggttgaagttcgaggaccccctgcttctaaagcttttgatgatgaaggaaatcctacaaaggtttttttttgttttccctttggtcctcttttggtcacggatattaaattaactattcaaagtattttgggagacagtggtggaattaaagaaatagtatctggttcatttatttatcgccgcttaggtttatgctatgtttatttttttctttgtagcttgtattgactgcctaaagatatgtagatataatttttctcgttgttcttccctgccaggctgctgagggttttagccgcagatatggcgttccattggaaaaattgtacagaaaagtttctggtgggtgcatccatattagcatattctgttagcaggatcttgtttcttgttacccaacttcagacttcttcctttttctttattttctaggttgtgatattgcttttttttatatagttcttttcattgttatcttttttttgtctttatttcagggaagacagaatatgtacatgcacgagttacagagccagctcgacttgctttggaggttcttttcctctactctttttgttatgctaagggactgttattttcatctttcatgaaagacatagtatatccattaacttagcaaattatttttatttttattttttttggacaaaaacccaacttagcaaattattgatgctcactcttttcctcttacttttcgtatgatgctcacacttttcctcacacttcactatattggcttctgagtttttcgtggagagaaaaatacaactatttgctaagcatacattttctttttgggaccttgtatattttataggttctgtcagaagatttacctggtatactggctaaaatatcgttcccaaagtcaatgcggtggaactcttcagtatgtaacttatatttgtatacatcttcgttcatattgcctagactctgttgtaaaacaaggggtttgaattactgctttatcttttgctgtgattaacaggtaatgtttagcaggccgattcgctgggttatggccttacatggtgatctggttgtgccattctcctttgctggcatctcaaggtacgtttacttggctactcttgcttctctatgctttatatggcttcggaaagatgttaatatgcaaaatatttgtaaataaagtaactatctgtttcatcttcaaaatgcagtggaaatgtatcttgtggacttcgcaatactgcttcatcatcactgttggtaagaatataccctgcattgtcggctgtaagcatatttggatgtcatgcttcagatgtgtgctttatggtcttctatatattggcaggtacagaatgcagaatcctatgaagatactatgaggaattctggaatcaatattgagattgaggcatgtccttcgtgcattcttctctatccattatttattaaaaaaatatttttaactttcagcagggtgtcagatttctttcaatttgaatttgtagttatggatctatgtagtcatttcattggttactataatttacaggaaaggaagaaaatcattcttgagaagtcaaatgcactagcaaagagtgtgaatgggcgccttgttgttcgcaaacttacttatgaagtatatgt

SEQ ID NO: 149491 - DNA, 1237 bp, Arabidopsis thaliana landsberg
gctgcactctttccttcaccaatcaccatctcagtaaaccaccttttacttctattaaccgtctaaagattctaactttgaattaaaactcatatcttaaatgctcttgtttattgtgtttatgcaggattcctcgaaccattggggtctccataccgatgaaagctacattctttatcacatacataatggttgacggatgggctgggattgcaggtgagattctccggttaaagcccctcgtgattttccacttgaagaacatgtttattgtgaagactgaagaagatagagtgagagcaatggaccctggttttgtcgatttcaaggagactatcccatctctccagctctacttcctcttgggaattgtctacactgctgttactcccattcttcttcctttcattctcatattctttgcctttgcttacttggtctatcgccatcaggttcggtttcatacccaatcacccgtcgtatctaattctccgctaaattttgggttttcttgatggtgctttcttggtttacaatgcagataatcaatgtttacaaccaacaatacgagagttgtggagcgttttggccgcacgttcatggccggataatcgcaagcttgttgatatctcagcttctgctaatgggacttttggcttctaaaaaggcagctgactcaactccattgcttatcatcttacccattctcacactttctttccacaagtattgcaaacaccgcttcgaacctgcctttcgacaataccctcttgaggtaaataaagaatcttttgggctctcttcctaaaaaaaaaaggtttaaagccttcttacaaagacccgtgtttttggtcttaacaggaagcaatggcgaaagacaagttagagaaggaaacagaaccggagttgaacatgaaagcagatcttgcagatgcttacttgcacccaattttccattcattcgagaaagaagtagaattatcatcatcatcatcatcagaaaaagagactcaccaagaagagacaccagaggtaagagtggacaaacatgaaacacagtcgtctagtcctgtgacagagctcggtacttcttcccatcaccatcatgtctacaattccacttccccttcttctcactacgcttcagcttatgagcagtcatcgtctcagtatgaatatcactacaatactcatcagtacgaggagcatgagtaccgttacaattgatctctagaca

SEQ ID NO: 149492 - DNA, 3377 bp, Arabidopsis thaliana landsberg; identical to SEQ ID NO: 29501

SEQ ID NO: 149493 - DNA, 1054 bp, Arabidopsis thaliana landsberg; identical to SEQ ID NO: 36603
  unsure (1)..(1054): unsure at all n locations

SEQ ID NO: 149494 - DNA, 578 bp, Arabidopsis thaliana landsberg
atgaatgttacgcttacgtcatattgtgaaaaagagaaaggtacaaaatgggcaaaaatagtcaacaaagaacagcttctccgactttcgtagcctttaaaaaagcatccgcgtttgcttttctataaatatcttcgaaaccccattactctcaaatccaaccaacctttcaaaacagaacacgaagacatggaccgaacacaatctccaaagacagctctgttcgccgtgttggcaacactccttgtcttaaccgtgaacggccagtcactttgtaagacacacaggttcaccaataacctcgccttcgcagattgctctgacctctcggccttaggctctttccttcactggacctacaatgaacaaaacgagtacgtctcaatcgcctatcgccaccctggaacctctgcttcttcttgggttgcttgaggacttacccaagtagtactcagatggttgggacgcaagctctcgtagccttcacaaacacaacaactaaccaattccaggcctatacctcttccgtgagtcctatggtacgcggctcgaacgtagtagcctaagtttcggtgtga

SEQ ID NO: 149495 - DNA, 711 bp, Arabidopsis thaliana landsberg
  unsure (1)..(711): unsure at all n locations
gaacacgctagtcaaatttgtgctgaanaatctgtgagtagagttatttcccttgtgtcccctgtgagaatgggatattttacctcatagtccagatctagtagtgtaattctataagttttatggattagaatatttctctttcactgatggattagaatctggagcaattacttatgtgttatctatagaagtgtatattgatttgagggtggtcattcatgagcaagttgtgatggtttactctcaggtgaatgtgaaaacccaagtggttattggggatcccaagtataaaatctgcgaagctgtagagaatttgcatgctgatcttcttgtcatgggctcccgggcttatggccgcattaagaggtaccaaactcttcttccagtactctagtatcttgctatgttgaacactgatgaaagcgctgtaaatcaaattccaggcgtttgatcttggttactatgctgaattagttgttccatatcggtttactctagtttaagattgtttcgctttcgcttgaaatggcatatagatatctactgttattttttccaactcgtgcggtcaaataacagaagaaatgtttagttaatctttgaacttgtgtgaagacaaatctctgctcaaccaccaagtagtgcttcgcggaatctttatccctttgaaaatgtttatccaatcacgtcctggtgtattagtagttg

SEQ ID NO: 149496 - DNA, 513 bp, Arabidopsis thaliana landsberg; identical to SEQ ID NO: 11032

SEQ ID NO: 149497 - DNA, 1236 bp, Arabidopsis thaliana landsberg
agaataggttgaaagtggctttggcattaggtgttgtggttttatgcattgctgttggtgttgggattatgcatttcattgaggaaatcgggtggttggattcgttttatctctcggttatgtcggttactactgtcgggtatggagatcgggcttttaagacattgcccggtaggcttttcgctgcgatatggctgcttgtgtctacattagctgtggctcgagcttttttgtacttggctgaggcgagagtggataagaggaatagagaacgggcgaagaaagtgctttgtgaaacaatgtctgtctctcagtttttcgctgcagatattgataacaatggctgtgtgaggtaatttgactcattccttatccatattatatgctctgacacactccttaaggttttaagaatcttaaactgatatctgaattaactgtgtgatgcttatgtttgttaaaatatccattgtgacatccgtaatgtttatgcatttcttagaagtcatccaaaagattttgtctttgctatttattattagtcttttaattttcgtttgtgtagaggatctttgaaaacaaaaacattcatagctcattagctaattagattcttgaaggtgttggatttctaagttaattcatattctgcacttcttcttatgaatctttttgttcaagaacatagtttgtggtcttaggctaagttgaagatctgtgaatgtgtgatgcgaaagcatcgtgtcattgtatgttttcggcttgatataaagtttgaatgaccatgaaagggaggcttagacgcattttcggatttaacacagagaaatgctttgcttgtatactcactcaaacctgagatatcttctggtttttttctttgtttttgcagtaaagcagagtatgtgatatacaaactgaaggaaatggagaaaataaccgacaaggacatattaccaatctccaaacagtttgacaaacttgaccgatgcagcaacggaaagatcactcttttagatctcttggaaggtggcagtggcgattgatcaatcctctgcaactttttgttttagcttagaattacagttactaattacaacggatcaacgatcctaatgatgctaatggtgatgatgaggagtccagtctccagtttatgtaaactggtttggaccgatattatgtctttggtcttgtcttgcataattggttaagcaggattcactgattcacatc

SEQ ID NO: 149498 - DNA, 1315 bp, Arabidopsis thaliana landsberg
gaatatatgtttaagttttatcattcgcttcactccatatgataatgtgtagcctaattttgatttggaactgacattgtaacttattgttaaacatcatttgacatcattgctgacgtcatagaagtccaacacttggccgacgtgaaccgccagttccgttgcaagagagagaaccacccaaatggccactggcgcagcgaccacgagcgtatctgtcaaatgtgcagccgtggcgactatcctttcatcattagttttcaactcttcactttttttttatcaagtggaaataataaatcattctctagggttataacacgagacacattcgtaagctacgttctagtgaattcacaactttttgggaagcataactcattgtgtctagggttatgttggttcattgaatctcagagttcatctgatcaacctttggatccttgaatgctaattatgcttacagttttcattttgtttcgtttgattgttgtttactccaaaataataatccaaatataagaccgcttttcctaaaaaggaaagaaattaatctgtcttcttccccaatcccgaaactttaaccttaaccccattattttccccaattgaatattctcattcccaattttatctccttcttctccatcgcttaactgatctaatcccccaatttataaaaccctaactcttcatttgattcatttctacattctccagattttcgtgtccctcttcgaattctcatctctaaccatgagcgcaatccatctcctccgcaaaatttccacgaaaactccttcacgatttcacagaagcctcttcttctccactttctccaaggattcattttttgatttatctcgaaccacctcaattcgccatttatcatcaagccagagattcgtctcttcgtccatttactgtttcccccaatcaaagattttaccaaatcgattttccgagaagacgacgggaatctccgtaagacaattctcaacatccgttgaaactaatctcagtgacaagagtttcgagagaattcatgttcaaagtgatgcaattttagaaaggatacacaaaaacgaagaagaagtagaaacagtttctattggtagtgagaaagttgtgagaaaagagagtgaagctgagaaagaagcgtggaggattttggaaaacgctgttgctaggtattgtggttctccggttgggacagtggcggcgaatgatcctggagattagatgcctttgaattatgatcaagcttttataagagattttgtgccttctgctttggcttttttgcttaaaggtg

SEQ ID NO: 149499 - DNA, 3251 bp, Arabidopsis thaliana landsberg
atggagaagagccgccgtagtagtaagggcagtgcaagcccaaatcgcttaagcacatcacctcgagctgacaatatgcagcagataaggggaagaccatcttcagcacgccatcctagtccagcgtctggtcgacgatcaggtaccccagttaggagaatttctcctactccagggaaaccctcaggacctgtatcaagatctccgaccccaacttcgcgaaggatgagcactgggtcaactaccatggcatcgccagctgtcaggggaacttctcccgtaagttctagtcgaggcaactctccttcacccaaaataaaagtgtggcagtcaaacattcctggtttctccttggatgcgccaccaaatctccgaacttctttgggtgatcgaccagcatcctatgtaagaggttcctcgccagcatccagaaatggtagggatgcagtctctacacgcagcagaaaatctgtttctccaagcgcttccagaagtgtcagttcatctcacagtcatgagcgtgatcggtttagttctcaaagtaaaggctcggtagcatcatccggagatgatgatcttcattctttacaatctattcctgtaggtggctcagaacgtgcagtttcaaaaagagctagcctttctccaaatagtagaacttctagatcttcaaaattactgtcacctggttcagcaccgagaaggccgtttgagtctgctcttcgtcaaatggtacatattaagcggcataccacttctttttttgtccatgattcttggatttttcattatcttctagaagtacatgttttactctgcttgcatcaacatgtttgcacctgttagtattccaacatataacctgcagtctatgagaacacatcacagaacattgttgtcagtctgtcatatctacgacaaaaatagcttgtctctaagttcccatttgttttctgttacatccttagattccaaagtcaatactttattgatagcatacattcaatagatattctggtaattacccctttttgatcctacagagatatatggaacttttatttatgatctatatctatcatgcaggagcatcctaaaagccatcatagcatgtttaggcctcttgcttctagccttcctagcacaggcatttattctgggaaaggtagttcgtcttaccatcacattatgttaagacattctactgcaacagtggggagcaattcaagttctggccaagttacaggattcatgccagatgctaaaggaatggatccagtccctgtattccaatctgaagttgaaaatttggcttatcctgataaacatgaagaaagtattgcctttggtatggtaaatttatcaaatgagagtagtagacatgagagtcatgagagttctttcagtgatcagcttggtgatatggatcaagattttactgttgaatgcgagtctagcgcgaatgaggaggtcagtcaccaggtttttgatgttgaaaacagttcgactcatggtagtcttcatgtaggcaatgaatttttagaaggggtcgctcttgaaactatggaggtttgtggtagatgtggttctcactattgcgccactgaagcaactagaagcgagataaatatttgtccagagtgcagggaggaacacagttttgtagaaacagattcccctggaacaaattccccaaagctatctcaaaaaattttcgatgaaaacaagttatattttgaaaatattcctgtgatagatgtgctagattcgctgcctgttgttatggttgaggaagaaattttggagacaccagaaaagattgagcagtgtgataattcctacgagcaagaacaatatcatctgcacgagagttctatttccagggctttggaagagcaaaatgtggatatgctcaattacaaggatggaactcagtcttccactggctgtggtcctttgagtataggcacaaaagatactcaaactcagctatctgataagcatcatgatgtgaatattggttctttaggacgtggagacgttcctttggttataaagagatcagtcagtatgaagtcacctgttattcaagctaataactccagttgtttcaccagatcatatgagggcttttcttattcaagggataggagtattagtctgagaagctccacagaaactgcttcggcatcttcatcttgggattacggttcctctataagaaagggaagccatatacgacaacgaagcgggagtacacttgacttggagactcataggtatgataccaactccaagtccctgagtaccatgtcatcttcatctggcatgtctagccacactttccaggctctaaatgtcatgccagaggacagttttgaaatgtgtgctgcccaaatgacgtgtacactcgatgaaactcaccaagaatctcacactgaaccccaaaatctggagtgtaaagaaaccaatgtgatgaacgctgatttcgttgaaagcgttggattagttcgtatttccgccaatgtacttggtgatctggcagagcataatccggtggtaatggacgatgaatgttgtgaaaatggaaatgatgtagccaatactgtgataagcaaaggggagacaagagaatcaccggcacatataaggagcacatgggatttaggagcatcacctatcactgatgactgccctttcaatgatcactctaggctacaagaaaatgatgtaaacgaaacacctcacggtttatccaccacgacagcctcagaaatagaacctgagagtagtgaacccgaaatacctggtttaggggttcatgatgagattccagagtcagagcgcaacctaaatgcagtggatgactgctcagaaaagagtatggtacatgcttctgtggatcaccacagctcttcggctcctgtaaatgaaattttaggtatttactcgctttctcatctgatactggcatctcactgtgctttttactgttgttttaaaaaaatatattttcttacaaccttgcgaagtttagacataatttcttgctctctgcagatgagtccactgtacttgtggagtgtcccggtggaaaagagccgaggagcctcacacttgaagaagccactgatacaatacttttctgcagctccattgttcatgatttagtttaccaagctgcaacaatagcaatggataaagcaaaggatgagcctgcggaagaagaaatgttgcatccaacagtacag

SEQ ID NO: 149500 - DNA, 662 bp, Arabidopsis thaliana landsberg; identical to SEQ ID NO: 17664

SEQ ID NO: 149501 - DNA, 1088 bp, Arabidopsis thaliana landsberg
gaatataacctacaaattttaatatttaaagacacgttctaaagaataagatcgccggtttaaaacaattacctggtcatcattttggattaaactcattaggcattcattatataattgcaccaaacaagaaggggatcaagaaaatcacgaatcaccggagcaaaaaaatggcgggaggaggaacgaccttagagtacacaccaacttgggtggttgctctcgtctgctccgtcattgtctctatctcttttgccgtcgagcgtctcattcaccgtgccggaaaggttatatattacatattggctccttgtgtttattttatatgtggggcataaggcatttagacgttgtagactaaatgactattatggatctatgcatgaggaatatagcactttaagaacaacgatcagaagcagctttttggggcattacaaaagatcaaagaaggtgacttcatgtttttgttgataaaaaaaaagatccatcatgtgatgatatcatttgttctaataggattcttaaaatttggaaacagaactcatgctagtagggttcatatcgttgctattatcggtcggccagtctaaaatcgcaaagatttgcatatcaaaggagttaagtgaaaagtttctcccttgtacgaaacctgcaggggctgagaagtcccttaaagactcctcccatttccagttcagcttcaccggccgtcatctcctcgccggagatgcccccgccggtgactactgctccctaaaggtattcttatctttgcaaatctttttttgacttacacgttttatttgaagacgtgcgtagaattaacataaatttgtctataatatgatatcttttttgaatctttttgtttgttttaaattcagggaaaagtaccaataatgtcattatcagctctgcacgagcttcatatattcatcttcgtattagctgttgcccacattattttctgcctcttaaccattgtttttggtaccatgaaggtattttcttaattacaccttacttaacaataaatcttttttttaatctttattagttacgagatatcacgagcaaatatagct

SEQ ID NO: 149502 - DNA, 3014 bp, Arabidopsis thaliana landsberg
tttgcttctttcttagcaataaatgtcattgatttctgggtttctcctcttttctcttctgttattctgcttttcgttgatatcgagcttggaactcggctgttatcagtttttgtgagagttaattttgagattgaacgtattcataatgtttgtttgactgtatgttctaattgttgactttaatttggtcaatattcttaagatttgaatgtgaatcagaggtgaagagagattctaacagaggctcaatttcactgcacatattttttgagcaactggttagaatgcatttcgagaatggggatggtctatttcagcttagacaatagacattgttgtatattcttgttatagccattttggtattattggtgtgtgaaaggatgatactttgtggagaagctgagagaaaactggaaagcccaatttttattctgttaaatgggttttactctgacaattatacaagatatggggtgactttgaataagtaatgtacaaagtttctcaattctttgtgtagaacttcgtggacaagagagctagatggctaataaaatgtaatttttctttgtaattcatggcttggttacacgaccaagtgttgaaaccttaattactgcgtttggtggctccgttgtcataattctggtgagaggcttcaggtagtgttataggttactaagatagttttggggaacagttttttttagttcttgatattatctttatgtgttttctctaagcgtatgattctgttttcttgcagacgatgattcgtgcaaagcacattagtaatctttctagctcagcaagatctttttttcttagtggatcgagaccgagtgctgctgatggaaattcttgtacatgtgctgaggatgaaagtggcgtcttgaaacgccagcaaattaggactgaagttgtacagactggtaaaagagcatctaatttagcagctggactagctggaagtatattaccagtagaggctggtaaaccgctggtggtcccaaagacggttgagcatttcacccggccatcgcttcttccgcaacatgtttcctctcctgctttgccagggaaagcagattctgtaaatcatgcttctgctattattaaagaagacgtgggggtacctattggggatcagattttcaaggctggtattggaaatgtaaattttctgtcagatttagcaaactataaaattccttcgtatgatggaggaagcgatgcatttggtttgcctaaaagctgtatggttgatcctactcggcctatttcaggtgtaaagtcttcaaatgtgaaagctataagaagagagcaccttgccaaagtctatcctaggtccgctgcaaaagagtcgtcagttggtacaactagaaatcccagtagcaatttccgaggggccaaggaagctgaaagaactgggtttgttaaaggattcagacaagtttcaaattctgtggtaggaaagtcattacccacaaccaataacacctatggcaagaggacaagcgtgttgcaaagaccccatattgattcgaacagatttgtgccaagcggtttcagtaattcttcagtggaaatgatgaaagggcctccagggactgctctgacatcaagacagtattgtaattccggacacattgtggaaaatgtttccagcgttttacgaagattcaggtgggggcctgctgctgaagaggcccttcaaaatctaggtttgaggatagacgcataccaagcaaatcaagttcttaaacagattaatgactatggaaatgctcttggtttcttctactggttaaaaaggcaacctgggtttaagcatgatgggcatacttataccactatggttggtaatctcggtcgtgctaagcaatttggtgcaataaacaagctcctcgatgagatggttagagatggatgtcagccaaacacagttacatataaccgacttatccacagctatggccgtgccaattacctgaacaaagctatgaatgtgttcaatcaaatgcaagaggctggatgcaaacctgaccgtgtaacttactgtacccttatagacattcatgctaaagctggatttcttgacattgccatggatatgtaccagagaatgcaggcaggaggtctttctccggatactttcacttacagtgtcataataaattgtcttggaaaagctggacatttacccgctgcacacaagctcttttgtgagatggttgatcaaggttgtacccctaacttggtcacatacaacatcatgatggacttgcatgccaaagcgagaaactatcagagtgcgttgaagctttaccgtgacatgcaaaacgctgggtttgagcctgacaaagtgacatacagcattgtgatggaggtgcttggacactgtggatatctcgaggaagcagaggctgttttcaccgagatgcaacagaaaaactggattcctgatgagccagtttatggtcttttggtggatttgtggggaaaagcaggtaatgtggaaaaggcgtggcaatggtatcaagcaatgcttcatgctggtctgcgacctaatgttcctacatgcaactcccttcttagtaccttccttagggttaacaagatagctgaagcttatgagttattacaaaacatgctggcgcttggtctacgcccctctttgcagacatacacgttactcttgagttgttgcacggatgggcggtcaaaacttgatatgggtttctgtggccagttgatggcaagcacaggtcatccagcacatatgtttctcctcaagatgccagctgcgggtccggatggcgaaaacgtgcgcaaccatgcgaacaatttcctggatcttatgcatagcgaggacagggagagcaagcgaggactcgtgcatgcggtggttgactttctacataagtccgggcaaaaagaagaggccggatctgtctgggccgttgctgcccaaaagaatgtgtttcctgatgcataaagggaatata

SEQ ID NO: 149503 - DNA, 618 bp, Arabidopsis thaliana landsberg
  unsure (1)..(618): unsure at all n locations
atgtctaatgaaaattctgtaatgtcattgatagatcgcatctctggtcatctctgtcttcaagatgtatcaattgcgttgttaggtttattccttttcggttgcttgcaagcgaagttaaccaacaaagccggaccagtacaatggcctgtgtttgggataactcccgagttcttccttcatgttcacgatatgtttggatgggtcacccgatgtttgacgaaaagacgaggaacgtttccttaccaaggaatctggtttagtggatcttacggagccatgactagtgtttctgcttacatcgaatacatgctcaaaaccgatttcaagaattttcctaaaggagagttttacaaagagagattccgtgacttactcgaagatggtattttcaatgcggatgatgaatcttggaaagaacagagacggatcatcataacagaaatgcattccactcgcttcgtggnnnnnnnnnnnnnnnnnnnnnnngatttgatagagaggaagcttttaaaagtgatggagagtttctccaagtcacaagaagcttttgatcttcaagagattcttttacggttaacatttgataatatctgcttcgcgggtcttggagatgat

SEQ ID NO: 149504 - DNA, 1314 bp, Arabidopsis thaliana landsberg
cccaacactatggcaactctatttctcacaatcctcctagccactgtcctcttcctcatcctccgtatcttctctcaccgtcgcaaccgcagccacaacaaccgtcttccaccggggccaaacccatggcccatcatcggaaacctccctcacatgggcactaagcctcatcgaaccctttccgccatggttactacttacggccctatcctccacctccgactagggttcgtagacgtcgtggtcgccgcttctaaatccgtggccgagcagttcttgaaaatacacgacgccaatttcgctagccgaccaccaaactcaggagccaaacacatggcatataactatcaagatcttgtctttgcaccttacggacaccgatggagactgttgagaaagattagttctgttcatctattttcagctaaagctctcgaagatttcaaacatgttcgacaggtaaaacaattataaacggtattctcattttctaacgctatagctcactggcctgtaatcatgtcatttcaatgttttgactttttctttatatatacataattataatttataattgggatttcaaaccctatctctcactatttcaagactagaccggattggaatttgaacttttgtaatgaatattagtatctgcacataaattttatgttaaagttgggttttcttaaagtgaatttatatattaaaaatatataaacgattgggttttactcaaatgaatttacataagagctaggtataagtgcaaatatgcaatactgtcattgtcgtggatgtataaaagtatgatctaactttgatgatgccatggaaaaattggaaagttcagatccagaggaaacattgcttgaattataaaatgtatggaccacattgtttccttaaatggaaggtctcacgagtttctcaatttcagactactgataatatatgctattatagattttattttctgattattttttttggtttaatttaattagagtaaatttttaaaaagaaatatatggttttgttaaccgtgttttaaaatttgatagagcttttagatcataatcataattttttcgtattaattgtgattatgttggacgaaaatacttaattagtattcaagaaaactcttattctaaaaacagaaataaatgaattttacaggaagaggttggaacgctaacgcgggagctagtgcgtgttggcacgaaacccgtgaatttaggccagttggtgaacatgtgtgtagtcaactctctaggacgagagatgatcggacggcaactgtgcggcgcc

SEQ ID NO: 149505 - DNA, 1964 bp, Arabidopsis thaliana landsberg
tatgttgtggtggattatctttggtatagaaagaaagttgaaggagcttatgtggattctcttgggtttgatgtgattgatgaatggggaagattgcatcctgatccaggtagatggccatcttctagaggcggtaaaggtttcactgaagttgctgagaaagttcatagaatgggtttgaagtttgggattcatgttatgggaggaataagtgcacaagcttataacgcaaatagtctcgttatggatagtgttaaggtattgagttgattgattctttctgtgtttatgaagtttgtttcgaagttatcaacaagtgaatcttttaatggttgaagggaggtgcttatgaagaatcgggtagacattggcgagcgaaagatattgggatcaaggagaaggcatgtgtttggatgtcacatgggttcatgagtgtgaatatcaagctaggtgcaggaaaagctttcttgaggtctctttatcgacaatatgcggaatggggcgttgatttcagtaagagaatcgacttcatttccgtaaccttctttatctttattcggtatatgattatctcaatcttgtctcactttcttggtctttagtaaaacatgactgcgtatttggcactgacttcaatatagaggagataacttttgtgtcagaggtacatatttgtgataactaccaatcttctggttaaagtcagaggtacatagagatgaaacattgttcttatttttcgcaggttctaaaggagcttgatcggcctgttttgtactccatatctccagggacgagtgtgacacctgcaatggctaaagaagttagccagttagttaacatgtatagaataacgggtgatgattgggacacatggaaagatgtcacggcacattttgatatctcgaggtcaggtttcaagctgaaaaatactcttgccaagtttttacctttctttgatgtcatataattttcgttcttccagagatttatctgcttctagtatgatcggtgcacgagggttacaaggaaaatcatggcctgatctagatatgttacctcttggatggcttactgatcaaggtttgacttaaaattttgaaatttcaattctatatatggttacaaatgaaggtttgtctttttataatgtttggtaaaggttcaaatgttggccctcatcgagcgtgtaatctaaatcttgaagaacaaaagtctcaggtataccacaagctttggacctcatctagcttcaaggatcctagtttattagtaccttctcaaccacaagttcaaatttcttatgctttttatattgcttactcagatgacattgtggtccatcgcaaagtcccctctcatgtttggaggtgatgtgagaaatctcgatgccactacttataatctgatcacaaatcctacactgctggaaataaactcttatagctctaacaacaaggaggtgtgtggaatcataacactttaatcttcaagttcaaacttatatccttattttgaaactccaaacttctgtcatcaaactctgtctgtttcgttatttacagtttccttacatcaccgcgacaagagtttctaggaataagcacaaaggctatcctcatcatccaacgggcaagaacatttcaactaagcaagcttttggtctcactagctgcaaagaaccaaaagccaacacgtggtccattgtagacaagaaccgtggacaaatttgttggaaccaacactctagtgaaaaattagagaagcccttttgcttatacaacagaaaagctcttctagcttcgtatgattttttattcaactgtttctttcacccactttacatttcacacaatgcccttagccaattaatctgcttcgttttggtgcagccgataagaagttaaaacacacaccagcttttaccaaggtaagccttcattttgcatacaaaatgataaaag

SEQ ID NO: 149506 - DNA, 1605 bp, Arabidopsis thaliana landsberg
aaggtgatgggtgggcagccccttctaacacttatatcagtggattggttcaaagttgatagtgctgtagacaacatcgccctgcatccaaaatgtcttgtccaggtactcccttgacctgtatttaactaaccatcagggccttctttcctattaaaagcaagtattaagtgcgacttgtcaccgtaactcgatttaccatgaggcattgtatttaccctcttcgccttgtggctaagtctggtgatactttgtaagttattgatgagttacagtgtgttggaaaagtaagaagaaaacatacaaacattatgtatttagtctcctatgattgaaagagcctgatttggaagttttctcaattgtagtcggaacctgggaaaaagctcccattcatcctagtcatcaatctacaggtatgaatgcaatctgcaacataaactctatacatatatcactcttcttacaaaagtttgtttgaataagtgagtccaattagaaagtacctcaacccatacatatcaatactaatatatgagtttttttgaagatagtgtcgctaaacctcttgttcgtctttgtttattcgtaactaacaatctgtcactcgtatatcactagtagtttataatattttggatttatgatagtacatactaccatcaccaatcatttttccctctacttaaagtctatctaactgtaatatttattagtaatcatgggttaagttagtctctggaagaagtcaaaatgtttttattcttctttttcaggtaccagcaaagcctaactattgtctggtactctactatgctgcggatcgacctgtaaacaagacttcatccctgggaaaattcgtggatgggagtgacagttaccgcgacgcaagatttaagctaattccaagtattgttcaggtaaagaaactctgctcttctcgtttccactgaaatatagtaaacttagtcacattgtaaccgtcatggtgaatcacagggatattggatggtcaagcgggctgttggaacaaaagcctgcttgctcggtaaagctgtgacctgtaagtacctgaggcaggataactctctggaggtataaatagtttctacttccctcgattctttcattgcaataaactaagtttacatgatagatatgagaattgtttttcacttatgatttacatgaagtatcaatatttctcgtaaaccataaaataaacagtacatgtccaacatacacacacatggttgctgagttcttatgaaatcgtggtgttgcagattgatgtagatattggatcatcggctgttgcgaggagcgttattggtctggtccttggttatgtcacaagcctcattgttgatctcgccatcttgattgaggtttgtttggggtctcactgctagacttatcatatctttagttaaaacatctttgtgaatgcgatcatcagttaaatgttcaactaccaaatgcaaatgcagggaaaggaggaaagcgatttgcccgagtatatccttgggacagttcgacttaaccgaatagagctggactcagccgtatcatttgaggtttgagatgtgatcaagaataaagatt

SEQ ID NO: 149507 - DNA, 3126 bp, Arabidopsis thaliana landsberg
tttttacttggtcaattccataaatttgtatcactcaggtgttattgaacacaagttgaagaaggaaaaaaaaacaagttgaaagaaaagagaaaaataagcaaaaagtagcaaaaccgaaactaaaaaaaagaaagaaaatagtaagaacaaaatgaaaacgctaaaatcagaaataaaagaatcaaagaagcaaagataagcaaaacaagttttccaaaattgttgactctcttttacaactacacaaaaacctttcttcaaaatattctcagattctcttcttcttccttcgagctttcacagttgattcaattcccgatttcaaactcaatcaccttcagattccgatctccattctctacatcaatcacaatggagaatccgaatccaccagcagagaagctattgaagaagatacgagagctagaagaaagccaagaagatctaaagcgagagatgtcaaaactcaaagtatcagcagagattaaaaggcgttcgcattcttcatcacctaaacgaccttcaaggagaaacagtggagaaggaactccgttatggagaaaaaccggcgccgcatcgttccgtcacgcttctccgttacggaaagagagtcattctaaagacggagtagctggtggtggtgatggaccatcggcaggcaagttcaccgataaacagtatttgaatattttgcagtctatggctcaagctgttcatgtcttcgatcttaatggccaaattatcttttggtgagtaggtagaacttttttggttcccattgtttcttcataattagtagtcaaatgctaggattgtgatttggattcatataggagctcttggaatcgattgattagagagtgttggtatcgtttgtagtataggatttagtatctgatatgttagctaagttatgttcacagttcaaattttcttggaatggttgttttaggaactcgatggcggagaagctttatggattctcagctgcagaagcgttagggaaggactcgattaatatactcgtagatggtcaagatgctgctgttgcaaaaaatatctttcagcgttgcagcagtggagagagttggactggagagtttcctgttaagaataaaatgggagagaggttttcggttgtgactacgatttctcctttttatgatgatgatggtttgcttattgggattatatgtatcacgaatgattcggcactttttcaagacccgagagttcctcccgctaaaaacaggtggcaagaaggggattcaagcttttgccgggggactaatggtgttgcatctaagcttggttttgattccaaagaagctgttgtatcaaaacttggccttgattctcagcagcctatgcaagttgctatagcttcaaacatatcatatttggttagtctaattaggaagcatattctgatcttttcgtaaactgtcgtatgactagtgtagtctaaatttcaggcatctaaggtgggcagcaaggtcaggtcgaaaatgcgagcaggtgataataacgctgcaaaccttgagggtggaagtggggacagtcatcagtctgatcagggtttcttcgatgctgctttctctgaccagagggaagatgcagaaacaaatgatgctagcacacctagggggaatttgatccagtctccttttggtgtgttcttatgtaacgatgataagtcttcttcaaaagcctccggagaatccaatgatgaaaatgatagaaactctgttgtccctaagaaacttacctcaaagactgaagagtggatggtaaagaaaggactgtcatggccatggaaaggaaatgagcgggaaggtttggaaagaagaaatgctcattctgtgtggccttgggtgcataatgaacaacaaaaagaagaggctcatcatagtaattcctataacagtgttaagtctgaaagcctggcaagtgaaagtaataaacctgccaataatgagaatatgggttctgttaatgtgaatagcgcaagcagtgctagcagctgtggaagtaccagcagcagtgttatgaacaaggttgacatggatagcgactgcttagactatgaaatcttatgggaggatttgacaattggagaacaaatcgggcaaggtgatgtactcctttgagaaagatatctcttttgtgaaagacatatctatccttcaagacatcataccatttttgtttttttttatctattctgctaacatgcttgttgtaatttccctctttatgcatacaggttcatgtggaactgtctatcatggtctatggtttggatctgtacgttcttgccacctgttgacattacagaatatgcatcatggattgtacaagcctccatgaaaatcacgaacttaaaaaatctattactgagagttgctaatgtgactgcaggatgtggctgtaaaggtgttttccaaacaagaatattcagaagagatcataacatctttcaaacaagaggtattattgttttctgtcgcttctctaagcatgtttggtaaaagaaaattgaacttttatttgctatttatagagagtcacacctgccttcacatatctcttagcttctttcgttagaaaatttagtccctaaactaccacaatttccccatatataatcctcttcggaactgcatctacccgaaaagtctatcctttatgaaaccagcttagctactcattctcattttgatgtacatcggctgaacttggttttttctgaaggtatcgttgatgaaaagacttagacatcctaacgttttactgtttatgggagccgtgacatcacctcagcgtctctgtatagtgacagagttccttccacggtttggtcttattactttggctaatattacacttccttttgtgctattcgaactccggggccaaaactctgacttaccctatcaaataacatttgcagtggaagtctcttccgtttgctgcagaggaacacgtcaaaactggattggaggcgacgtatccatatggcctcggatattgtgagtattagtcacacactagttttccagttgtgtgactgcagagtctgcagacccactgttttctaagtaaagttgttctattttggtt

SEQ ID NO: 149508 - DNA, 2123 bp, Arabidopsis thaliana landsberg
aaactcagtccttgatcttgtaagttcaacttaattttggttgtggttgtcttcagggggaaggggcgtttacgtctacgtaaacataaataaataacactatcgaaagataaaacaataatatataaataacgtaatattttcttccatttggtgtttgtgtttaaaattaacaaaagaaaattacttcatagttctaaaaaggtgtaatttggaagaaaagattaccatatttaaaatctataatagataaaagcaatttcacacgccaaaacactttcaaaggtttagtttgtccattggttgactaaatgtacccaaaatccagagttcaagtaagaaaacaaggctaggatatttttcagtgtgtatagcagagataaataagcagaggccttaagaccataacattctattcgaatggcacacaaaattaataagctagtaaacattgctaattcctctatgaaagattacatatgctatattaatttgtgagtattacacactatattattagtcattgtggtccactgagaatgtattcacagatacctgtggacatggtcgcaaacgcaatggtcacggctgcggcaatacacgcagggaagttaggttcccagaccgtgtaccatgtcggatcatcttgtaagaacccgatcacattcgaacagattcatgatctcgcggctcgctacttcaccaaaaaccctcttgttggacgtgatggttcacctatactagtctccaaaggaactatcttgtccacaatggctcagttcagtttctacatgaccattcgttacaagctacctttgcaggtacgaatctttttgttctttcttacatattaataataaaacgaaatattgaaggagaaaactaaatcctatgagaaatattgaaaagaaaacgagtttttattaattgaattcttacgcatatattttcttatattatcagatgttgcgattgatatatgtaatatatccttggtgggatggtaataaatataaagacattgaccgcaaaattaagctggcgatgcggttggtcgacctctacagaccttatgtcttgtttaagggcatgtatgtatcaatctcaaagtttccataaatgacttttgatatctacaattttaatcttcatgttccagttattttgacgcgagagtctttttgttttgcagatttgacgatacgaatactgagaaactgcggttgaaaagaaaggagattaataaagaaatgtatggtttgtttgaatttgatccaaagtctattgattgggacgattacatgatgaccattcatattcccggcctcatcacctatgtactcaaaaagtaaaacgttaaaggcattaaaatgtgtattgtgtaattacatttcttggttacataaaatttgcttggaccgagtaaaattgtgtattgctagtgagttgaaatttgataacaactacaaggtgtgtcttgcattattaaactagttatatatctctcatgtaatgtgttaagttcttagtttacaactagaatttaatttcttgtttcaatcctatcatctgtcgtaatctttaaatgtaacaaatgatttttaaaagggagcttaaatttgtgttagtactttttgtgatgtccatatatttcttagacgatattgatgaatatatacaatgaaagaaggtggagagtgtcatttacctataacatattttttgaaattcgaaatgttggaaaacaatccaacattccacatccaaaaagtaagaaatagtagtttaatatacaagttaaatctaactccaattagtatgaggtttgtaaaacaaaagtctataaacaagtttgtacggatccacttccaaaaaagacactatcatactaatggagaagaagaagcgggtcaaccgcaaacccgcggtgaaaaatggacaaactagttttcccgcgatccaaacagaccaggaccacgaggtccacatttttttggcttcttaacatgggtctaaacccgtcccgctatatccctaaacggaccagcccgtggaccttaggtccgattgacatcccgacggagaagttggcgtcttggagaagccccgacacggaagcttga

SEQ ID NO: 149509 - DNA, 932 bp, Arabidopsis thaliana landsberg
taaacccaaaattcacttttgcccaatttaggaacaacaatcacagatcaagacggcacaagtaaaaaatggctgaagaacctactactaccactctcgttacaccggaaaagctaccttctccgagcctcacgcctcctgaagtatctgaatctactcaagatgccctaccgacagagacagaaactctggagaaagtgactgagactaatccaccggaaactgcagataccaccaccaagccagaagaagaaaccgcggcagagcatcatccaccgacagtgacggaaacagaaactgcatcgacggagaaacaagaggttaaagacgaagcatcgcagaaagaagtagctgaagagaaaaagagtatgattccacagaatcttggttcattcaaagaagaaagcagcaaactttctgatctatctaattccgagaagaattcactcgatgaactaaaacatcttgttcgagaagctctagacaatcaccaattcaccaacacaccagaagaagtcaagatttgggggattccattacttgaagacgatagaagcgacgtcgttttgttaaaattcctaagagctagggagttcaaggtgaaagattcgtttgctatgctcaagaacacaatcaagtggagaaaggagttcaagatcgatgaattggtcgaggaagatcttgtggatgatcttgacaaggttgtgtttatgcatggacatgaccgagaaggtcaccctgtttgttacaatgtctatggtgagtttcagaacaaggagctttataataagacgttttctgatgaggaaaagaggaaacatttcttgaggactaggattcagttcttggagaggagtataaggaaaatagattttagctctggtggggtttctactatttttcaggttaatgagatgaagccttcaaagggt

SEQ ID NO: 149510 - DNA, 639 bp, Arabidopsis thaliana landsberg
acggccaaaaatacgatgctcactttgattactttcatgacaaagtcaacattgtccgtggtggacatcgcatggcaacaattcttatgtatctatccaatgtgacgaaaggtggagaaactgtattccctgatgcagaggttagtgctatcaatgagtttttgcttagcatttccccacaagatcactcttgggtcattttctcttataaagatctgattttacagataccttctcgccgagtactatctgaaaataaagaagacctttctgattgtgccaagagaggaattgctggtgagaaacaaaaccgataacaataatgtatggattattattattgaaactcaatatcttctgtggctgtatgggtatcagtgaaaccaaggaaaggggatgctttgttgttcttcaacctccacccagacgcaatcccggacccattgagccttcacggtggatgtcctgtgatagaaggagagaaatggtcggcaaccaagtggatccacgtagactcatttgataggatcgtgacaccaagcggaaactgcacggatatgaacgagagctgtgagagatgggcagttcttggggaatgcacaaagaatccagagtacatggtttgaactacagagcttt

SEQ ID NO: 149511 - DNA, 588 bp, Arabidopsis thaliana landsberg
actttacacttttctgttataagttttgactttaaacatcccattatatcgtgaacaatgcaaatttcagggaggacatataatctttttccaaagcctaagccttctaggctactgtctatttccgctagacgttggagcagtgatctgcatgttgaaagacaatgtgatactgaagatggtcgttgtgtctgtgactcttgcctggagctcttgggctgcttatcctttcatgagcgccgcagtgaacccgagaagaaaagctctcgcactctacccggtcttcctcatgtatgtctctgttggcttcttaatcattgccattaattgattctatccggaaaaatgggaaatcagagataggttctttgattcagtttgggaagtcatttggtacagagtagatagagaattctccagccgcgaactattctgagttctaatgagatcatatgtataatatgttctttgacgcttttttgttaaactcccctgtggattttactcttctatatggttttgctttgtgtatgaaacttacggttcttttttggaaacgtatatataatatcaagaccttgatgctcg

SEQ ID NO: 149512 - DNA, 800 bp, Arabidopsis thaliana landsberg
accttcgtaacgccttctggaatgtgcatcaatccaatacataataagatttgtatactcaatcgatctgataacaaaactacagaggaagggtgagttctgttatccgcttgacttgtttgcaaccttggggggaatgtttattgtcaatctcttaacacaagggttgcttttggatgtcttagttggcttgggagctcttgtgcaatggactcattgtatgacattgacctcatatctgagaagataccggtgatattagatgactctaagacatggcatattgttctatccacaagtatgaagttgggagaaagagggattgcacatgttagtggagtcactcggcataggcttcaagagagtcactactcaaatctcttgatcattaaccgaaccgcaagtcctcttgcatggtaatcacttcttttattcttttcgttgggtttcttaggcacaattgaatctttgagatcagatcatgatcaagctgatgaaattctgtgtaacttaacttaattataatccgttttaactcatttgtgattgttggcaatattgatgtaggttcgttgagtgcaaagatagaagcaatcacagcgctgtcatgcttccttattcatttctccctaatatggcagctgcaaaattgagaaacgccgcaaaaaggtatcatggaaaatgcttccttcaaccaatatacatatccctgcagatattgatattgatggctttttgtgaaaaatctcttgcaaaattagcttagtgaccaattgatgtttactctgcatcttgagtga

SEQ ID NO: 149513 - DNA, 1139 bp, Arabidopsis thaliana landsberg
  unsure (1)..(1139): unsure at all n locations
gagggtttcatactctgctgcttcttcttcttcatcagtagagcgagattctctcgcgctctctatcgctacatataaccatgggtttatcaacgaatctccatagcctcgacctccgttcaactttcttcaccggtctacgtacatctccaatcccttccaatttcatcaaaatctcttccatttccaaccctagacgcgatatctccaccatcagagcccaagtctccaccatcagcctcgagacctccgttaaacagcgtcaagacgaaatccaatctcttttctcgaagcaaccctctcagcaaaactccaatcggaaacgaaacgggaagagttccaaaaacggagcttctgggatatcttcttgtgtgaagctagagaacataaggaaaagctacaaaggcgtgactgtgcttaaagatgtgacatgggaagtgaagagaggtgagaaagtagggttagttggtgtgaacggagctgggaagacgactcagctcaggattatcactggtcaagaagagcctgattctggtaacgtaatcaaggccaaacccaatatgaaagtagnnnnnnnnnnnnnnnnnnnnnnnntttcgatgagtaagactgtgagggaagagttcatgactgctttcaaggaagagatggagattactgagaagcttgagaaagttcagaaggctattgagggatctgttgatgatttggatcttatgggaaggttattagatgaatttgatttgttgcagagacgagctcaggctgtgaatttagattccgttgatgctaagattagtaagttgatgccggaattagggtttgctcctgaggatgctgataggcttgtggcttcgtttagtggtggatggcaaatgagaatgtcacttggaaagattttgcttcaggtatatgaatgattgtttacttaaagttttatcctttcaatgagtttgaactcaaagctaatgtgaatgaattgtgtgtttctttgcgagtaggatccagatttgctgctacttgatgagccgacanatcatttggatcttgatactattgagtggcttgagggtatttgaaaagcaagatgtgccttggttattatttacatgacagacctttcttgatcagtatgtact

SEQ ID NO: 149514 - DNA, 630 bp, Arabidopsis thaliana landsberg
gaaactgctgtacggattactcatatccctactggtgttgctgttcgttgcacaggtttgtatttcctccccactaatgttacaacctgaatgtcccgtaagatcgtgttatcaatgcatcagaactgactatggtagttgattaagatcgcgttggatgttgcagaggagagaagtcaactggcgaacaagacgagagctctgatcagactaaaagcgaaactgatggtgattgcggaggagcaacgtgctactgaaatcaaggaaataagaggagatgcagtgaaagctgaatggggacagcagatcaggaactacgtgtttcatccgtacaaactcgttaaggatgtccgaacaggtcatgaaacttctgatatcacatctgtaatggatggtgacttggaccctttcatcaaagcttaccttaagcataagtacaccttagccatggcttctgctgtaaccaattagaatgctgaggataggcttgttcctttatatttctctacttagatagaaatcatctcctactagactgttcaattttatagcataatcttgaattccaacagtcaatgtgggattgtgagtcaagtctgtttgtatctaaataaaaccgcattttgtttt

SEQ ID NO: 149515 - DNA, 1847 bp, Arabidopsis thaliana landsberg; identical to SEQ ID NO: 42526
  unsure (1)..(1847): unsure at all n locations

SEQ ID NO: 149516 - DNA, 947 bp, Arabidopsis thaliana landsberg; identical to SEQ ID NO: 32322

SEQ ID NO: 149517 - DNA, 1138 bp, Arabidopsis thaliana landsberg
caggcttacgtcccatcatcattccccgttctctttttattttctctaatcgccgacgattatctctttcgtccggcgatagctattttgtctcttcaaatccccatagacgaatactcaactcttcatctccatgtctcctcaatctcatttctctccttagtgattgagctttttccttctttctctttggttattattccttctcctcctccgtcgtgtttttgattgatttcagaatctaaatctccgtttgatttctccatactcgtgctgattttcacctatgtaatgtgatttatgagctctgtttatttcaaatcgacggcgatcgttgaatttattgatcaatgtgtaagtaagagcttgaagaaatagtttttgttgttgttgtgaaagctcagagttttgtttgctttttttgttgacttttttgagattgatgctggatctcaatctcgacgtcgactcgaccgagtctactcagaacgaacgagattcgattactgttaaaggggtttctttgaatcagatggatgaatcggtgacgtcgaactcttctgttgttaatgctgaagcttctagctgtatagatggtgaagatgagttgtgctctacacgaacggtcaagtttcaatttgagatactgaaaggaggaggagaagaagaagaagaagatgatgatgaaagaagtgctgtgatgatgactaaggagttttttcctgttgctaaaggcatgaactttatggattcgagcgctcaaagttcaaggagcaccgttgatatttccttccagagggggaaacaaggtggagactttataggtagcgggagcggtggtggcgatgcttcacgggtgatgcagccaccatcacagccggtgaagaaaagcaggagaggtcctaggtctaagagttctcagtatagaggtgtcactttctatcggaggacaggcagatgggaatcgcatatctggtatatctactactgattgatttatcttttagataggtcttagatgagttgttgatctttggtcgaaaatggaagagcttggtttagattttgtattaatctacaagtttcttttttgtcaattttcatggttgcagggattgcggtaaacaagtttatttaa

SEQ ID NO: 149518 - DNA, 1807 bp, Arabidopsis thaliana landsberg
aaaaactcgaggactactactactcaagactaagtaagataggaaatgggtggatacaaagaagttgtccttttagaaaatccatcactagaagttggaaagtctgacccaaagactttcgtgtgcttatccaaacacgacgagaggagtcccaagaagtctagcggtatcaatcaaatctcttcttgcttgaggagattccgtggaaccatcaagaggttagtccattttcttagcaaatttctttgtttttggtgaaagatatctctatttttctctctaaatctttcgagtagtaacagttaagctttgtccatatcctggatagacctaggtgtgtcaagactcaagagacaaagcttgaatatatttctctaactgattagatatcactattaatgataatgcatgatcatcaatatttcgtagcttgattcatattttcatatatactacttacttaagcaggaagcattatggctggggaacttatttcgtttggtatacaaaacctgtggaacctactgagtcaagaatgcgagctatttcagggagtcgaagatcaagtaactgaactaaaaagggatctaaacttgttaagctcttttctgaaagatgcagatgcaaagaaacataccagtgcggtgagtgaaaaactgtgttgaagagatcaaggaaattatctatgaggagaggatacaatcgaaacatttgttcttgagcaaaagctgggaaacgcaagtggtatcaaaaagagtatcagaagacttgcttgcattattccagatcggaggagatatgcattaggtatcgcaggcttaagtaataggatctccaaggtgatacgagatatgaagagttttggggtacaacaaatcatcaatgatggtgggtatatgcaacctcaaggtgataggcaaagggagatgcgacaaagattttctaaggacgacgatagcgattttgtggggttggaggtaaatgttaagaaactggttggatatttggtggacgaagcaaacgttcaagtggtttccataaccggtatgggtggtctaggtaaaaccacacttgctaaacaggtttttaaccatgaggatgttaaacatcagtttgatggactcgcatgggtgtgtgtttcacaagattttacccgaatgaatgtgtggcaagctatctttaggaatctcagaccaaacgaagaagaaaagaaaatcttggaaatgacagaagctacactcctggataaactctcccggttgttggaaacatccagatcattaattgtgattgatgacatatggaaacaagaagattgggacctaatcaagccaatatttccacccaaaaaaggtggacaccttttgttacatagagtaggcaatgctcataaatgagttttgtttctgaaacgaaaaattattttgcaggttggactgtgctacttacttctagagatgagagtattgcagtacgtggtgatacggcatatatcaactttaaagcagattacctaactattgacgatagttggacactttttcaaaggatagcatttcctaggaaagacacagcaggtaaactgtttttttttgttcttgttttgactacaattagataatttgtaccagtatcaacacaatattaattcttcaccttaaataaaccagcgattatatatatgtttagttctatcacgtccaattgaatcgtaacgtgttttctaacctaaatgaaaaataaatgaacctagtgacgcgttttgcagaatttaaggttgatgtggaaatggaggagatgggtaaga

SEQ ID NO: 149519 - DNA, 424 bp, Arabidopsis thaliana landsberg
ccacaaagagtctttttttttttttctcttcgacttagcttatacatagttttattacaagaggtcattgtcagcctcggagaaggaggagaatagcaagaaaatggcagcggacaaggctgagatggggaggaagaagagggcaatgtgggaaagaaagtggaagagattggacattgtgaaagcttttgcatctctctttgtccatttcctctgtctcttggcgcctttcaatttcacttggccggctttaagagtcgccctcattgtctatacggtgggtgggctcggtatcaccgtctcttaccaccgaaatttggctcaccggagcttcaaaatccctaaatggcacgagtatttcttcgcttattgcggccttcttgccattcaggttcgaactagctctttcatttttttaccccac

SEQ ID NO: 149520 - DNA, 166 bp, Arabidopsis thaliana landsberg
aaacaaacaatgggagacgaagcaaagatcttcactctttctgaagtttcagagcataatcaagctcatgactgttggattgtcatcaatggaaagggttcattcttctttctccttattctcacctctgaaattagagatctcgtgcttcaaagatccccttttg

SEQ ID NO: 149521 - DNA, 683 bp, Arabidopsis thaliana landsberg
gactcctcaaaaaactcttctcctctcgttgcttcttccaccaaatgcgtcgagggttttcaaaaaacagaccagtttcaaagacccaaatggcaatgtttctcctttcaagaaatctatgacgcaaccactggttttagctcaggttctgctctcttctataaacttcaaatcgtataatgcctctttttgactaaaagggtttggtattgcagagaatttggtaggtagaggtgcatttgcagaggtgtataaagggatattgggtaaaaacggtgaagagatagcagtgaagaggataacaagagtaggaatagatgatgagaggagagagaaagagtttttaatggagattggaacaataggacatgtctcacatcctaatgtcttgtctcttcttggttgttgtattgacaatggtctctatcttgttttcatcttctcttctagaggctcccttgcttctctccttcatggtaaacataaccttccttccttctttcaagatttatcaaaactttgcttttaatttctaaccatttttatgagtaaaattgttggttttttacttcttgagttatgtgtttggtattttaaagatttgataataatgtttttgtgtagatttgaatcaagcaccattggagtgggagacaaggtataagattgcaattgggacagca

SEQ ID NO: 149522 - DNA, 1786 bp, Arabidopsis thaliana landsberg
  unsure (1)..(1786): unsure at all n locations
gtttgtcgaactattgaaagagaactagggaattccatggatgttttgttcaccgattttgttgacgagcctttggcaactgcttcggtaacactctgaaatctgtttgagcctgggaagccaaatgtttcggtaaaattcatatgctttgttttatagtgagctcctctctgttttgtagatagctcaggttcatcgtgcaactctagctaacgggcaggatgtggttgttaaagttcagcatgatggcattagagcgattattttggaggtctggtcttttttcgttttgaagcatttgatatgaacagtaagagctattagctattgtatgactgttcacacttctttcaacttgtcttctcttttcatttcttaacaggacttaaaaaatgcaaagtccattgttgactggattgcgtgggcggaaccacagtacaattttaaccccatgatagatgaatggtgcaaggaagctccaagagaactagacttcaatattgaagctggtatgcttcacttgcattaaaaatgaatagccttaaatttcattctgtgataaactataatagcaccaaagcttgtgattgccttccatgatcaagttcaagggatgagctagtggttctgagatagactttgctggcttggtactcatctctgtcaatctttcttgcgttgacaattttcgagtttagattatgcatgctcttaagtcctaccattctaatcacatgctcattttaattctcaaaaatggctatgatcgagataacacggtaaaaataggcagaattctgtgtctttagttccttcactagactgagcatttttcaggttcatgctacagtcactgtgaactgtatttcctgagttttcccctttttgttttgtttcataatatgtagaaaatactagaacagtatccgggaatctcgggtgcaagaagacaaatgatgaagttagaagtgccaatcgggttgatgtcttgattccagatattattcaggttcttatctttaatactctcgtcctaatctgaagcatacatatatacagtttttaagtctaggatggaaacatcaaacatcaatgcccttagtgaaaataactagagacattcaaatgctaaagaaatttctatatagacggatcagtcatggttactgatggtattgttgtgtcattgtatctctgatgttgcacgttttctatatttggtattgcttagaaaatgcgttagaagtaggggacgagtgtacctactgtgtaacacagattgtctcagatattcagcgtagacttaaactcagcattagaaatttaatgactttagaagctgaaagatgtttattccttttttgttttcctgctacttacctcttacacctcctttgttactctaaatgacagtcgtctgagagtgtactcattctggagtacatggatggagtacgtttgaatgatgtggaatctctagatgcttttggtgtggataaacaaaagatcgttgaagagatcactcgtgcatatgcccatcagatatttgttgatgggttttttaatggcgaccctcatccaggtatggtctgaaacatgatcgttttttttggagttcgccaatttttatctgtcttgtaactaccatgcttgcttaggcatagaatttattctaatacaagtataccgtctactctgtctgcaggaaattctcttgttagtagggaccacancatcgtccaattttacttgatttcgggctacaaagaaatctacactcttgaac

SEQ ID NO: 149523 - DNA, 1274 bp, Arabidopsis thaliana landsberg
ctactcagaaaactgtggacggcccatcaatgaaggactggagaggaggccgaggcgcaagtcaaaacatcattcctagctcaacaggcgctgcaaaggtacccaaatttgtacagttatatataaacatagcatctggaatcatatttaagccatgacttttttacttgtctcaataggctgttggtaaggtccttccggaactcaatggaaaactaacaggaatggccttccgtgtcccaacaccaaatgtttctgttgtggatttaacttgtcgacttgagaaggatgcatcgtatgaagacgtcaaggcagccataaagtattactctcaaaacctgttcaactaatttgcgtaccattctctatacatgaataaaacatggaacttgtaataacatctcatgattttgatttgaaatctctaacaggtttgcatcagaaggaccacttaggggcattcttggatatacagaagaagatgtcgtctctaatgattttcttggagattcaaggtatgtcactcttaaatcttgtagcggatcatttaaaatcttggtactcaaaaggttgtggccattgccaaaaaaattcaggtcaagtatctttgatgctaagctgggattggattaagcaagtccttcatgaaacttgtctcctggtatgacaacgaatggggttacaggtaacagttagtctctctcatttctttaccatcacattttctatttgacaatacccaaagactaaaatatgcgtgggtcttgtaatgttacagcaaccgagtccttgacctgatagaacacatggcgttagttgcagccagccgctaaaaccatatcccgccaacgttcgttaggtagtttttgttgcattgggggttcgattactgaaccttccggttttggctccaagttttatgtaaaaccatacgatatctaataatatggggaagattttttttgttgtacgaagaaatattgttagcagctagtcgaaaccttttctatatataaaaattggtttccaaagattggaattttctggttatatggttttttgttagcttcaatatctcatctctaagttatgaatattcgaaattgtgacagtgaaccatcgatgagtacacgaagatgtaacgttgagaatgagattatgactttgtacagcgtagtatatgatgaaatattgacgtgacatccacttataggcaaaatgatgtgatagcaaataatatctgcaaagtaaaaacataaacgatctataggact

SEQ ID NO: 149524 - DNA, 858 bp, Arabidopsis thaliana landsberg
tgcagcatgtcaatctctgcaatgtcgttcatggtgtcagttggattcaacgcagctgccaggttggtaataaataaatgaaaacgttttaagaacatttttttttatgctagaggtaataatataatagcataagctaaacactaattttatttttactacagtgtgagagttagtaacgaattaggtgctggaaatccaagatcagcagcattttcaactgcggtaactacaggagtgtcatttttactgtcattgtttgaagccatcgtgatcctctcgtggcgacatgtcatcagttacatttttacggatagtccagcggttgcggaagccgtcgccgagctctctcctttcttagccattaccatagttctcaatggagttcaacctgttttatctggtagaaattaataacaaaaactaatacaaaaaaatgcaataattgattagttgtgaataaatgattaatgacaaaatttattaaatcaggtgtggccgttggatgtggatggcaagcatatgtagcttacgttaacattggatgttattacattgtggggattccgattggttatgttcttggtttcacctatgatatgggagctagggtaaatttcatcttacatgatttatattctaatcaacgattaataattggttggtgtataaagatgagacttataaaatgaatggtttgatttggtgcagggaatatggacagggatgattggtggcacactcatgcaaactattatcttggtcattgtcacattccgaaccgattgggataaagaggtatattactaattatcatttatatttttttttaaaaaaaacgacaattatatgttttat

SEQ ID NO: 149525 - DNA, 1451 bp, Arabidopsis thaliana landsberg
gttgtaacgctagccgagtacctagataagagggagcttcttcaaaatccacatgaacaggccaggctactccgcgaagttccagaagttattggagaggaacttgtacaaaaccctgaagtttcgtcccctgaggctcataaaagtgacaacgagcaacgattgagtgaatctccattatcgtgcatccatgaaaccccagaagctcgcaacctctttggtggagaagatcaacaatttaataacggctatgtgatgtcaaaccccatcacaactccgggaatcacatcttgtgctacggaaattaacaagggattgccaacatggattgcttctgcaggtgcgcataacatgtatagggtttcttgtttcactttgttgcatcttaccaccattgttctttgttattacttaacatgttaacaaattttagctacttcctgttcttgcctgtgacaaatttgcatcttatctgccttttggatgttgagaagccagtggatattactgcgttcttcatatgaaattcttgatttacccaaaaaatagaaaattcacgccaaagaattggttcttgaaacttcatgtaaagtttgtagcagtatttgaggctatgacagcatctggtggcatacaggctgttgtgactctttctttctttatttttgctgaggcagaatctgaaagagaaaagcgagcaaattatgctagcggaaatggaaaagagatgtaatatttggtttgtagctatactggctttaagagagaaattgacgtatggatcttttaaagattcgagattgatatgcgtcaactagttggtctggtttgctctattgtatagtatccaaactttttataaaggataagttggttctggaattggtaccaatccgcattcttgtcaattacaggtgctgagtatcttcatgtagatgtagagcagccagcaaatggcatcattggaggagagacgccgactgaagagtctaaagtttctcagcttcagtcaagtataccagtaaataatgtcgacaacggatctcaagttcaaccaaatccatcagaagtaatcgaactgagcgatgatgatgaagatgacaacggtgatggagagaccctggaccctaaagttgaagacgtccgggttctgtcttatgataaagagaagttaaactggttatacaaagatcctcagggtcttgtacagggaccattctctctcacacaactcaaagcttggagcgacgcagagtatttcaccaaacagttcagggtttggatgacaggagaaagcatggaatccgcagttttactaaccgatgttcttcgtttagaggaactaatgcaatactctgaagactattagattcagtcaaaaggtggttcaggaatctggtataggctgtcattatccttaaattgcagaagggtttggctcctccttttcg

SEQ ID NO: 149526 - DNA, 1687 bp, Arabidopsis thaliana landsberg
caataacaccaattcgcaatgatttgagccaaatctaaagggtgcgaattcttaatttcaagttcaatcatcaacatcgaaggaggtttttttttggaagaagcacttgaatgtgaatttttgtaagctttttttatttcattattcatcgttttttttttcctactgttgaccttttttttgtgcaatcgcagcctcttgtaatgtgcaatttctcttgatttttaattttgtgattgcgtttgtttcagaatcagaatcgaaagtttcgatttttatggtttgtagtggtgatttttttctgtttctgagtttcgtgagtgaataaagaagaagaaaaaatggttttgttgtaataaatttggtaaattttgggatttatctccatttcaggttcttgatataactaactttgtgtgtgttttagtatcatatcttcaacatttcaggttcttaatctgtttttcttgtttttttgttctgttattcagatggagttgatgaaattgttcttctagatgtttgttttggggatatgaacaaagaagaatctgagtttaatacactatgtggaaacagattctgagtaagcttcctaagaagtcttcttctaagaaccattcttcttcatctagttccacttcaaaaagtagtgataatggcgccggtaaatcgggtaattctcaaaccaagaacgctcctcctgtaaaaccttctgctgattcagggtttaaagaagggaatttgaaaggaaatggtaacggtttcactccatatgaagcattgccaggtttcaaagatgttcctaatgcagagaaacagaacttgtttgtgagaaaactcagcttgtcctgtgttgttttcgatttctcggatccaacgaagaacgttaaggaaaaggatattaagcggcagacattgcttgagcttgtggattatgtagcttctcctaatggaaagtttagtgaaactgtgattcaagaagtggttagaatggtttctgttaacatattcagaaccttgaatcctcaaccgcgcgagaataaagttattgatgcgttagacttggaggaagaagagccttctatggatcctacttggcctcacttgcagcttgtctatgaaattctcctgcggcttattgcttcaccagagacagacaccaagctggctaagaaatacattgaccaatcttttgtctcaaggttacttgatttatttgattcagaggatcctagagaaagagattgtcttaagaccgttctacatcgcatctacggtaaatttatggttcatcgtcctttcataaggaaatccattaataacattttctatcggtttgttttcgagactgagaaacacaatgggattgctgagtttctagagattttgggaagtatcatcaatggatttgctctgccgcttaaagacgagcataaagtgtttttggttagagctttggtacctcttcacaaaccgaaaagcttgcaaatgtatcatcagcaattgtcttattgtatcacacagtttgtggaaaaagattgcaaactcgctgatacggttataaggggactactcaagtcttggcctgtcacaaatagttccaaagaagtcatgtttctaaacgagctagaggaagtattagaagcaactcaaccacctgaattccaacggtgtatggtcccag

SEQ ID NO: 149527 - DNA, 696 bp, Arabidopsis thaliana landsberg
tccgaagaaaagcgacgccgttttaaaggagatggataaacaaccggcgaccagttggagtatccatacccggccggagataatcgccaagtacgagatcttcgagcgagtcggatccggagcttacgccgacgtttacagagctcgccgtctctccgacggtctaatcgtcgcgctcaaggagattttcgattaccaatctgcgttccgggagattgacgcgctcaccatcctcaatggatctcctaatgtagttgttatgcacgaatacttctggcgtgaggaagagaacgctgtgcttgtgcttgagtttcttaggtcggatctcgctgcggtgatccgagatggtaagaggaagaagaaggtagaaggaggggatggattctcggttggggagattaagagatggatgattcagattttaaccggtgttgatgcttgtcatcggaatttgattgtacatagagatttgaagcctgggaatatgttgatttctgatgatggagttcttaagcttgctgattttggtcaggtgagattatgattgttactgattgtgttagttatttcattgtttgatgcacaaatatgagaaacctctgaatgaaaaatgcttggtttgcttgaaatttggaagagttagtgttatcaagtggctagaccttatcatttagtgtaatctatgagtttttaaat

SEQ ID NO: 149528 - DNA, 570 bp, Arabidopsis thaliana landsberg; identical to SEQ ID NO: 61166

SEQ ID NO: 149529 - DNA, 615 bp, Arabidopsis thaliana landsberg
gggtaaagatgatattaactctgctcattctctaggtctggaggctgcttatattaatcagaattttgctcagcaggttttggttaagaatgggaagagggaaacttttgatgagccaattcctaatgttaatgaaggtgaagagaatgcttctattgcttataggtataggagatggaagcttgatgatagtatgtatctagttgctaggtgtgagttacagagcactgttgatttgaataaccagagatcgtttttaactttgaatgctcttaacgagtttgatcctaagtactctggtgttgattggagacagaagcttgagactcagagaggtgcggttttagctaatgagttgaagaacaatggtaataagttagctaaatggactgcgcaggctctcttggctaatgcggatatgatgaagattgggtttgtttcgagggttcatcctcgtgatcattttaaccatgttatattatcggttttggggtataagccgaaagatttcgctgggcagatcaatctgccccctaacaatatgtggggaattgtgaagtcgaaaattgatctgtgtatgaagttaagtgaaggaaagtatgttctagtgaggga

SEQ ID NO: 149530 - DNA, 569 bp, Arabidopsis thaliana landsberg
aagtcacagtgaccaaaatcacacacttcacaagaaacaacctatggatccaaatgaatctccaccaaaccaatttcgccacgtggtggccatgccttatccaggtcgaggacacatcaaccctatgatgaacctctgcaaacgccttgtccgtcgataccctaaccttcacgtcaccttcgtcgtcacagaagaatggctcgggtttattggacccgacccgaaacccgaccggatccatttctccactctccctaatctcatcccttccgagcttgtcagggccaaagacttcataggcttcattgatgccgtctacacaagattggaagaaccattcgagaagcttcttgacagcctcaattcaccacctccgagtgtaatattcgccgacacttacgtcatttgggctgtgcgagtcggcagaaaaaggaatattccggtggtttctctctggaccatgtcagccacgattctctccttcttcctccactctgatctactcctcagtcatgaccatgctctgttggaacaataaggtaaagcatcagtgaattagctttgattcc

SEQ ID NO: 149531 - DNA, 500 bp, Arabidopsis thaliana landsberg
aaaaggcggaacaacaaaagaaaccctagcttcacctttgtacctctctctgttccaaaccatggtaagttttgtctaaagcttataattaattttcatggatttagtgattaagaagatatataatctgtaaatccatttctggtattgtgtggtggtctgaagtgagaaaatgtttaataagcaatccttattcttcgaatttcgatctgagatcatatgagttttctgagacattggattttttttgtgtggctctagcgttgagttatcaaattgagaagtttttattagatattgcaaatgtataatgctagtttttgtttggttttgtagtcgaagagaaagaccaaagagccaaaggttgagaatgtgactcttggaccagctgttcgtgaaggagagcaagtctttggagttgttcacgtctttgcttcattcaacgacactttcattgtgagtggcttctttatttttcaagcacagttagatttttatgt

SEQ ID NO: 149532 - DNA, 829 bp, Arabidopsis thaliana landsberg
gcaggtattgatgaaccacaagttgggtatgaggttcaaggattcattgatgggaagtttgatagcggctatctggtgacgatgaaattgggttctcaagagctgaaaggtgtcctttaccacattcctcaaacgccaagtcagtcccaacaaaccatggaaacaccttcagccattgtaccatcatcacaacgccggcataggaagaaatcaaagttggctgtagtcgatactcaaaaacccaaatgccacaggagtggctacaacttcttttttgctgagcagtacgcgaggcttaaacctgagtaccatggacaagaacgatccatcactaagaaaataggacacatgtggagcaatctcactgaatctgagaaacaggtaaccaatcatcatcgaattatatccacttttttttttttttttcattaaaccagtgtttgcttacaaatttgttcatcattacaggtttatcaagacaaaggagttaaggatgtggagagatacagaattgagatgttggaatataagtcttcacatgaatcaggagctactgcttctacagtggctcagtagcttttctcccttttgttgtcttacgtgtctgttgtaacatttttccttttctctatagaacttgttttctttttctttctaaatgtaatgttttctatcagttggaggatttgtcagctttattatggctttagagctagtgaggaggttactaactgtgaactagtgtctctcttgttgtttcttttagtaagtgccatttttgtagtgaattacaggcatatccatatatccagatctttcttcaaaaaca

SEQ ID NO: 149533 - DNA, 992 bp, Arabidopsis thaliana landsberg
aagctcacgcacggcgttttcacgtaccgtgccagcctcaccgccatgttatcttcttcaacctctgctggtttatcgtcttcgttcgtttcttcgagatttcttagttccggtatattctctagtggcgattccaggaatcgcgtgacttttcccgttcagtttcatcgcgcatcagctgttcgatgttttgcttcttcaggcggttctgatagaattcaggttcagaatcctatcgttaaaatggatggtgagattctttgcgcaatcagtgttccttacttacatttgatcgtagtttccagataattggttggattggtataagtcatttgtttatgttcttactgaatttggtatctttgagaatgtttctaatttgtttatattttgtggaaattcaggcgatgaaatgacgagggtgatatggagtatgataaaggagaaagtaaggatgtaatttatcaccaagtctgcaacagttggttcattttttttttgacagagctcacatgtctgatttcttgtctttgcagcttattcttccttatctggatttggacattaagtacttcgacttggggattctgaatcgcgatgctactgatgacaaggttacagttgaaagtgcagaagcagctcttaagtaagtgctattgattctttgcattttctatggtttagattcttttagtaacagaaaacattttaatttctatgtgaaataagctgatttcgcgcttaaaacttttatgtttgcaggtacaatgttgctatcaaatgtgccactataactcctggtatgtgatgtccttcgcaaatcgcaacacatatgctgcttgttccgatcagaggaagcatttttacatcttctgtatgttatttttggcagatgagggtagagtgaaggagtttggactgaaatcaatgtggaggagtcctaatgggacgatcagaaacattctagatggtttgtctctgtattgtcaaat

SEQ ID NO: 149534 - DNA, 2364 bp, Arabidopsis thaliana landsberg
  unsure (1)..(2364): unsure at all n locations
agtgaatagatctgtagtatcaaatgattcactaagcgctaatgctggagcggtttctggtacccctcgttgtgctgatactttagataatttgcaaccttcattaaagcggttgaaggtggagcaatcttttcaaccagnnnnnnnnnnnnnnnnnnnnnnnnnnnnnnccattgtttctacaacagaggcagacttatctcaggatgctgaaagaaaggatcataggccattgaagtcagagaccatggaagtgaaagtggaaattcctgataattctgttcaagcaggattcggcatcaaagaaacgaaaagtgaaccttttgaaaatgttcccaagcctaagcctgtcagtgaaccaggtaaacatggtttatctggtgactcgccaaagcaagaaaacatcaaaatgaagaaagagcctggatggccgaagaaagagcctggatgtccaaagaaagaagaactggtggagtctcctgaacttacctcaaaatctagaaaaccaaagataaagggtgtttctttaactgaattgtttactccggaacaagtgagagaacatatccgtggtcttcgtcagtgggttggccaggtttgctattttatttacaaaaagtttacagagaagcaagtctattcatatatctaagatgaatctctagctatgtgatcattgatgaataccttgtcatttaaattttaatgtgtgtgcagagtaaagccaaagcagaaaagaatcaggcaatggagaattcaatgagtgagaattcctgccagttatgtgcggtggagaagcttacatttgagccaccacctatttattgtactccctgtggtgctcgtatcaaaaggaatgcgatgtactatactgttggaggtggtgaaactcgtcattacttttgtattccctgttataatgaatcccgaggagacactattctcgctgaagggacttccatgccaaaggcaaaactcgagaaaaagaaaaacgatgaagagattgaagaatcggtaagactatcctatcagtagagttgtattgtcatttgcatctcgttttgttggtttttctgagtttgtctatttcgtttgatgttttttgtagtgggtccaatgtgataaatgtcaggcctggcagcatcaaatatgtgctctatttaatgggcggaggaatgatggggggcaagctgagtatacctgcccatattgctatgtaattgatgtggagcaaaatgagagaaagcctttacttcagagtgctgttcttggagcgaaagatctgccaagaacaattctcagtgaccatatagagcagcggttgtttaaaaggctgaagcaggaaaggactgagagagccagggttcaaggaacaagttatgatgaggtaatctggcggtggaatacagggttttaaagtctcatgtgattttgcattgagtcctatcttctattgtttgttgaagtgctacttcactggaaacaatagattgaagcttactggttggtcactgattgtttaatttttcttttactggcactaacagattccaactgttgaatcccttgtggttagagttgtttcatctgttgacaagaagctagaagttaaatctcgatttcttgaaatttttcgggaggataattttccgacagaatttccatacaagtccaaggtaagaatgatcgacgcacaccatcattgtatttgcttcatgtccacatttaatattttcaggattcctctcttgtagtaatatcgttcgtgctccacattttatttatcaggtggttctgctgttccagaagatagaaggtgtagaagtatgcttgtttgggatgtatgtccaagaatttggatccgaatgttcaaatcccaatcaacgccgtgtttatctctcgtatttggattctgtgaagtactttagacctgatatcaagtctgctaatggggaggctctgcgcactttcgtttaccacgaaattcttgtaagttctggtttttcaacctaggtttatgtggtcttctacattacatggatgattcaagggtattataccctgatgctttttcagattggttatctggaatactgcaaattgcgtggtttcacgagctgctacatatgggcttgtccaccactgaagggtgaggattatatcctatattgccatccagaaattcagaaaacaccaaagtctgataaactacgggaatggtcagtctaattgtctttggtgattttcttcatacagttttcgtaggaaaatcctttacatcctccaatttgctcctggtctacacaggtacttagcaatgttgagaaaagctgcaaaggaaggaattgttgcggaaactacaaa

SEQ ID NO: 149535 - DNA, 1081 bp, Arabidopsis thaliana landsberg; identical to SEQ ID NO: 3893

SEQ ID NO: 149536 - DNA, 1604 bp, Arabidopsis thaliana landsberg
ctccttgtacagtcttaagattctcttttaaatttgcagaatcctgatttaattaggaaagctcaagctgagattgatgctgtgcttggtcaaggtccacccacttatgaatcaatgaaaaagctcgagtacgttactcgaaagatatcttctttcatctcttcttttggtctctatttaattcgttgaccgctttgtttcatgcttctgtaggtacatacgactgatcgttgtagaagtccttcgtctctttcctcagccacctttgctcatcagacgcactctcaaaccagaaacattacccggtatgtctcaaaagcacttgctaagtactacgtatacaaatctgctttcattaacagatcatatctccactagaactagagaatgacttagtccagagctcatatatgtctattttcctatgtctttctactgcttgtatcaacaggaggacacaaaggggaaaaagaaggtcataaagttccaaaagggactgatatcttcatttcggtaagtggtagtttttgtatttgtttatgcttctcctcatcgggacccgcttttctttgactaccctattgtgtatctgcttgctttcaggtgtataatctccatagatctccatacttttgggataatccccacgattttgagcctgagaggtttttaagaacaaaggagagcaatggaattgaaggatgggctggctttgatccatctcgtagccccggggcactatatccgaatgaggtgaaatttccaaagcttgcaaatattttccttagcatgtgatcattttctcaaagaagaaatgaataatctttcctcttgtaacaaaagttgcctctgtttggtatttatgatgacaacagataatagcagactttgcattcttaccatttggtggaggaccaagaaaatgcattggagaccagtttgcactaatggaatcgaccgtcgcactagctatgttgtttcagaaattcgatgtggagctgcgtggaacgccagaatctgttgaactcgtgagcggcgcaacgattcatgccaaaaatgggatgtggtgcaaactaaagagaagatcaaagtgaaatttatggataggcaaaaagactcaattttaacttgaaggaagctgagtgtaaatgaaaaatgaattgcttatgattcactagacgtgcattcgtgagattttgaaaatgcaaaaagctaatacagagatgggatctggtggtgaaacatagatcagatctggtggaagatagaaccaaacagctttaaggttatgttggatcattactagaaagtaacatagtaacacactttttagaaaaagaaacatagctaacacacatcatctctcttacaatgagatccttatttttaacgtaacaaaacccacaatctcacaaactttctgaaaacttaaacactcaatattagattaccacagcatctttttaattcttgatttaattagtctctaccctcgatgacgacagaggaacacctttgacaaacgccgagaaaagagcgagagagctgcttggtttaaagctaggcactgtatgtccagctcctctaaaagtagcaaacgttag

SEQ ID NO: 149537 - DNA, 1304 bp, Arabidopsis thaliana landsberg
  unsure (1)..(1304): unsure at all n locations
aatcaaaatctccagaaattcgatcgtcgttgaagattcgtctcaggttcgtctactttgctccgtttctcttctaaatctcctatagtttctggatctgtatgttattagtcatgatcgatctcaactctgtgaaccgaactagaatttgttgtcaaatctcgtgtttacgttagactaagcgaacaaatctgtaattcgtattgttcagaacttgatttcgccattattgattcagaaaactgatcctgagttctaaagtttgtgtagtttctagcttagtgttttggaatcaaaaatggcgggtcgagttaaagaagacgagaagaacgagaagattattaggagtcttcttaaacttcctgagaataagaggtgtataaactgtaacagccttgtaagtttttttttgctcttcatttgatcatttccgataaaaattttgagagaacttaacgttaacgtttcttcttcgatatcatttacttagggaccacaatatgtttgcactactttctggacttttgtttgtaccaactgcagtggaatacagtgagtgtactttatcttctcatattcttgtgtagatggtgttcattggaaatgttgtttgagatatgcatatgtatttttgaacagtcgtgagtttacacatcgtgttaaatcgatatcaatggcgaaatttacctcacaagaagttactgctttgaaagaaggtggaaatcaggtaaacacgctttatctctcttcttttgttgagttttttctcttggcatttgtgatttagtatcttttgtttttgtaacagcatgctaaggatatttattttaaaggattggatcaacagcggcaatcagtgcctgacggaaggtattacagttacaaatctgtcttcttgttgtggagatggatgtgttacattgattgattgtgtttttttaatctgtcagtaatgttgagcggttaagggacttcatcagacatgtgtatgtaaataaaaggtatacgaatgagaagaatgatgataagtctccaagtgagacacgtagttctagtggttctcggagtccaccttatgaagatggatatgaccgtcgttacggnnnnnnnnnnnnnnnnnnnnnnnnnnnnnnnnngttcgagacgggtagtaggaatgctgttaataacagaaaaagccctgctcgtcctgagatcctgaatgattggcgcagagaggataggtttgggggtagaaaaacatcagaagagggctcccagtcacctgagcaagtaaaagccctcggttcagctagccctcctgt

SEQ ID NO: 149538 - DNA, 402 bp, Arabidopsis thaliana landsberg
gcctcactttcacaacttctgtctaactcttgcatcgtcccttaacgcccttgtcgtctcacctgactaccggttagcacccgaaccaagcgtcccggctgcctttgaggatgctgaggcggtgcttacatggctctgggaccaagctgtttccgatggtgtgaaccactggtttgaagatggaacagacgttgactttgacagggtttttgttgttggtgattcatccggtgggaacatagctcatcaactcgctgtccggttcggatccggttcaatcgagttgacaccggttcgggtacgcggttacgttcttatgggaccgttttttggcggggaagagaggactaactccgagaatggcccctctgaagctttgctcagcttggatttgcttgacaa

SEQ ID NO: 149539 - DNA, 2445 bp, Arabidopsis thaliana landsberg
ttatcaaaaaggaaaagaaaaggatattttattaaaaaaacagtgataggacgaaactgttaaatgggctggagagatataaactgttagccactacctggcccataatatatcacatcgtctctttcgctgcacttggtggttctccaattccgtatcgaaaatcttcttcgggtcagacgatctgaagccgatcgctgtagaatcagtttcgtgctccgcagtttctcgagtttcctctcacttcaggtagtcttcgacaccctaatcatgttagattgatattaatgttgaattttagctgatattcaatggttattgatccagatcttcatagaagaattcacttacggagagggactttttcgtagacgattctcactggatatctatcacccggtaagatcgtcttgctcgaaaagaattgaaaagtttttaagtaattgaataaggaactgtgaatcggagaggcttacttttttgaaaagatctaaaccattttagttgatcgtcctcaaatatctcacagaaggtacggattttgaaagatcactagagatagctacggattttgagaggcggatctgtccaggtcggcactgtgaaagagaactacactggttttttccagatgatatgaagcttccgtgaacgaatctgattctaaggtactcatcgaagagaatctgggattgtattgatctggtcccttagcttccagtttggctataactctgacaactgttgtaagtgataagttgtgatcaataatgggtacggagaatcagggctatccaaattttccagctaggcctgcttcctctccatttgcatctgctccgccaccagggattcctcctcaatcaggtggaccacccactggatcagaggcggttggctttagaccttttacaccatctgcatcccaacctacaagacctttcactgcctctggtcctcctccggctccaccagtgggtacgatgaggcctggccagccgtctccttttgtttctcagattcctgggagtagacctccaccgccatcattaaattcgtttccttcaccagcatatggtcctcctggtggtgccccttttcagcgttttccatccccgccattaccgactacacaaaaccctcctcagggcccaccaccacctcaaactcttgcaggacacttatctcctcctatgtctcttcgcccacagcaaccgatggcacctgtagcaatggggcctccgccacaaagtacgacttctgggctacctggagcaaatgcttatccccctgctacagattatcatatgcctgccaggcctggttttcaacagtcaatgcctccagttactccgtcttatcctggcgtgggcggttcgcagccatcttttcctggttatcctagcaagcaggtcttacaggctccgacgccattccagacatctcaaggtcccccaggaccccctccagtctcatcatatcctcctcacacaggaggttttgctcagcgaccaaatatggcagcacagcagaatctgcatccaaactatgcacctcctcccagtaacgttcaaggcttgactgaagattttaactcgctatctctttcatctattcctggatcgctggaaccaggacttgatcataaatcattcccaaggccattggatggtgacgtggagccaaattcatttgctgaaatgtacccaatgaattgccattctagatatctacgactgacgactagtgctataccaaattcccagtctctggcttcaaggtggcatttacctctaggagctgtggtttgtccacttgctgagactcctgaaggggttagtttccgttattattaacaagaatgtctttgcgattctttcatgttctagtgccacatataactttgcctttctttgcaaattgtcattttatctgttcaggaggaggtaccacttattgattttggctcaactggcatcatccgctgcagaagatgccgtacctatgtgaatccttttgtgacttttacagattctggaagaaagtggcggtgtaatatatgttcgatgcttaatgatggtaatttgtcaaaaatttctttttccataaatcatttgatcgatgatgctagaacttcaatactttcaggcatatatttataagatgactattcatagttatgggtttaaatttcttgttcagtgcctggtgaatacttctcacatttggatgctactggccgaagaatggatatggatcaacgacctgagctgactaaaggcagtgttgaaatcatagctccaactgaatacatggttcggcctccgatgccacctatctacttcttcctcattgatgtttcgatttcggctataaaagtggaatgcttgaggaagcatgatcgatttgatatcccacttgtaattttgctggaaatgggcttta

SEQ ID NO: 149540 - DNA, 518 bp, Arabidopsis thaliana landsberg
tcacaaaacagaaagtttcatcctttacgagaattaagccgaaagaaacaatctttgagtttgatttcttcttccttccttctctctctctgctctaatggattccagagacatcccaccgtcacataaccagcttcaaccaccaccgggaatgttaatgtctcattaccgtaaccctaacgccgccgcttcaccattaatggttcccacttccacatctcaaccgattcaacaccctcgtcttccttttggcaatcaacaacaatctcaaacgtttcatcagcagcaacaacaacaaatggatcagaagactcttgaatctcttggatttggtgatggatcaccttcttctcaaccgatgcgattcgggatcgatgatcagaatcagcaactgcacgtgaagaagaagcgaggaaggccgagaaagtatactcctgatggtagcattgctttaggtttagctcctacgtctactcttctctctgcagcttctaattcttacagagagggtggtgttg

SEQ ID NO: 149541 - DNA, 1819 bp, Arabidopsis thaliana landsberg
cgacccggcccacattttaaacccaatttagccttttctgtttccgccgccgactgatcggaataatcgaacaaagagataacaactgaatcttcgccggattactacgtcgatgacgattgcggcagcgccagcacgccagacagatcgatcagccactggtttcaaccctgcttacgtcacgacggcgaaggcggtgagcgttccggttcaggttcctccggcgactgtggtttccgaaggattaggtaaagatgcgttgatctcatggttcagaggagaattcgcggcggcgaacgcgataatcgacgcgatgtgctcgcatctaaggatagctgaagaagcggtatctggatcggggtacgaagctgttttcgcggcaatccatcgccggcgactgaattggatccctgttcttcagatgcagaagtatcattcaatcgctgaagtagcgatcgagcttcagaaagtggcggctaagaaagcggaggatctgaaacagaagaaaacagaggaggaggcggaggaagatctgaaagaggtggtggcgacggaggaagaggaagtgaagaaagagtgttttaacggcgagaaagtaacggagaatgacgtaaccggagatgtagaagacgttgaagatgattcaccaactagtgatatcactgattcaggtaagtaaaaaaaaacttcacaattctcaaaagaagtatatttttttcttggatccagaattttctatatagttttaccagaaacaattattgttcttttgttcatttgaaaaagcatattctttgaaagtttggtcatttgattcttctctgttcactgtgtaaactggctctctgtggttggtgacgattttttttaaaaaacttcattacaattatgagaatgagttgaaaatagttgtttttttttgtatatatatatatttcttgttaaagaagaaaataacaatattttatattttagaatatatttctcagactaattcaagtttcaagatttaagtacgtgtttccctctactggatccgagatgtattctaaacaattttgacttttaattcttaattagtattactactatttttatttaaattgttttttttatatatatatcaatcgtgagattttgttgcatcattatgccagagattcgatttttagaaataattttaccaaattaacctgattctttctaaaaaaagaaatctttattttttatgttccatactaatcaaatgactcacacagcctggtttttttaataccatgtttggaaactttttagttatatatttttgtaataaaaaaataatatatagttaaagacgaatatttcgctgaaaactaagaaattaatttatgttagttacttttaacgtgtgtgaaaagataatatattataaatttatatgactaagtataatttattaatatatttggtaccggccttaaagttggttaataattttttatttcttcactaacctgtgatcttttacacgaaactatttttttaggacaaaataattgtaacgtaactactagtgaattactttagttatgcaaagtacgtacatattaaaacagggttcgaatcataaaatcagaccttattactatattaaaagaataaaaaattaacacaaactttcatgaaaattcgtacaaaagtacaaatctattgtagttgtgttgaaaaagcatataatctgaaaaagtttctctgacttctaacaatgtaaaaatggaccaaaaacgtcataacaaagtcgtttggaattaaaagattacagtagtagcattcctat

SEQ ID NO: 149542 - DNA, 853 bp, Arabidopsis thaliana landsberg
atggatcattcagcgaaaaccacacagaaccgtgttttgtcagtgaagatgtggccaccgagtaagagtacccgtctcatgcttgttgagcggatgaccaagaacattaccaccccttccatcttctccaggaagtacggtcttttgtctgttgaagaggctgagcaagacgccaagcgcattgaagatttggcctttgctactgccaacaaacacttccagaacgagcctgatggtgatggcacttctgctgttcacgtctatgctaaagaatccagcaagctcatgcttgatgtcatcaaacgtggtccacaggaagaatccgaggttgaggtgagcaaggatggtgatgtcttttttgatatatctggtgggagcagagcttttattgaagaagaggaggcacgcgaccttttgaggcctctggctgacccgcgtaactcctataccaaaatccgttttagcaacaggagttttgggtctgaagcagccaaatttgctgcgagcgttttgtcttccatcaaggatcagctgacggaagtggatctctcggattttgttgcaggaagaccagaggctgaagcgcttgaagtcatgaatatgttttcatctgctttagagggttctaagcttaggtatctgaatctctcggacaatgctttgggagaaaagggaattagggcatttgcttctctcatcaattctcagcatgacttggaggagctctatctgatgaatgatggcatttccgaggatgctgcacgtgcagttcgtgagcttaacccttctactgacaaaatcagggttcttcagtttcataacaacatgacaggagatgaaggagcaactgccg

SEQ ID NO: 149543 - DNA, 768 bp, Arabidopsis thaliana landsberg
  unsure (1)..(768): unsure at all n locations
tctatctggtgggagaaaccctagtcttgattacgggtttaagggcgcggaaatagccatggcttcttattgctccgagcttcagttcctggctaatcccgtgaccaaccatgtccaaagcgcagagcagcataaccaagacgttaattccctagggctaatctctagcaggaaaactgcagaagcagtggatatcctcaagctaatgtccacaacctacttagtcgcgctttgccaagccgttgatctaagacatcttgaagagaatctgaagaaggcggttaaatcagcagtgagtcaggtggcgaaacgggtcttaaccgttggtgccaacggggagctacatccgtcaaggttcacagaacgtgatgtcctccaagtggttgaccgagagtacgtgttctcatacgcagacgatccctgcagcctcacttacccgctaatgcagaaacttagacacattcttgtagaccacgctttagcggatccagaacgcgaggccaattccgcgacatcggttttccacaaaatcggannnnnnnnnnnnnnnnnnnnnnnnnnnnnccctaaagaagtagaacgcgtccgggttgaatacgaggaaggaacatcggctatagctaaccggattaaggaatgtcggtcttatccattgtatcggtttgtccgcgatgagctaaatactgaactgcaaactggaaagaatgttcggtcgccaggagaggagtttgataaagtgttcttagcgatttctatggaaagctattg

SEQ ID NO: 149544 - DNA, 1238 bp, Arabidopsis thaliana landsberg
atgagggaaaaatggagaatacaggtaaggggtattaaagtaaattggtaaataagtcacatggtcatcttctttataaatatgccacatctggtagaataatcactaatcaaatttactcatttagccgtcacctctgaatcttcttctccgatcttcaaacattccggccgccaccgagttctttgccgttgcaatgtcttcctctatgaacgtagcgacgatgcaaccactgactttctctcgccggcttctcccttctgttgcttctcgttatctctcttcttcttctgtgaccgttactggatactccggtagaagctcggcttacgcgccttctttccgttcgattaaatgcgtctctgtttctccggaagcttcaataggtgaagcaatgctcttcgttttttcttttaattttgggtttttgattgtttgatttcttaccgataaaatgcgggaaaatggttgaaccacatttagctcaagcttataatttctattctctgactaatttgattgctttgattgtgaatgtgaatcttcttaagcgtgaaaacagttctgatacatgtttttggacttgttctctgcagtaagtgatacaaagaagttggcagatgcttctaagagtacaaaccttataccaatttaccgctgcatattctctgatcagcttactcctgttcttgcttatcgttgtttggtcaaagaagatgaccgtgaagctcctagctttcttttcgagtccgttgagcctggttctcagatgtctagcgttgtaagtatagaatctttctttgtacatatcctttttatctgttaatatatgtctcagttcctaattgtttctttgatgtgattggtctcgatagggtcgttatagcgttgttggggctcagcctgcgatggagatcgtggcaaaggagaataaagttattgtaatggatcacaacaatgaaaccatgactgaggaattcgtcgaagatccaatggagatcccaagaaaaatctctgagaaatggaaccctgatcctcaactagttcaggaccttccagatgcgttttgtggtaagagattcttcttgattgtctataataatcactttctagaatagttaacttaaaagaaggaatgaagacactggttttaaggactggggatatgtgatcatggattggatgttttcgagacaagctcttgcttttgagtgatatttgaaaatgtcaagtttcat

SEQ ID NO: 149545 - DNA, 3796 bp, Arabidopsis thaliana landsberg; identical to SEQ ID NO: 36949

SEQ ID NO: 149546 - DNA, 700 bp, Arabidopsis thaliana landsberg; identical to SEQ ID NO: 72011
  unsure (1)..(700): unsure at all n locations

SEQ ID NO: 149547 - DNA, 1094 bp, Arabidopsis thaliana landsberg; identical to SEQ ID NO: 53857

SEQ ID NO: 149548 - DNA, 1258 bp, Arabidopsis thaliana landsberg
agaaactacaggatggcagactcacttgggacctattcctttaatggcttcttcaacttctgggattttctttcaaggagatgatgaatctcaaagcttcattaactctcacttgacttcctcttatgggaattcatctaactctgctcctggatgtggtggacctactggtggctatcacaatctcagtatggtttctggtgatatgcataatccggttatgatgagtgtttcaacacccggtccaagcgcaggagctagttcgcttgtcacagatgctaattcagggctctctggaggtggtcctcatttgcagcgtagtgctagtatcaataatgagtcatatatgcgtttaccggcgtctcctatgtcgttctcttctaataatatcagcatatctggttcatcagttgtagatgggtcgactgtggtacaacggcatgatcctagtgttcagctaggtggctctagtgctacatcactgcctacatcacaaactaatcaaatcccgctttctatggctcggcgtgcttctgaatcgttctttcaggatccaaacaacttaactcaagcacggaaaaaacctagattagattcaaagcaggatgatgctttgcagcagcagattttacgtcagtggcttcagagacaggatatattgcagcagcagcagcaacaacaacaacaaggccaaaatccacagttccaaatcttgcttcagcaacaaaagctgaggcaacagcaacaatatctccagtccctcccaccattgcaacgggttcaactgcagcagcagcaacaagtgcagcaacagcaacagttgcagcagcagcaccaacagcaacagcaacagttgcaacaacaaggaatgcaaatgcaactaaccggtgggccaagaccttatgaaaatagcgtttgcgctcgaagattgatgcagtacctatatcatcagcgacaaaggccttctgtgagtgtgcatgtagtcgtcaaattttttgttttatgtgtattctagaaaaaagctcttgacagataccagtcgtgtcattgctgattttgtaggagagcagtattgtttactggaggaaatttgtgacggagtatttttctccccgggcaaagaaaagatggtgtctttctcattatgataatgtggggcatagtgcacttggtgtttctcctcaggcagccacggtttgtttccctgactctttgttttttctggcttcatactctttatgctgatcttacggtgata

SEQ ID NO: 149549 - DNA, 577 bp, Arabidopsis thaliana landsberg
cctccgccataccggaatggattaccgaatcaaccaacggcggatctctccgtcgcgtagatcccgatacaggtaccgacggctgggcttctcctcccggcgatgttttctctctccgctccgattcttacttgtccaaaaaacaaaaaactcccgccggtgattacctcctttctccccgccggcatggactggctcaaatcaagtaccaaactcgagaacgtgctcgctcgtcccgataaccgtgtagctcacgcgcttagaaaagctcaatctcgcggtcaatctctcaagagcttcatcttcgccgtgaatctccagattccaggtaaggatcatcacagcgccgtgttctacttcgcgacggaagaaccgattccttccggttcgcttctccaccggttcatcaacggcgacgatgccttccggaaccagagattcaaaatcgtgaatcggattgtgaaaggtccttgggtagttaaagccgcggtggggaactatagcgcttgtcttctaggtaaagccttgacgtgcaattaccacagaggtcctaactactttgaaattgacgtcgaca

SEQ ID NO: 149550 - DNA, 936 bp, Arabidopsis thaliana landsberg
atggagtggtggttaaacggaggtgtttggatgatgatgatgacgacgaccatcatttcttttgttaaagctgaagatacccttttttacaactggagggtcacttacggcaagattgctctagacactttgcctcgaagggtacattttcttccaaaacggcttcttgcttctcgtgtgtttgattgatcatgcttatattaatatttaaaaacacatagggaatcctaataaacggacaatttcctggaccggagattcgctcactcaccaatgacaatttggtcatcaatgttcaaaacgatctcgacgaggccctttctcttatcttgggatgatttatttcccattcttgaccactttctgtttaatattagcgagctttatcagcccttttcaatagaagtttgagttatattagaagaagtattggagtttggtaaattgtatgaagaacccaatttgcatgcacatgcatgcgccatacgtttcttcaaaatcttgttaatttgttgggtattattagtgaacacgtaaagttttcatgttaattataatatcaacgatctaataaataaaaaaagtgataaatgaaggaatggagtgcatatgaggaaaaattcttaccaagatggagtgtatgggacgaattgtccaatcccaccaggcaagaattacacttatgactttcaagtcaaagatcaggtcggtagttacttctacttcccttccctcgccgtccaaaaagcggccggtggttatggcagcctccgtatatacagcctccctcgcatccccgtccctttccctgaacccgcagaagatttcaccttcctcgtaaacgattggtatcgacgtaaccatacggtacatttcttaattatttactagtcatgtttaattagtatttttcattgacgtatatatgatgaccat

SEQ ID NO: 149551 - DNA, 776 bp, Arabidopsis thaliana landsberg; identical to SEQ ID NO: 46517
  unsure (1)..(776): unsure at all n locations

SEQ ID NO: 149552 - DNA, 455 bp, Arabidopsis thaliana landsberg; identical to SEQ ID NO: 4531

SEQ ID NO: 149553 - DNA, 1067 bp, Arabidopsis thaliana landsberg
  unsure (1)..(1067): unsure at all n locations
tttttgttttttaatgcanctttataggtgtatctggaaaggattttaaggagaccagagattgatgccttttcagaagaactaaggccacatcaggtatggactgtgaattaagatttagatgtagtttttggataacatctgagttggtaagtaggttcataacaagttaatacactgttgatttcaacagaaagcatctttgcctgacaaatccactgttcttgaccgtgctatgattgagcataaccttcttagtgcaagcaaactctacacaaacataaggtatgagatgtcgaattagtatcttctttgtgtgtctagacttgtttgattttctcaactattttatatcctaggtttgatgaattgggaactctgttggcgattgatccaagaaaagcggagaagatagcagctaatatgattgggcaagaccgaatgaggggttccatagatcaggtaagcaataaaaaatactttgttggttgagctatgtaagagccctgaagagaattctcgttagtgttgattttctagaaggaggttcctagacgtgttttaatattttatgttactgttcaggaggaggctgtgattcattttgaggatgacgtggaggaactacaacaatgggatcaacaggttttctatctctccctcccactctttgtctctttagagcaactatatatgattgtttgttttattggcgtggaatatgaccgaaaagtggaatctgtgcagatatcgggattatgccaagctctcaatgacattctggatgggatggccaagaaaggcatgtctgttcctgtctgattgactcccaagccgtgagatcgactcatgatgattaatttgtattagccgagcaacggatcgagtctcatgccaaagtttttgccaaattgctgtgttttggggacagttattttcaccttatttactttcttgcaaattcatgtctatgtctttaggttaattgattcagagaggaaaagattaggcattgaatgaggatttttaagaaagttgaaaagaggttcagggtacatttttacctc

SEQ ID NO: 149554 - DNA, 1943 bp, Arabidopsis thaliana landsberg
  unsure (1)..(1943): unsure at all n locations
attagctntgttgagcttatcaaagtggcaaattataagacattgcatgatttggatatcagcttcatgttgtggctgaagacgaagggggttaataacttatgtctattgccacatcatctttctctttttctacaatgacagttaccttccagagagaaaaatattagatggaatttcctttgtcgtaccggcaggaaaaagtgtggcaatcgttggtactagcgggagcggtaattcctaaacctcttctgtttaagcatctaagttctgtgtaaatttgttattctggtatactgttgcaaatcttattatttgttctatggcaggcaagtcaacaattcttaggatgctattcagattcttcgacacagattccggaaatgtaagcattttttttgtttgtgaaatgtggggtcttgtttggaagcattgtagcaacgaaagtacaccctgctgcagagaaatttagtgaagaaaatgcttggtatctagataacatcttttttgtcatgttggttaacagataaggattgacgggcaagatataaaggaagtgagactagatagcctccgaagctccataggagttgtgccgcaagatactgtaagttggcatttctctacttctcatcgtgaggctttttgttatatacaccactatgacctgcattcatttgtttctcgcctttcttctcattgtaacttctctggtcatgctagacacttgattttttttatgtttttttccacttttcttctcttttatttttcatatgtatcattgttagcttttgtgaaggtatagcactccaagttttgttgttctcaagggtaatctctactgcactgcaggttctcttcaatgacacaatatttcacaacatacattatggacgtctctcagctacagaagaagaggtaccagtcaacttatacttggtggaaatgtcaagtttaatatcaataatcctcatctaacataaattttcaatccaggtgtatgaggctgctcggcgtgctgcaattcatgaaacaatcagtaatttccctgataaatattccacgatcgttggggaaagggggctcaaggtcagtattttgatgttatatctggaatgcatgattgagttatggggagttagtcacccgtcgtttttgtcattgtcataatcaaagtaaaacaagctaagtcaatcaggcttccaagtcaaagttcacctgttgaaaacttgatgaagaatatgatctaatacaactagtttcgcaggactgtaacaatcatgaaaaataaaagatttaactgattgaggttttctatataatggcaaagagtagcattgatgagtgaccatcctgagtttgagtagagtcatatattgatggggtttttgtattgtgataaccatggagtggtgttgtgtgcagttgagtggtggagagaaacaaagagtggcccttgctcggacatttttgaaatcccctgcgattctgtaagtaactttgcacagaagcagcattgagtttacttatgtgattatgtacgtgtctagtcctcacatacatagagatggttggtgtacacaggttgtgtgatgaggcaacgagtgcgctggacagcacaacagaggcagagatactgaacgcactcaaggcactagcgagtaacaggacatctatcttcattgcccacaggctgaccactgcgatgcaatgtgacgaggtttgtagtaaatagtgtttgtcaacttagctcaaagaaacaatgtttttgcataactgaaacttttggttgcgggcagatcgtagtactggaaaacgggaaggtggtggaacaaggcccccacgacgagctattgggaaaatcagggagatatgcgcagctatggacacaacaaaacagcagcgtggatatgcttgatgcagctatcaaattggaatag

SEQ ID NO: 149555 - DNA, 1449 bp, Arabidopsis thaliana landsberg
tattaacttcctctgcctattctcatactgggctttatttcactgagtagatttgcaggtgatatcgctgagattggtatcattagagcaggagaacataagaaagttcaagtagttctaaggccacgagtgcacctggtacaactctctgcatgtaccattttaagccttttgcgcatcatgccttgtaagctaattaccaatactttgttgcttttaaataggtaccgtaccatattgatggaggtcagccatcatacattatagttgctggtttggtgtttactccgctctcagaacccctgatagagtatgttcttctcggcttgctaagatgcaaaagtaaaccgaaaccttcttcactatttcccaaatgcctaactgtttcctcctttttttaaatgtataaccagggaggagtgtgaggataccataggcgtaagctcactctactaaactgtctcttagtttaatttgtgaatccactataacagtttagtttttccttccgatttgcagttgaaattgttaacaaaggcacgctactctgtggcaaggttcagaggagaacaaatcgtcatcctatcacaggtaatccctcggaggataatgagttcttaattcaatgtgcattttggtgagtgcaacaataatttaataactaactcactcgacgagcatatctataggtattggcaaatgaagtaaacatcggctatgaggacatgaataaccagcaggtcctgaagttcaatggaattccaataagaaacatccatcacttggcacatctcattgatatgtgcaaagataagtatctagtttttgagttcgaagacaactatgttgctgtgttggagagagaagcttcaaattctgcttccttgtgcatcctcaaagattatggaattccctcggaaagatccgctgatctgctcgagccatatgttgatccaatagatgacacccaagcgcttgaccaaggtattggagacagccctgtgtcaaatctggaaatcggctttgatggactggtgtgggcataaaatattcgaaaaggcgtccgcagatggaaaccactgaaagctcatacagcttccccgaacatatgggaaagctttcagcttcatcctcattcataaggtcttgtgctgctcaaactcaaagtttagtgaattctttcttctttattcaaacctctatggattgagtttaatagaaagttggccatgagaatgctcggccattgtgttcagatgaatgtatactgctaaaagcattgccagaatctcgacaaaagtcaacaaattattcagtgtctgattttctatgagaaaatgaaatgcagcaatgtcttctgtgactgtaatatatatatatatatatatatatatatatatatatatatatatatatatcagtgaatcggtgcttcctttttaccaattc

SEQ ID NO: 149556 - DNA, 3901 bp, Arabidopsis thaliana landsberg
  unsure (1)..(3901): unsure at all n locations
tgactcgagagccgttcttgccacaagagacgaagacaatgctttgctcgctgtacaattaactatagacttaaaaccggatttgccaggtactttattacaaaccatgatattaaactctgagagaagccagaggcaaaagtttctcaactttcgctttctatgtgtactgtcaggtgaatcagcgagaatccagaaatgtaaaggaagagtctttgcattgcaagacgagcctgaggtagctcgtgtatggttaccaaacagtgattcacctggtttagcaatggctcgagcttttggagacttttgtctcaaagattacggattaatctctgttccagatatcaactatcgccgcctaacggaacgagaccaattcattattcttgctagcgacggggtaaattaaatcttcagttactagccactaaattgcaaacattttccaaatctttagagctgaaaaatgttgtgttttctgaattgtattaaaggtatgggatgtgttgtcgaacaaagaagctgttgatatcgttgcctcagctcctagtagaagcacagcggctcgagctctagtggacacagcggtacgatcatggagaatcaagtacccaacttccaagaacgatgactgtacagtagtctgtctctttctacaagattcatcagtagccatggaagtctcaaccaatgtaaagaaggattcacccaaagaagagtctatagagagtgtcactaacagcacaagcaaggaggaggatgagattgtccccgttaaagacgagaaaatccctgagagttgcgggattgagtcgaaaatgatgacaatgacacttgcggaatgtatctcggttgcacaagatgatgaagagtggtctgctttggaaggattgacgagggttaacagtctcttgagcattccaaggtttttatctggtgagctcagatcaactagttggagaaaatggttgtgacttttttttgacttaagtgattctaagttaatgccgacaaaaacacttcatatcacgatgttccaactttttttcttcttctcttggaagtgatttgcagatatataatctttcttgtttaaattagtctttcagacatgtgagagattggtcatgttagctgtagataaagatcatagtgaattggatcttttcttggatactctctgtctttatatttaattaactcttattactacatgttagacacttggaaattgaaggaagtggcttttacgttttaattatttatttttgtttttggagatggttgggtttttgggaactttttttttatgggttccactatattctctgtctattctcagcataatgatcaaagaaggttgctttgattacaaaacagagcttaacggtaacctaagtttacatcattaattttgtagtggctatttgaaagaaattattttctccttatttggagatgtaacactcaagtgctttaataactaaagtgctttgaaaaaaagacacatgaaccgttaaattgacttcgaagagaaggaaaattgattgaaaccaacttttcttggtgtcactcgtgttcctattggcacaattctcagtacacattttttttgatgagacaattatgaatcttgtctcataaggaagctactttaatctgttttttctttctctaagatttcacttaaatatcaaacttcaagaactcatgtctcttgaggaacaatatggtgggttccaacaccgtaaccgctacatcgcggttgctcttgatctgttttgcttactcattcactgtcttctcaatgatttcatcagtgactgatcctcgtgatggtatgtgatgacttatgttttttccttgcgttgaatacgttcgtggaaatgattgtaatttacttgttttgttgccttttaattagcggcggctctgcgttctttgatggatcaatgggacaatacgccgcctagttggggaggttctgatgatccttgtggaactccttgggaaggtgtatcttgcaataactccagaatcactgctttgtgagtgttccttaatcattcactcgtgtttctgtacacatgtgtgaaaaagaacaaaaaattagagcacttctcttactaattttggtaannnnnnnnnnnnnnnnnnnnnttgtgttcaggggtttgtcaacaatgggtctcaaaggaagacttagtggagatattggagaactagctgaactaagatcattgtcagtctctttagatgaatcatcgatgaatacaagagaaaaacatcttcttttttttctgacctgaattggcgactttgtgttgtttcagggatctttcctttaatcgaggactaacaggttcacttacttctcggttaggagacctgcaaaagctaaatatcctgtaagaatctctcccgcgcaaacaagctaaaagtgatctcgtagttcttgttctttctcttccgtgtgtacatatctaaacagttgtattggtcttttcagtattcttgctggttgtggcttcactggtaccatcccaaatgagcttggctatctcaaagatctatctttcttgtaagaaaatagcattttgcagtgtttgatattgtcctcaaaccaactcatgtttgatgagacttgccactttggttccaccatgttttctcagggccttgaactcgaacaacttcacgggtaaaatcccggcgtctctaggaaatctcactaaggtttattggctggatcttgcggataatcagttgacaggacccattccaatttcatcaggctcaagtcctggtcttgatcttcttttgaaagccaaacacttgtgagtaattttattttctctgcagacatcttcttcagcttcaagtacctttcttctgatgcaaatgttataaaaactgcagtcatttcaacaagaatcagctctctgggaccattccaccaaaacttttcagctctgagatgatactgatccatgtgtaagtcaaatacacttctaataatattacatatttgtcaagcttacggtaactcatcgcaacagatttatttcaatattagattattcgatggaaatcgattcacaggaagcataccttccactttaggactcattcagacactagaggttctgtgagtaacatatcatcactatgtccttagtttcatgtatcttccctatcttcaaaaagatataactcttgtatttgcaacagtcggcttgacagaaacactttgaccggaaaagttccagagaatctcagtaatctcacaaacatcattgaactgtaagtgttgccagagttatgatattactatatagatcatattagacatcacttatgaatgtatacatctttttttctgtctctcaggaacttagctcacaacaagctcgttggatcattaccagatttgtcagacatgaagtccatgaactacgtgtaaatttctcaccaacagagaacgtctttatctacatttatgcgtttgtgttctctgattaaatgtgatgtctgttacagagatctcagcaataactcatttgatccatcagagtctcctctctggttctcaaccttaccttcactgaccacactgtaagtgctgctctgctacagtttacaaatcagaacattcacatatgggagctctctaaatatgttactattttcttgtatttagtgtgatggaatatggatctcttcaaggaccactacctaataagctctttgggttcccacagcttcaacaagtgtaagtttcagcttttagtctccactgaaatttggttacagctttagacatcatctaattgctgaattggatttgcacaggagactgaagaagaacgcattcaatggaacactgagcttgggagacaca

SEQ ID NO: 149557 - DNA, 1280 bp, Arabidopsis thaliana landsberg
atggtgagataagctaaatctctctttttcttgttgctgaattatctctttttcatgaggtcactagatcatgaacccttgatcgttgaacttatgattgatatattgctattgccagaactagactttgttactatatggaccagttaactatcgaattcactcctttgattattgtttcctttttctaaatctctttaacagcttctattttgttatatcacctgcaggctgatagaagagttggtaagcgccaaatgggtcagagaggtttttcaaaagtggagtctggaacttgtaatgtttgttctgctccttgttcatcatgcatgcaccgtaatgttggtttcacaggatcaaagttggacgagtcatcagatgaaaactgtcatggagtagtgggcagccagtgttctgtaaacgaggatgatcttttgccttcttctatggttaatgctcacaagagtttaaataacactgctagtgaagcaagcaatcttgtcaattccagtcatgatgctctctctgagaatgctgagagtaaggaaactataagatgttctgggatatcagatgattccggagctgctgcaatgacttctaagccatctctttctgggagcaggatgaaacataaagtttctgcatcagctaatatgttagatcagagctctaactgtatagaagaccaggaagatgggatcttgtctgctgatcgagccaaacagttgaagtcaggttgttctaataacgagattggcaataaggatttagctgatggttcagctctcaattctgatccaattccgggtggatctaggaaagatgaagtgaaattagaatctttgcagaatccatcatccaaccatgatgacagagtcagttctgagaagggaaatttcaaggaaaaatcaagacccgggggtaacaaagagagacaggaaccttcagttgaaggatctacgcgttcaggagagaacaggaaggatggtaagtcaagtaagagctcttcgtccaactcatcagctgtgtctgagagcgagagtgatgattctgaaatggtcgaacatgatgtaagtaatgctgttttgtctcatattagaagaacttaggaacacgtctacttcttcctttgttgcagtatttgttcactgaaataattctcatgcgaaaggggtttttttcgctgaataggtaaaggtttgtgatatctgtggagatgctggtcgtgaagatttactcgctatctgtagcggatgcagtgatggggcagaacacac

SEQ ID NO: 149558 - DNA, 2690 bp, Arabidopsis thaliana landsberg
tcggcgccctgcttcctacttgttcaaaggttccatttttctttaaactctgacgattttgggcgattttaatagttgcaacaattgtgaataccgatcagtatctcttgatcttctttgtctttgttttgcttgatttgggttagatcatgttttctctttgtcattagggttcttttgttgcttcttttccacgcttttacatactgtttcctctgtggcttcgagaactgttctctgttatcggttggaactatcgattcagtgatcctgcaatcactcctttgtactgatcactgaataaaaatcgttactttctgatgtatacccccaaatttgagtggaaattactttcttaacggatctggatttagggtttttgttacttagtttctgcaatacgaatcagtttcttaaagttatcctctaattctaaacaaatttgtgtcctttcttatttttgtgtggttaacagtttgaaagatctaaagaagaatgaagattgatttttctgagccagagtgcagcaactgttaccagtttagcaatccagacctacttaatactccagaatccgaacagagcaatgtgatttgctcatccatcacttcagtgccggttaatgatggaccagttccacctcttgaacttgattctgctgctgttgtttcaacttcaacatcatctccagttcaagctcttggacatgattctggtgctacagtttctacctcaacatcatctccagttcaaattttttcttcaccattcagcttcggatccgctcatgctgccatcacacccgttagttcgggaccagcgccatctcctacatttggtgagcctcgcattctcctagctacttctggttccggtgcgtctgccacttccacatcctcaacttcatctccacttcacagttcttcaccattcagtttcggatccgctcctgctgccatcacatccgttagttctggtccagcgcaatctcctgcctcatcacctagattatggttcgatagatttgctacatcatctagtgcatctgccacttcctcatcctcaacttcatctccatttcacagttcttcactactcggattcgctcctgctgttacatcagttagttcggcaccaaccccagcttgtggtccaacccaagcttttggtcaaccaacacaagatttcggtctaagtatgttcggttcaacacctagattcgagataactggttttcccttccaagctagtgcatcaagaaattccccatctcctagctttgggccagcgcataattgtggcaagcctgcttttggttcaccgtttgggaacaatgttggttttgccagacctgatgttggtatctcgccagtagcttcctcctccactagtactgaaatttttggtgcaactccagcgagtttgttttcaccttttgggccaatgcaagctcctgtccaagctagtgcatctagcacttccacattccccccatttggttgcgtcccaccatctccgtcgagtggttcttcgctgttcaactctgcttttggttccctgccagcaccctcttcttccaactttttcggacaatcctcttccaaccttctcggacaaaacccatcgactactggtgttggttacctgcctggatctccattgaacagttcttttcccggatttggtgttggttacctgcctggatcttcctccaacctatttagatcaaacccaccaaattttggtggtggttcaatcggtgcaggtcctcaacatttcggtttcaatggagatgcttctgtgttgccgagcacgcctttttcactgtcccctgcatttagcagcaataccaatactggatcctatccttttgcatctcatgaatggagtcgccccactgaacaaggtagtaggaatcctggttatgcgccaacacatgaaggggtaactcatctggttggtgttccccactagcaaaggcaacatttatatttccatatctgcttccaaaccttatctacacaaaagccatgaagaactaaggtgggaagattacaagcaaggagacaaaggtaattaactaactaataagttaaatcttttatacatatataacatttttctcttttatatctctctgtaacattgactaatctcttgtgcaggtgggccgtttcctgctgctcctgcttctaccataggctcaaggccaaacgctgctttttcaccaccaactgtttctcccccagcacatggatgcactgcatgtggagcaaccagtagctcatctgcttcccgtcacttcacctttaatggtgccacaagtcctccatcagctgctacaactcctcccgggttgttctttcctagcactggttttgctcctatgatgtttggtacaaatcttgctgttcaaggcacaagtccagcacttcaagcctatcctgttcaaggttacattcttctcccgttcgccgccatgactctgcagtaatttctttactttctcagcatcaaactccttcttccaagttttaggactaagtctctgttttgattaagaaacacaaaaaccaaattgtgtcaactttatgattttgtcttggtaaagatatagctatcatggatgaaaacaatataagtcttacatattctttcttcgaattggtaaaaccatcgatagtccgaca

SEQ ID NO: 149559 - DNA, 369 bp, Arabidopsis thaliana landsberg
ctttgacagtgaaatggaaaactaacaaacttggaaggtatcctacattaatgaacctagtgtggacagcttgttacctggcaggtattctccatcggtggcacaggactgatcttcgagctctcctctctattctcaaatgcaataagcgttttgggactcccagtggttcctatcttggctgtaatcattttccatgacaaaatgaatgggttaaaggtgatttctatgatcctagctatttggggtttcacttcctatgtctaccaacaatatcttgatgacaaaaacttgaagaaaaatcatggaatcacaacaacaaaatcctctgacccaccagaagcagaagagtcacgttggcaatcaaaa

SEQ ID NO: 149560 - DNA, 1554 bp, Arabidopsis thaliana landsberg
  unsure (1)..(1554): unsure at all n locations
gcactccatcctaattttagaaagctttaataccgtgcattgtgtcagactacaaaagggcgaaaagcagagcgattctgttggattatgatggcactctgatgcctcaaaactccatcaataaagctccaagccaggaagttcttaactttttggatgcactttgcgaggacaagaagaattcaattttcattgtcagtggaagagggagggaaagtttaagcaagtggttcactccgtgcaaaaaaattggaattgcggcagagcatggatacttcttaaagtacttttcttctctactttttatgaccacttgtttaaaaatataaaattctcctacttaagggttactaacatgccttgtgtctttttcttaggtggtcaggcagtgaagaatgggagacatgtgggcagagctctgattttgggtggatgcagatcgtggaacctgtaatgaagcagtacactgaatcgactgatggctcttccattgaaatcaaagagagcgctttggtttggcaatatcgggatgcagatccaggctttggttctttacaagcgaaggaaatgctagagcatttagagagtgttctagctaatgagccagtggcagtcaaaagcggtcactacatagtagaagtcaagcctcaggtaagttacctctcttctgctcaatttgagcattaaggttgtcgaagatatctaattatagacgtttgtgcttgttcttgtgtgagaatagggagtgagcaaacgatccgtgtcagaaaagatattttcatcaatggcgcggaaagggaaaaccggttgatttcgtgttatgtattggagatgacagatctgatgaagacatgtttgaagcgattggtaatgcgatgtcgaaaaggttactctgtgataatgctctagtctttgcatgcacagttgggcaaaagccaagcaaggctaaatactacttggacgatactactgaagtgacatgcatgcttgaatctctagctgaagcatcagaggcttcaaacttttctatgcgtnnnnnnnnnnnnnnnnnttgatttggaaccagatcttttgccaggttttaccctcttatgatctcaatcaattccagttatatttgctcactttctgcgacaatgtatgatcttgttctgataaatacaatgaatgattgatgtgcatagatggctaaagaagaggttagacagacaaagaccaggaatagaagagactgggagtttgttggtctgtatgtgtttgtcagatcgaaagaaagaaaagaagaaaagggtagtgagagagtaataatggggaaaaaaacaaatggtgatgtgaagaagctttgttatttgcagagcaatcaatcaaacaatcaaaggaggaggaaaatagatgtgtttgggttcatcagggaaatgtgtttgcaggatgttgaagttaacaacaagcaaaagcttttcctgatcttttttttttaatattcttattactattattattgttatttgtaattggatgatctcttgaggatatcaaatttggattcggctgttt

SEQ ID NO: 149561 - DNA, 1623 bp, Arabidopsis thaliana landsberg
  unsure (1)..(1623): unsure at all n locations
tgtttcaggtgctgagcatggagattcaaattctaaattttgtgcactttatattatcggttcctaccaccaaagcatttctgaggtaaatactaaagggcagaactatgaatcatcatatctttccaactttgtttaaaaatagtaccactgagttttcatcttaccaatgttttttcaggcggttcattaaagcagctcaagcttcgtacaaggtatgaaaccatgatccatttatcatcaaccctcacttctacagaaacttggaatctgaatgtagtgcgttgtttcttataattattttgcaggtnnnnnnnnnnnnnnnnnngtatttagcaaactatctcgccgaattgacactggtggaatatagtttcctaaggttcctgccatcactaattgctgcttcagctgttttcctagcccgatggacactcgaccaaactgaccatccttgggtcagctcatgtttcttgaatcttgaaaaaggttgtttttgtgtttgcctcttttttgtgctgataaaaagaatgatgtttggttatagaaccctactctgcaacactacaccagatatgaggtagctgagctgaagaacacagttctcgccatggaggacttgcagctcaacaccagtggctgtactctcgctgccacccgtgagaaatacaaccaaccaaaggtacatttctctacaaaacaccgttaaatcaaactactgattgttgaagaaaagtgaatgaatgattgaactggttttaattctgtatgactttgatagtttaagagcgtggcaaagctgacatctcccaaacgagtcacatcactattctcaagatgacaccaagcaacatcgaaaacagagcccaagtcaggtgatcaaaatacctattttcagacattggatgttatgtcgtctctttgccagttttgtctgtctgtaattctgtagctattgtgtggcgccttaattgtaggccattacttgtcacaccacttagctttaaataaatgttatggaatttttctaatcgcattgctacaactatttactatcctgcgggattttgtacctaggagcacttggaaaacgaatacaaaagtgttaattaatataaatttcactgttcatggctggattgttatgttgtttgttctgatttcgcaatgctatattcatatggaaacatttccatctacaattaacgtctcccgtgtaacatttggtatcccctttttactgattcctccatgcttgattttattcgtcaaattagtcttcaggtatacttcaatgtatgtatttccatggcttgaagttcttcaatcttccacaaattcaatcaaatcctaaaattcgaagatacgccaacacttttcctccttaaaaactctcaactatacccacttcagttccttaagttgagttatcacagctacagttccttatatagtcctccactaaacaaacaagaaatccctaagtctgtagctcgacttaaaaccgcttcagatacttttctcaaagtcgacttacctataattttctgtatggcaatagcctctaccgccgtgattgcgcacgagattcatttacaaagatcaggacgcctaaaccggtaa

SEQ ID NO: 149562 - DNA, 3147 bp, Arabidopsis thaliana landsberg
  unsure (1)..(3147): unsure at all n locations
atgcagaagcggagaatcatcactgtgaacccctccgcgtctattgagatgagtcagtacgagaataatgatgttccttactcaagtgttggtgctgatgaggttccatcatcaccgcctaaagctaccgataagattcggaaagtttccatgttgccacttgttttcctcatattctatgaagtctcaggaggtccttttggtgttgaggatagtgtgaatgcagctggaccattattagctcttctagggtttgtgatctttcctttcatttggagtatccctgaggctttgattactgcagagatgagtacaatgtttccaataaacggcggttttgttgtttgggtctcctctgctttaggacccttttgggggtttcaagtaggttggatgaaatggctttgtggagttatcgataacgctttgtatcccgttcttttcctcgattatttgaagtccgcggtcccggctttagctactggtttgccaagagttgcatcgatcttgatcttgactcttttgcttacttacttaaactatagaggactaaccattgttggttggactgctgtgtttatgggagttttctctatgcttccgtttgctgtaatgagtctggtttcgattccgcagctcgagccttcacgatggcttgtgatggatttaggaaatgtcaactggaacttgtatctcaacactcttttctggaatctgaactactgggattcagttagtacgttagccggtgaagtggcaaatccgaagaaaacacttcctaaggctttgtgctacggtgttatttttgtcgctctttcgaacttcctccctcttttgtctggaaccggggctatacctttggatcgtgagttatggacagatggatatctagctgaggttgctaaatccatcggtggaggatggttacaattgtgggttcaagcggctgctgcaacatcaaacatgggaatgtttttagccgaaatgagtagtgattcctttcagctacttggaatggctgaactcggtatgcttcccgatatctttgcgaaaagatctagttacgggacacctttgttagggattctgttttcagcctcaggtgttttactcctatcaggattaagctttcaagagattgtagctgcagagaatttgctttactgtggtggaatggttttggagtttatagcatttgttagactgaggaagaaacatccggctgcatcgagaccgtataagatacctgttggaaccgttggttcgattctgatatgtgtccctcccattgtactgatatgtttggtcgttgttctatctactctcaaagtggctcttgtgagctttgtgatggtagtcattggtttcttgatgaaaccttgtctgaatcatatggatggaaagaaatgggtcaaattctcagtcagttctgattttgcagagtttcagaaggagaatttggattgtgaagagtctttgttacgttagggttacaaaggttaaaaagcttggaacctatagtcaaacaaactgtatatctttctgctcgttttttacatttntgtaaaaaaattgttcccttgttaagttcataagcacaagaagatatgtgtaaatgttgtatgtatcattcaattttccttttgaaatgaaactcattggtgattttctccaatacgtttattgaggcccatgagagcccaatagtaatacaaaattcatttgtagatctaccgtttatgtatgatgtgatcgagatgctcgcaaatgtttgaaagaagaaaaaagtaaaaaaccctaaacccccaaaatttgcttcgagaagaaaatgaatggtgtntntcgtcatcttcgagcttcttcacttccttcattagttcgcagctatggtggaatcaattcgatctgtcgattttcgtctcaatctgatggcttctctggttcgtcatttcccatttttatctctcccgatccatatttttcttcttcaattttgagttatgacccagaacaatgattgaatcgagaacacgttttctgggttttatctgatttatgcatttgtagttgttcaatcaaagttttggatttggcgtttaagttttccactatcgtcaagtgatgttgttctccataaaaatgtgtaatttcgttattagggattgtttaggattctaacctttgcctagaagtacaaaacgaggatttgaatcaattagtctcaaggatcagcttcttatggctctttaacaatttgctgtattcagaaattaggcaattattgcaattggtaacgagatatctacaaattatgaatctggaaaacatttcttgggtgcagctttagtctatatgcaaggagggaattataatgtatctgtattgattgattatttctttcgtggattcttcttgaacaggagggagattcagagagcaagtgccagttcctggagagtctgcaaataattcaggcttaccaaacacaggaagaatcggttcctctccggagcctaatccttcgactttgagaactttcggtgatatgaaagcaggcttgttaaacagaggagtcaatggtttctcggctcctaatgctcctcctaccttcaaaagttcactgagatcaagattaccaaactctctacctgatcagttcggtcagacgaatccaggcttaccaaacacgggaggaagcggattctctgctccaagtttatcaagctacgagaatttcactcaatcttcttcgcttcttaaggagaattctcgcagtggagggaagtcaagcgacctggactttgttagagaagtaatagannnnnnnnnnnnnnnnnnnnnnnnnnnnnnnnnnnnnnnncaacgcccaaacctcgaaacgaatgctgacatcattcacatcaagatgttgaggaacaacacttttgtcacggttacagattccaaaggaaacgtcaaatgcaaagctacatccggtagtttacccgatctgaaaggtggaaggaagatgacgaattacaccgctgatgcaactgctgaaaacattgggagaagagctaaggctatggggctgaaatctgtgggtgttaaggtgaacggatttacgcatttcgggaagaagaagaaagctattatcgcgtttagaga

SEQ ID NO: 149563 - DNA, 560 bp, Arabidopsis thaliana landsberg; identical to SEQ ID NO: 73908
  unsure (1)..(560): unsure at all n locations

SEQ ID NO: 149564 - DNA, 659 bp, Arabidopsis thaliana landsberg; identical to SEQ ID NO: 45622

SEQ ID NO: 149565 - DNA, 635 bp, Arabidopsis thaliana landsberg
gttcttgcaggattctggaatcaatgacacgagtatgacccatttaacttggtaactaatggtaagtaatccaaaatttgtctttaattagtctggggatgaattattgttgtaaccaaaaagtcaatcttagaactgttttgatttgcatgcaaaaatgtaaatgctctgttgatgcttaaagttttgtgtggaaaccgtaggggtcttgtcaacgagacatacagaatggaccgcatccttatacatccgccgtttctcataacactcgcttgcatttacattgcttctgtacacaaagagaaagacataaagacatggtttgaagagctttctgtcgacatgaacattgtaagtccatgcactgttatctctgttgttactagaaggcatggtcttgcttagttggtcatcggaatgtgtgaacatattggcaggttaagaatattgcaatggagatattagatttctatgaaaaccatagactgttcacggaggagagagttcacgccgccttcaacaaacttgctacaaacccataaagtttctacttgtctgtgtgttttgttcccttgagaaaatgtaatgttttgccagaagttttggaagtgagattattctgtttattgtacatc

SEQ ID NO: 149566 - DNA, 1863 bp, Arabidopsis thaliana landsberg
ggtgattctggaagataagtcgctgagttaaagttgcagatcttgaggttagtgtgtcttgtctctacaaattagtcctgatttgtctatcttaatctgtggttttgtttcagtatttgttagaaatcagaaacgagtatgatttgtaaacagaactttttccccttttgtaaacagaagtttcttagtggttgttctagatttgtttggtctatttctggaagagttttcaatgtctgagtttatgtttctttgttggttgtttaaggttaagagaaagaaagtgagtgttgtgtaatggaggaggtaaagggacaaagaggaagtggaaccacagaggcagattttgtgttgcaatggggtgagaggaaaagagttagatgtatgaaagtgaagaaagatcaaagccttgccaatggcaaatcaactgattgtttgactaaacgtaaactcatttctcgtgctgtctcttctgagagaggctcaccttctcgacatcttaaccgtcctaacaagtaagtattattgggggaaaaagtgatatttttcaagtttttttatatgtaagatattgttatgtttctgcggtgataggatcactgattctttagtcaatgtgcggagatcgtgtatggcgtggcccgagaaggaagataggtattatacaacaaggggttcgatgggaatagatgagagtgggaaaattattaaggaacctgtgaaagaaacaaagaagcatgtgtggccaaagttgtatatagctttgtcaaataaagagaaggaagaagattttttggctatgaaaggttgcaagcttcctcatagacctaagaagcgagctaagaacattgataaagcccttcaggtaaaattcattaaaaaaaaagtacttatttttatctcacagagttaaaaacaaaaaaaaaatcataaatgaaaatatgttttgattaatgtattattgtacagttttgttttccagggatgtggttatctgatttgaccaagaaccgttatgaagttagggagaagaaaaatgtgaagaaggtaattaactttacttaacccttttttcagttcttagttgtgtgataatgacaaaagagataaaagactcttcttaaaataagtaagattagtataatagaagaagaacaaaagatggaatgtgattataaatgaatctatatataattaacataatatttttatgtgaaaatatgtggaagagaaggtggtgagttgtagacaacattgggtggaccttaatattatttataacatataaaaaatgtattttaatggaattcacaaaatggacaagacatgggacctactattccacctaatgtagagaataatgtactgttattgtttaaaatattgtttgcaaagtaatactatttgacataaaataaacccaagtggtggtgtcactctgtttttttaacaaaattgtgaaaatcatttgatcctttgtttatttatgtgatcagttgaatatactatttttattcagtcaaaacctgcatttttagtcttgttttttcaactgagtattgattaacaggaatggaaactgattatatattgaattgtaaatgcagcagcagaaacggagaggattgaaaggcatggagaatatggacaccgactccgagtaaattttttgttccttgtttcattttctttttgtatggtttacgatttctcttttgaggaaaacaaatatgaagatgcacgtgtggcttgcttgtgaagagcgtgcgaagtatgccaacagagaaccaacagagaaccagcagagcgagctatcgatcgagaaattactctatttttattttaatatgtttctgttatttt

SEQ ID NO: 149567 - DNA, 664 bp, Arabidopsis thaliana landsberg
cttcactgatttatcagatctttttgcatttggatcgagaaacaagaaagaagaagaaagcttcaatggagaagagtaatggccttcgagtgattctgtttccacttccattacaaggctgcatcaaccccatgattcagctcgccaagatcctccactcaagaggtttctccatcactgtgatccacacgtgcttcaacgcgccaaaagcttcaagccatcctctcttcaccttcttagagatcccagatggcttgtccgaaacagagaaaagaactaacaataccaaacttctcctaacgcttctcaaccggaactgtgagtctccgtttcgtgaatgtttgagtaaactgttgcagtctgcagattcagaaacaggggaagagaaacagaggattagctgtttgatcgctgattctggatggatgttcacacaacccattgctcagagtttgaaactcccaatattggtcctcagtgtgtttacagtctccttctttcgctgccaatttgttcttcctaagcttcggcgtgaagtgtatcttccacttcaagggatggttatttcttacatttttcgtatagaccaagcaactcgttaacctaaaaacatatatctaaatttctcacagattcagaacaggaggatctagttcaagagttt

SEQ ID NO: 149568 - DNA, 513 bp, Arabidopsis thaliana landsberg
tcaacatcttcccaagcgtaaccaagttcttgctccggcgaaaatgaaaagagtttttagaactaagggaaatctcaagagagcggttatacttcgatacgtgaacgcaagaagtaaagaaaccaccggagatgttctctgttacgtcgatacgctgctgaatcttgagatcccgacggaggagaaagaaggagggaagaagaggaaactgagtgactcggagatcgtgagtctgtgttcggagtttcttaacgcagctacggatccaacggcgacggcgatgcagtggatcatggcgatcatggtgaagtatccagagatacagaggaaagtatacgaggaaatgaagagtgtgttcgccggagaagaagaagaaagagaagagatcaaagaagaggatttggggaagttgagttacctcaaagctgtgatcttggagtgtttaagaagacaccctcctggtcattacatgtcttaccataaggtcacacacgacaccgttttgggtggatt

SEQ ID NO: 149569 - DNA, 508 bp, Arabidopsis thaliana landsberg; identical to SEQ ID NO: 66444
  unsure (1)..(508): unsure at all n locations

SEQ ID NO: 149570 - DNA, 617 bp, Arabidopsis thaliana landsberg
cgtgttgtcttcagaatatatatcatggcatcctctggactgggaaatggaataggcacttcgagatctgccaaaggtttaaagagctcttctagttctgtcgattggttgaccagagatttggctgagacgaggataagggacaaggtagagaccgatgatgagagagtaagtcttgcattgcttcttctttttttcatctttattcaactgttttttagcttcacttctttttcctgagcttatatatgttatggagtaggttacagtgtctgaggttttcgttacgttgcaggatagtgaaccagatattattgatggggctggtgctgaacctggtcatgtgattagaaccacactccgtggtcgaaatggtcaatcaagacaggttggatggttatggataattgtatgtgttagttggtaatgtagtttatctaactgtttctcatatagatttttttttggattcgcagacagtcagttacatatcagaacatgttgttggtactggttcctttggcatggttttccaagtgagctaatttaacataagacccatgatgttcgttctattgatttggctccattcccctgcacatttatgtttccttttg

SEQ ID NO: 149571 - DNA, 1813 bp, Arabidopsis thaliana landsberg; identical to SEQ ID NO: 5132
  unsure (1)..(1813): unsure at all n locations

SEQ ID NO: 149572 - DNA, 532 bp, Arabidopsis thaliana landsberg
acaaagctgaagaaatcgctgaatgcagtgttctcacagttcggaaagaaactggagatattggcgtttaagacctttaagcacaaaggacaagcttgggtagtcttcgacaacacaaagtctgcttccactgctattgctaaaatgaataattttcctttctacgacaaggagatggtaccaattccttccactccagttactttcttgataacttcttcttactcgatgtgttttggtttgcctatttgcccctagagttagtggaacacctaattagggtttgaatctactgattagagagcttttcttagtgaaccacatggattctatttgaaagaccctttatatgtttagtggttgcttttaggttattgaccatgttttaggttgtggaaatacttatcaatcactttgctatattattatttcctaactttagcaatgtggacagagaataaaatatgccaaaacaaaatcagatgttgttgccaaggccgatggtacatttgttcctcgcgagaagagaaag

SEQ ID NO: 149573 - DNA, 1009 bp, Arabidopsis thaliana landsberg
  unsure (1)..(1009): unsure at all n locations
ggagatanagttcagtatcaagaactatgccgtgtgcacaacgcatccttgattgctcaaccagcacttgttgagaacgagaagaagcttttggaaaagagcaacccctgtgccttatcgagatcatcttcaggtaaacttttctctaggcaattgtacctcacgccgtttcaatcaaagaaataaaatcatgtgctaatacatttgattttaaactctacatcagccgacccgctgaagatagaaccattcctttgagcatcaatcgctgagcgtactaaactttccattgaagatgttgagcaccttctcatgaagagcctttctgtaagtattagtatctccttgcatttttctctcttgtgttcttttagtacccaaaaaactctgcagcttccgggttaaaatctgttgtggtgaccaagaaaagagtttgtctgagtgaccaacataatgatactgaactacctgtcatctgattaagaacaacatagtaaacatcaccatacgcattgtatctctaggtttatgtatttgcagttgtcgtcttattgcgtaattttgttatagaactcaaatgatcttgactggttttgttcctgacttagacatagaatgattgtgtatgcttctgtagaatctaaagtggaaaatgaatgatacaggtgcatttgatcgagggcatcatagaccaagtgaacggaacaatttatgtctcatgggcgcaaccgagagtactagggattccacagatcaaggctttgagggatcaattagacagttgggttgacaaagttcacaccactttactatctgttgaagccgagacaccagatcttgttgcagcataagagaaaagaaaaccttcttcctccttttgaagctactgaatgtaaaacaccatcttctctgggattagattcaagttttttatttcagtcgtagaagaaattacaattgctttttaatcttttgacttccatttcaagatgtccgaaatttcagttct

SEQ ID NO: 149574 - DNA, 2481 bp, Arabidopsis thaliana landsberg
ctcactcctaaaaccctctcagtctctccatttcccggagcaaaaatagctctccgaccatgaagtttggatctttaccatccaaatcccttctcttccgcctctcttcttcctccacaacccaatctcaccgtcgaacaattacccttttcatcactaacattcattcctctccattctccaccacaaccacctccggctccaatttcgtctccggatccagccattctccctctcgacgtcctcagcaagacgaagagtcccgatccgttagggtttcggtctggtgggacttcctgagctgtaacttacctgtagacaccaatgtctacaaagtagcacaatcaatcaccgccgctatcagaaacagcggaatcaaaggaccaatcacaatcacagccttcggtgacgttttacagctccccagatcaaaccaagacgctctctccgctacaggaatcagtctcactcatgttcctaacggtggtaagaacagtgctgatagatctctaatcacagatcttatgtgttgggtttctcagaatccaccaccagctcatcttttgctaatctctagtgataaggagtttgcaagtgtgttacatagattgaggatgaacaattacaacattttgcttgcgagtaaatcatcagctcctggtgttttgtgtagtgctgcttctattatgtgggattgggatgctttgattaaaggagagtgtgttactggtaagcattttaatcagcctcctgatggtccttataactcttggtatggtcactataggattcctcttcttgatccatttgctattgctaccactactgagcaatcttcgtctagtgtgaaaatcgaagaactatccgagtctgtgaattcgaatgctgttgttaaccttcgtcctattccaaaagaagttgttgataagattcgttcgatagtgagtttatatcccaagggggctgccattacagaactacgtgctgagctgagtaagagcaacttggctattgataaagatttctatggacataagaagttttcgaagtttcttttatccatgccagatatcttacaggttactacagtaagtgaaggcttgtttatgattcgggctgttaccgaaaagaagcctccgatgcggcttgattctagtcctcgtttgtctactgctgttgatcagaagattaaagataaggaaactgttaatgctccatcaccaaagctaattagcgatgtagagcttgctgctgaaagaagaagagatggcttacttggaaagaagcaggaaaaggtattggagagtgataaaattgttaaagaagaatcatcagagagttctcaagacccaattctggtcggccagaaggatgttaaggcaaatgttaaacccgtcgagacgaatcaagtcgctcttgttgcgtggagtgattcgtccatggaagatggcttttttcaaaagctaaaaagactgtggtatggttcacctgagatggaattagagcatctcccagaaatgaagagcgtttctggaagtggagacacacatagagaggataatgacttaaagtcatcaagtcagggaagtggaaacaaacataaagaggataaggacttaaagtcatcgagtcagggaactgtgcccatgtctcaaatctcaccttctttcgttgctgagtcggtcgatgaggtaaaagttggagctgatgacgtagacagtaaagataaagatgcaagtccaggctttttaggtcgccttttgaagagtttcaagttctggggaaagaatacaaagtctagcaaagactctagtgggaatcaggagcttgtcaatgttgattctcaagtacaagacatatttgcaaaagagtatttttggagtgatattgaatctttcattaattctccaagaggctttgctatagtatctcactcgaggacaaggtgcgtacattctcttccctcctgatttggcaggactttgattagatattgattaatatgtaaatctatcttaggttcagaactattacaattggttcttgcattagccatttgttgtcttttttgggacgagtattcagctaatgctgttccgtcttaacctggtcagggaggtgatggctaaaaatgtgcaggaggaagggccttcgtgtctcagactgctcgatgaatcaagcatgcttcatttagttactttgctaatatcagaaaagaaatggattgaagaaaccccatcttcttctttaccattcagaatcatcaaaggatctagccctggccaccgtcatgcttcaaacggtttgagctcaatcttctcggattcttcaaaatcacagtggcagaaacaaaatggtgagaaaagcggcaagaacgttgctcatgctggagtttctgttggttctgtgaacaagaaagagctggaaagatacaaaagtaatgcaatagcggattgtcaggagatgataaagaagataaca

SEQ ID NO: 149575 - DNA, 961 bp, Arabidopsis thaliana landsberg
ggacttcgggagcttggacaacttgaacaagaccttgtttttggtgatgctggaatgaaggatgtgattaaatatttgagtactcaagaggtttgcatctagttaacagttgttgatttactgtaatacttcatgagatattgagctgatgagctttataattttttgaactactgtacaggaggcaagccgtgaaggtaagttacgcctgttgatgatcctcgcaacaatttaccctgaaaagtttgaaggtgaaaaaggtgaaaatctaatgaaggtacttggggttttagcgcttgtggatcttagtttggttctcatccaccccatctaagggtttagtattgcttgtgtttctagttggccaaactctcatctgatgacatgaccgctgtaaataatatgagcttacttggttcagccgtcgatgctaaaaagaataccccgggaggtttcactttgaaatttgaccttcacaaggtaatatcttctctctcaatcttcctttataatgttaaaaatgtacattttcttaacattgtctgttaacggctgcagaaaaaacgagctgtcaggaaagagcgccaagaggaagcagcatggcagttatctcgtttttaccccatgattgaggtaccagtcgcaattggccttgttgattttcctatttgcacaggacactacttttgactttgatgactttttttcatttctggtatttgccaggaactcatcgaaaaacttagcaaaggagaattgccaaaagaggatttcccatgtatgaacgacccaagcccaagtttccacggatcaacctcactttcatcagcagcaagtagtagtcaaggtcaagctgctcagtccatgagatcaagacgcacaccaacatgggctaaacctcgaggttcagatgatggatattcaaggtaaactgtttttaacaatccaacaaagaatgaga

SEQ ID NO: 149576 - DNA, 378 bp, Arabidopsis thaliana landsberg
ctgcgattacggtaaccattttaataagattcttgatctgctagtcacaataacgagtaaaaaactataacgtgtgtgttgctttgggactgtgttgaaggagttgattggtatggggggaagaacatttctggtgcccggcgggttccctctcggatgctcagtagcatttttgacattacaccaaacatcaaacatggaagaatatgatcctttaacaggatgtttgaaatggctaaacaagtttggagaataccacagtgagcagcttcaggaagaactcaacagactcagaaagcttaacccacaaaacaacatcatatatgctgactactacaatgcttcattgcgccttggccgagaaccaagtaaacacgg

SEQ ID NO: 149577 - DNA, 1088 bp, Arabidopsis thaliana landsberg
agaagacaatggatgacgtaagccgatgagaatctgaagatcctctacgacccgagtccattttagatcctaacccggtgtgacccgtttacctggtttcctctcaccaccaagttttgcttctaaaattttctggtagatctgagtccacaatcatcagaaatcaactttgtgaattgaaggccgatcactcctttgactttgttcttagggttcatcctcagaggtaatcaatttatatggattacgcaattttcttaacgaaattgattaacttgcaattacctgaacccccaaaatcgtaaattgtagggttctctggtgatttgatgtgccttaaagttatgaattttagatacggagtttgtattattgcctgatttccgatacacatttctgtgtgctttttaaggtgtttaatgagctcttagaagctatgggaatggcgtccatgagctctggtactgaaagccttcgtctttgcgtgtttgacttaagaagaggccaacacgaaggacaggaactggacaagatcttgttcttctatcctcctgatctaaccttctccactcagctatcggttataggtctcagtgaagggcttatcacgttcacgaggttagctactagagattttccttctttacacagatttttcaagctcatggattgattgatgttgtctcatgttcacataaattttgagcgttattagcttttcctgtattgttgggtgttcctgagacgtggtttatggaatataaacacagacttttctccccggaggcagcttgtgaggtaattgaagcagagagacattcccatgttttctatgaggccgagcccgatatctggatggtcatggtacaacattatcaactctttcacttgttttagcaattgatttgcactttgttcatatgcatcaaaagaacaaaatttgatttagactttggtagattgtagagaaaaataaggagattgaagctgtatggaggattgatgcattgcggagagtgctaaaaaaagtgcactctctctttgttatgtttcaagggtcaattagggcattgcttagaaagaaccaa

SEQ ID NO: 149578 - DNA, 1086 bp, Arabidopsis thaliana landsberg
  unsure (1)..(1086): unsure at all n locations
aatgatttggatactnnnnnnnnnnnnnnnnnnnnnnnnnnnccaggtaccgggaaaactcagacgattcttagcatacttggtgctattatgcatgctactcccgcaagagtccagtctaagtatgatttcttacatgctatcctttgacactcacttgactatgtgcagctccgagttaagattataactatgctttgcattctgaaattccatttttatttataataggggtacagatcatgaagtaaagcgtggtattcagatgactatccaggaaaagtatgattttgctcccattaagatcttttaaatatttcgatactcagttctctcgcatacccagatgtgtgttcataatgattggaaaatgttattattatctatatcatatggtgttttatttgaaatcttgcaacttaagagtaattggaataatattacattgcatcaatagtttggtctgaaatatcacataccatacatccctcttgttgaacatatttcactatgtcttgtctgcagatacaatcactggggaagagcctctccttggattttgggtgtcaaccctcgagatgctattatgcctgaagatggtgacgatgggttctttccaacctcaggaaatgaattggtaagtcggaagattttattctgagacaaatggtaaccccacatttatttcttttatcatatagtaaccccacttttctgattctcttttgatgttcagaaaccggaggtggttaatgcgagtcggaagtacagattacgtgtacttgtctgtgctccatcaaactctgcacttgatgagattgtgttgcggcttctgagttcgggtatgtggttaatccaattcattatttcattatttgaaaattggtaatggtcttatatgttatggtttctgcactctcaggtcttcgtgacgaaaacgcccagacatatacacccaaaatagtacgaattggtctcaaggctcatcactctgttgcgtcagtatcgctggatcaccttgtatgtatctagtttcctttacagtttgattgcctttcgtcctggcttaattttggttgcttgatt

SEQ ID NO: 149579 - DNA, 686 bp, Arabidopsis thaliana landsberg
cacaggtctacggttcactcaactgtagtccattccacctcgcaacccaacttgggtgcaacagatagtagacgtgtttctttcgagccttcaaaaaatggagcttcttctgcaggacatccatcaacttccgcgtatcctactaaatccatcggacctccaccaagagttccaccatcaggtctcaatcatatctccaaatattatttcctaaagttagaaacttcaactaactttcaccctatgtttttacaggtagaccaggtcgtgttgtggaatcatctgtatcttatgagaatggcaggaacctcaaagaagcttatttcagaagcgcggtttcatctcctcattgctacttccgaccaaacaccatgacaaacccggagaaccgcaacatagaagcttcgtcttttccaccagagccacaaaatcctgtccaccaattcagtcccactgagccaccagctgctacaactaaccaagcagacgttgagactatgaaccacccaaacccttactttcaaccacagctcccgaagacagatcaattaaacaacaacacacatatggccattgatgctaagctgttacaggcacaatcacagtttggtccagcaggagctgcagcggttgcagtagcagcacaccggaacataggcacaattagttacagcgcagcatcatag

SEQ ID NO: 149580 - DNA, 1633 bp, Arabidopsis thaliana landsberg
ctacgattcttctttttttcaacgactgctcggatctttctcagtagagggaaccatgaatccctcactcgtcaccgccattaacgctccaatttcaccttctcctcggtctcctcttctttctcacttcctacctactttacctcaccgtttctccaagtctgagtgtctatctcgccgtcgttatcgagtttcgttccctcgtagctcagctgcttcctccgaccaactatcagtatctacgcaggcgaagaatcccggtatccatgggaataagaaggagctcactggattgcaaccgattgttgagaaaatgacaccgccggtgaggctagcgacttcagctgttgttttagcggcgtctttagctactggttacggccttgggctccgtttagccggctccaggaatattgcctttggtggggctgctgttgctggagccgccggtggagctgtcgtatatgcgttgaactctgctgtaccggaggtagctgctatcagtttgcataattatgttgccgaattcgaagatcctgcctctgtgacgaaagatgatgtagaaaagatcgctgataggttagtgcttcatttaattgtcaatttgtgtctgggatttataaacaaaagtttgcttaaacgatccttcttatatgttgcaggtacggtgtcaacaaaggagacgaagcattccaggctgagatttgtgatatctattgccggtgagtcaacaaaggatactgtgttcatcttttctcttagtgtggggaattcattagtaatctttgcatcttaatcttgatttaggtatgtaacttccgtgcttccaactgaaggacagtctcttaaaggggatgaagtggcgaagatagtcaagttcaaaaatgctttagggatagacgaacctgatgcagctgccatgcacatggaggtgctttctagattcttaatcttcatttgaattagccgttagcctctttgtagttgatgcagaaggatcttgattgctgaatcaccaattccttggttttgtttagattggtcgcaggatttttaggcaaaggcttgagactggggagcgtgaaggtgatgcagaacagcgtcgggtgagtcgccagtccctagtatttgttaagtttattgtaggattgttcgaaagagagcacaagcgtgatcacaagttgtatgcttccagtgcaggcatttatgaggcttgtatatgtttcagctcttgtgtttggagatgcttcatccttccttctaccttggaagcgagtattgaaggtcacagatgctcaggtaggcatttccaatttttttcatacttctgattttgcgcaatagttgttttatggaagtttcattttggcaactcactccttcttggtaatctgaagttctgtgctaatgtcttgacctcatttctaggttgagattgctattcgtgaaaatgcaaagcagctgtatgccgaacggttaaaattagttggtagaggtaatgttgttcatgttttacattttgagatgggaagtaatgttacatttgtagaacgggtttgagtttgcttgacttggttatattgattattgtggcacttctttgtccattgggttttgtaatattagtttatca

SEQ ID NO: 149581 - DNA, 958 bp, Arabidopsis thaliana landsberg
gtcccaagctgcttcgctgaatcgtgcctgctgctgaaggtactttgaagtccaagggcccaaagcagcctttgggtgcaagaatcagagatttgatgcaccgtatgactctacaagagaagattggtcagatggttcagatcgaacgcagcgtcgctacacctgaagtcatgaagaaatacttcattggtaagaagaaaatgagcttggaggaattattgtctgttaagtgttcgatatattgtttaaatgagtggactttgttgggttttggtgtgtagggagtgttttgagtggtggaggaagtgtgccctcggaaaaagctactcctgaaacttgggtgaacatggtcaatgagattcaaaaggcgtctctttcgacccgccttgggatccctatgatctacgggattgatgctgttcacggtcacaacaatgtgtatggcgccaccattttcccgcacaatgtaggccttggagtcaccaggcaagtagttgtcatagaaagccttaactctggttatcacaaacttgaaacgactttgttcttgttggaattggtctgttttatatagctatgatactgaacaactttatgtttgtgtttttgactaatctcttagggatcctaaccttgttaagaggattggggcagcaaccgcgcttgaagtcagagcgactggaatcccatatgcctttgccccgtgtattgcagtaagtataatgaagctatctagtttgaagttgttgcagaaaactgattaagaaacgtgtatgcttaatatttctgcaatgtggatatgctttgacaggtttgtagggatccaagatggggaagatgctacgagagctacagcgaggattatagaattgtccaacagatgactgagattatacccggtttgcaaggcgaccttcctaccaagcgaaagggtgttccctttgttggtggaaagtaa

SEQ ID NO: 149582 - DNA, 985 bp, Arabidopsis thaliana landsberg
agacagagaggagagagagaccaagaaaaggagacttttgttgatcatgggacaagaaagacctaacgacgaagagagacccgagtcacgtgatcttggggtctacggatgttcaccgcctcattcgccgcgtctcggtccgaccaggttctacgtctttgctggagacccgaatccaaaacaaacgataaagcgatgcaagaggaagagaatccaagcttgtaacgatcaaagaacggctaaaacagccattggcgttatggcgattttgggtttcttttgcctcgttaattggttcatgctctctcgccttcacgaaggtcgggtctggcttcgaagaggactctctgagaacccaaaacatgtttctgcacaggtccaatgatcgtaatcttcattgacatgtttccttgattactgacgtttcttgcgctacactcattttcacatacaacaaaaaaagctttttatttataaaaacagagaagataagaaaaatgatatcttagttgaaataaaatattgtgttgcataactgaattattatatggtggtaattgactatatgaagagtagtgttttgtgcttaaagtttcatttgatctaaactttttgttgtgtgaatcagaatgaagagcgtaaaaagtttgaaaaacagaagatgaaatataatggaacatatggtagaatgttgagtttggctactgatgctttggcagaggtaaatatattcttcacaaaccaatcttatccttcctaattctcagtaacattgttttgttctttttaatagggaatgcgtgataaccgttattgtaatggttttgattttgagcagaacaaacttgagaccaaagacttatggcaggagccgaaggaacaagcttcggcgtggaagccttgtgcggatcaaagatcttagactcctgacggtctcattcaatctctctctttataaaattaggttaaagcttgatcctatgac

SEQ ID NO: 149583 - DNA, 3963 bp, Arabidopsis thaliana landsberg
atatccccctttcttgttcctcaatcatatcttcttttggtatattattttatattttcactttccttattgtatgtcccaggcgacattattcccaagtagagataatatattctctttttaaaacaaaaatttaattactgaaaccgtaaaacatgtaatggtttctttcttttcttcttattcttttagtgggtcactcctatagaccccatctgcaaaattaccaaaaagtgaggttgttgttgtcatgtctggttgtgaattgttgtcattttcctctaggaaacttctcaattctcatgtaaacaattgaacgacatttactgtgtgtatgcagatatttgatgggccaaaaatgggcaagtaataaggattaatctcgtatgcaaagttttgggtcactaaaaatcactttttggactgggccagtatgagtttgacttctaactaatggactcattaaccaaattcgatttctccaacttgtcagcgactccctgaaaatgttgacgtcagcttctcggccatgagacctgcgacggagcttgcggtgaggatcggccgagagctgctaaaagtttccggaagctctcgagctgctcggatatggagtccattgattgaacagagtcttcacggtctcggttttcgtcactcaataagcccttcgcttgtggctcgagtcatagacccgtttctgctgaatcatcattctcttgctctcggtttcttcaattgggctgctcagcaaccaggttactctcacgactccatatcttaccactctatcttcaagtctctttcgctttctcgtcagttctccgccatggacgctcttttcaacaggttaaatcgaacaaaatccttctcgattcttccgcgtatcgctccctcattgatacgcttgtgctgggtaggaaagctcagagtgcgttttgggttttagaagaagctttttcaacgggtcaggagattcatcccgatgtatgcaatcgtcttttagctggtttaacttctgatggatgttatgattatgcacagaaactgtttgttaaaatgcgtcataaaggtgtttcgttgaacactcttggattcggtgtctatataggatggttctgtagaagttctgaaacgaatcagctcttgagattggtggatgaggttaaaaaggctaatttgaatatcaatggctcaatcattgcactgttgattctccatagtctttgtaagtgttcacgagaaatggatgctttttatatattggaagagctaaggaacatagattgcaaaccggattttatggcttatagggtcatagctgaagcgtttgtagttactgggaatctgtatgagagacaggttgttttaaagaagaagagaaagctcggagtagcacctaggagcagcgattaccgagcttttattctggatttgatttcagctaagcgattaacggaggctaaggaagtggctgaggtgattgtgagtggaaatttccctatggataatgatatcttagacgcgttgattggatctgtctctgcaattgatccagattctgctgatgaattcttagtttacatggtcagcacagggaaattgcctgctattcagactctgagcatgttaagtaagactctttgcaggcatgacaagagtgatcatctgataaaggcttatgagcttttgtcaagcaaaggttatttctcagaacttcagagttacaatctgatgatatcgttcttgtgcaaggctgggagagtcaagaaaagttacactgctctgcaagaaatgaagaaggaagggcttgctccagacgtttcactctataacgctctcattgaagcttgttgcaaagcggaaatgatccgtccagcaaagaaactgtgggatgagatgtttgtggagggctgcaaaatgaatctgacgacatataatgtacttattaggaaattatcagaggaaggcgaggcagaggagtctttaaggctgtttgacaagatgcttgagagagggatagaaccagatgaaacaatctatatgtcactcattgaaggcctatgcaaggagacaaaaattgaagctgctatggaagtcttcagaaagtgcatggagagggatcataaaacagttacaagaagagtattaagcgagtttgtcttaaatctatgcagcaacggtgagagagaacaaatatgtcttctagtcttttctaattgcctcatgtcaagatatttattgattcgtttggtgtgtatgtgtgaaggccattctggtgaggcatcgcagctgctgcgcgagagagaacacttagaacacacaggagcacatgtcgtgttgctgaaatgtgtggcggatgcgaaagaggttgagattggaattagacatatgcaatggatcaaagaggtatcgccatctcttgttcacacaatatcttctgacctgttggcgtctttctgttcatcatctgatcctgattccattcttccatttattcgagcaattgagaacacatggttgcacctatagtcaatgagagtagattgttctcactgctgtaaaaatcaatcgaattgtgcatactgacctacttcaaagatggcagctagtcgaaaggtctgactggaacctacgctaacggatctgacttcgactctactgaattgctagcatatagggtgcattgcaatactggcaagtatttggaattttgttgaatgcttttccttggactgaattctgttttccagttttgtttttacgtcaatgcgattttcaaattacttttcatgatatatggtgtgaaaccatactgatactaaataaaagcttgtagctatctaacaactaatgttctgtaattgttgattgcttgttgttaatcaatttcctctttcctcttctccccaaaatgaaagatacaggaaggtgtttttctgttgacctgatatgcatatattagttttggcgttttctcttactggattcaaaatgttacaaattcgcttttgtaaatatctgatgcctgtttaaataatgtttcattgtagattgccgaaaaaatctttgtgggtattttgaagatttgtttaatatctattgtatggcgatcaatggcggtggtggttataaagtctctgctgaggattcactaaatctcgttgaagctttagggtatggattcaactgaatgatggattagatctcatttgtgtgttattgacatctctaaaatttgattgtgcagtatggttgttaccgaactgcctttagatcaggccaagggcgctcttgaaaaattatgcttttcagccgcctctcctctagaggtttgccatcttgactatttgcatggttgtttgatatactgtcaagacttataatgatgggaactgtgaatctgtgaatcaggaagcggcgaaagaagatttggagaagaagcatgcacgtgaattaactgttcatattgaccgatttgccttcctcttcaggtttgtgtattaatatctcaatgatgcgatacatctccatgtgttttgtttagtgttactaacaaatgctaccacattaggtatgtgaaccaccctgaagcggtggctgctgagattaataagcattgggcaattttccgagttatttttgatgcgtaagtgaatctaggcgcatgatgattaacatgttctcttcaaattgcttttatgtggcctcttactttgaaatggtttttactgcagtcgtccttgggacatgaggactatggaatctctatgcagggcatgcaaatatgctgtgagattcatttcctttttctttacctacttccttcctggacattcctgaacaccattgttttgtttgctagacattccatgtctatgaacataagagaaaatctaaaactatatgtcggatgacaattttgatagaggataattcactaaaagaaggcaatgattgtag

SEQ ID NO: 149584 - DNA, 594 bp, Arabidopsis thaliana landsberg
gagcatttggagagcaatgagggagaccttaatttgcttgtttttgtaccgtatgtctgttatttgcttaattaccgaccagttacttcaattttcttctaatattattggtttggatatatgaatatagtgtatttcagatcattgacttgaaagaagcttgggagaactagatacagtccatgttttcttactattaaattgtttactactttttggatgtcccattattgtagatttacatcagacgtcaagatcaagagcatatcaattgttggtggccctgaaggaacaagtccttctaagttgagagtgtatgtctaaactaccttacagaacttttcctgtatacatgtgtgaattctgcatatggttccttcattagagaaagacagaaagctgctttttttttgtctcaaaactaggtttatcaatcgtgaagggattgacttctccgatgctgagagtatgcaagccgttcaggtattccgttgtgattatttttacttaaatattaaatgccaaagacaattgcactaatgcagaaacatttgtgagttcttttgaaggaatgggagttagctgatagtttgc

SEQ ID NO: 149585 - DNA, 745 bp, Arabidopsis thaliana landsberg
caaatttcactcctcagaagctggttaggtatgctcatataatcatttcccattcaccaataggttgattagatagatactcatttcgttgatacaaatttatggcactcaattgagcatgggaacacttattcgatgaaattagttggcaggagtaatatattcactatatttctgtaaatgtgctttgtgtgcagaggattaggtccttggggtccaggtcttgtaaatcggtatacaactgcaagatttggtgcacattcggagggaactgggctaacagaagaggaagccaaattgctaaccggtaagtaattgtttctttaagttccatagaagttatggagagtgataatgcaatcgctgatagtgatggttcgttttgcaatgtagattatgtgtaccatactttggctgcaaaggctagtggagagttatgcttgaaatacatcttctcatttggagcatttgctaggaagcccctcttacaaaggtatgtccaccaaaaacattgctgataaagtttctgcatactcacactcgatgactcctcttttgtgtgcagtgcatcagagtggaaagtgccaacaacgtttatctatggaatgaatgattggatgaactatcaaggtgcggtggaagcgaggaaatccatgaaggtcccttgcgaaatcattcgggttccacaggtaaatctctaaacacattcatttgttttctcatttaagaggtgaatatagagaag

SEQ ID NO: 149586 - DNA, 546 bp, Arabidopsis thaliana landsberg
cgcctcctccgatccattttgatttctccctctcttctctctagaaacatctttcatgcgttatcttctccaaaagctctgattctgattctgaatcatcctgaaaaaaaacctagaaaaattcatatcccacaaaatcttctaagatccatggccgtaattatccctcgttcagatccaccttcacgaatccatccggaaccaccacaaaccctagaaatcgaccatttcgatcatcttcctgactcaatcctcctcctcgttttcaacaaaatcggcgacgtcaaagctctcggaagatgctgtgtcgtttccagaagattccattctctcgttcctcaagtcgataacgtcgttgttcgtgtcgattgcgtaatctccgacgacgattcgtcatctttgtcatctatcaaatctcgctccggttcttccgctggttcgttctcggctatatttcgtcttgttgttgaaggcattgttaaaccgttacaagctttaggtcaattccttggtacgaagagatcatcatcatcatgtggtggttct

SEQ ID NO: 149587 - DNA, 866 bp, Arabidopsis thaliana landsberg
cgcaaactgttatactccgccgtatattcgcatctgggtcacacttctaaaccctatcatttgacttaagattcgatttctgaagatctgggtttcttaaaagtctttcctttttgttgggatccaaacaacaaaagaaaagaaagcagagatgaatattggtcgcctagtgtggaacgaggatgataaagcgattgttgcgtcattactgggcaaacgagctctcgattacttgctttccaactctgtttccaatgctaatctcttgatgactctaggaagcgacgagaatctgcagaacaagctctcggatctcgtcgagagacccaacgcttctaatttctcttggaactacgccatcttctggcagatttccaggtcaaaggccggagatttggttctctgttggggtgatggatattgcagagagcctaaagaaggagagaaatcagagatcgttaggattctaagtatgggaagagaagaagaaacgcatcagactatgagaattagtttattgcaaaagcttcatgatttgttcggtggctcagaagaagagaactgtgctttaggactagatagagttactgacactgagatgtttcttctttcttcaatgtatttctcattccctcgaggtgaaggtggtccaggcaagtgttttgcctctgctaaacctgtttggttatccgatgtcgtcaattcgggttctgattattgcgttagatcgtttcttgctaaatctgctggcattcagactgttgttttggttcctactgatcttggtgttgttgagttaggctcaacttcatgtttgcctgaaagtgaagactcaatcttgtctataagatcattgtttaccagta

SEQ ID NO: 149588 - DNA, 253 bp, Arabidopsis thaliana landsberg
ccaaaatccgatttccccatacttagaggtcaagagaaataaaatatttttccggcgacgaaatggcttcttactccggttgtttgttcgtcgttactttggcagttctgtcacaatttctattagccccagcttcagccttggtcaacagggaattcatcgattccaattgccagagagtcaaaaacaaagccttctgcatccaaactttgaccacctatcctcctgccgctgctgcctccggcctggtact

SEQ ID NO: 149589 - DNA, 1198 bp, Arabidopsis thaliana landsberg; identical to SEQ ID NO: 44276

SEQ ID NO: 149590 - DNA, 721 bp, Arabidopsis thaliana landsberg
atcgaattcgcgaaagttgatgttaaggaccctgagaaccgggaagagtgtggaacacgacggtgtttccgttggagagatcgttttaaaaggcggttcggttatgcttggttactacaaagaccctgaaggatccgcagcgtgtatgagagaggacggatggttctacagcggagacgtaggagttatacatgaagacggttacttggaagttaaagaccggtcaaaggatgtgatcatatgcggaggagagaacataagtagtgccgaggttgagacggttctgtatacaaatccagtagttaaagaagccgcggtggtggctaaaccggataagatgtggggagagacaccgtgtgcttttgtgagcttgaagtatgatagtaatggtaatgggttggtgactgagagggaaataagggagttttgtaagacgaggttacctaagtatatggttccaaggaaagtaatttttcaggaggagcttccaaagacttctactggaaagatacagaagtttcttctaagacaaatggctaagtctctgccttaaagattcgcttgagttattgaggatatgaagaagaatctccaagaatgaagtaaagaatgacatttattttgtgttgtattattgttgtacccttaagaagggattagtttccaaacaagcttgctactattttcataagaaactatatgaagaactattcagaacaga

SEQ ID NO: 149591 - DNA, 481 bp, Arabidopsis thaliana landsberg; identical to SEQ ID NO: 8322
  unsure (1)..(481): unsure at all n locations

SEQ ID NO: 149592 - DNA, 1225 bp, Arabidopsis thaliana landsberg; identical to SEQ ID NO: 16961

SEQ ID NO: 149593 - DNA, 685 bp, Arabidopsis thaliana landsberg
ttatctagcttggagacaagtcgactgtgagtatacttgtcttataaatgattcacttgtcttgtgagattgttgcttgatatcaaatagactcgtagtttgagttggatgctcctttcagcaattttgttttgtcttgcaggccatataaacaatcagtataatacatgtttctggatgcttgttaagtctggaaaaagcaaaactcaatcccaggattacttaaaggtgctttgttcgagtagccaatgctcgctcttagttcattgactaaatggtttgtcacttacatttggctctgtttcagggtacccagacacgagaaaaaaacgagttactaagccagcaatttggaattgagtataattcattacctgtaatcttccgcatgggttcttccgttttccgcctaaaggtgctagttttatcatcatactccaacatttctagtgtttcatagcagattcttattatagtgaagaacaaaaaagggtccttttaaggtgtctgtgcagagattttaaacaagtggtctgaattagtttttcaatttagacgcaggaaggtgttacagaggagaatggagaagtttcaggaaagcaagtggaagcagaagtggtcgtagactattctaacattatcgaccaatgtttctggcaaaaacatccgcacattcttagctcct

SEQ ID NO: 149594 - DNA, 695 bp, Arabidopsis thaliana landsberg
gtttttcagattggcgacctggccagggatgcgagggtacaagaagtcttaagtttgtcagacttgttgcaagttgaagaaatgtgtgccaagtttgtctcttggatcttgagtatggtcttccagttcaggttaaagacacggcgctcaacattagtactcatgattctatcccaaaaagtgatgtgaaccgggagtttttcgctgaagagcatgatcgaaaggtatggtgactagttatatttgagtattgattggtttgagatttggctatacagtttgctctactttataatggctttttcaaatggtttttttttcttgtgcagacgagagctggactagattatgagtcttcttttgggaagattcggcctaacgataccattcgtatgcttcaaagaacaacgccatactacaaaaggaaccgagctcatatttgtagtttcttcattaggggagagtgtacaagaggtgatgagtgtccatacaggcatgagatgcctgaaacaggagagttatcgcagcagaacattaaagaccgttactatgggtaagcatacttctaactttcatttcttctattatgtcttgcttttgtatatcatgaaatagagttatggaaattatatcattttgtgtgcctaaattggctaaattgcgtcttatatagttgtattggctgttattttggt

SEQ ID NO: 149595 - DNA, 659 bp, Arabidopsis thaliana landsberg; identical to SEQ ID NO: 9964

SEQ ID NO: 149596 - DNA, 502 bp, Arabidopsis thaliana landsberg
cgtttctgagattcccttcttgttgttgtagccatggacaacgaaggcataggtctttacccgcttcatcgttgcaaaaccattcaccttggttcgttccgtacaatccggatggatcatcagagataaatgtgtggttcttattctctctatgttttctgatgggttttgtttttgttttggttaggtgagacatgctcaagggattcataatgtggctggtgaaaaagatcacagtgcttactcttcggaggattactttgatgctcatcttacccctcttggttggcaacaggtttatctctattatctctgttctgttctgttctgttctgttctgttctggatcttaatgctcttgtaacgaccctgttgtcatcatcatctctttatgacacaacaggttgataatctaaggaaccatgttcgtgcagctcaactcttaacaaggttgaacttgtcattgtttcccctatgcttatgtaaaacggtttacaatgtt

SEQ ID NO: 149597 - DNA, 739 bp, Arabidopsis thaliana landsberg
caaaatatggcaccagctcaaaaccaaatcacttctaaacacgtggcagtgatcggagccggaccagccggtctcataacgtctagggagctccgtcgtgaaggtcacagtgtagttgtgtttgaacgggagaaacaagtcggtggtctatgggtttacacacctaaatccgattccgatccacttagccttgaccccacccgatccaaagtccactcgagcatctacgagtctctccgaaccaatgtcccgagagaaagtatgggtgtcagggacttcccgtttttgccacgtttcgataacgagtcaagagacgcgagacgttatccaaatcatagggaagttcttgcgtatattcaagattttgctagagagtttaaaatagaggagatgatccggttcgagaccgaggtggttcgcgttgaaccggttgacaacgggaactggagggtccagtcgaaaaactccggcgggttcttggaagatgaaatctatgacgccgtcgtggtttgcaatggtcactataccgaaccaaatattgctcatattcctggtaaaaatattaatttataaatactcaccttttcttttaataacagtgtaaaagttaattgagaataaccaaaaatgtgtatccataggtataaaatcgtggccaggaaagcagattcatagcccacaactattgaggttctgatccattccaaaaacgaggtaatttttttttttttttttgtaa

SEQ ID NO: 149598 - DNA, 1456 bp, Arabidopsis thaliana landsberg
tacatcgtagtagctaaagtaaatatgcttctatttagtccaatcaaccaagaacttgtcaaaactttatttttgatctacaaaaagactcaaatgcatttatgatttttaatagtctagagcttgtatgatcagttgtcagtttgcaacatctacatagtacttacacgcacttatatgcatgaaaattgtggtacacactatatatagttagcttaactaatgatattgacccatgtttttgtgaaaagggttacaaggagaaaattgtggacataagagaggagatactgaggaagagaagagctggaaaattaccaggagacaccacctctgttctcaaatcatggtggcaatctcattgtaagtggccttaccctactgtgagttccctctttctacttcttcagtcactggcatgaacacgcctagtgggtctttacctagttctgtcccgaaaatctttgactacatcattttagcaacttcatatgctttctcaatctcctaagttttaaatgaatcatgtaaattttgacaggaggaagataaggctaggttggtgcaggagacgggtttgcagctcaaaaagataagcaattggttcatcaatcatagaaagaggaattggcatagcaatccatcttcttctaccgtctcaaagaataaacgccgaaggtactttgcaccaacataactttataggaagagtatccaagataggacaaaatatgatcacacgataagatacaatctctgaaatatatatatgttaggtgtgacaaagtttagcttgtttatgtatggttagattaatgtttagttacattttcaagatatatggagtcattaaatttggagggttttctttatgaagcaatgcaggtgaaaacagcggaagagaccgttgagatcaagcttgcatgtagagatccaaaagctttatagaaaggtggaggcatgaagacaaagaatttttacacaacaaacgtaggacgtaattttgtgccagtacatggtatggctttcatatttggtaatgattagggccacacaaaattaaaccccaaagcatgatttgtaatatgaggttttagatggactttatgataggatggtcagtcttcaatgccatctccattctccaccatcaatccatcattatatcttgtgaataacatggaaatttctcgttatgcatttaatttgtgcaatcattggccgtaatctacacaaatatacatattaatttagcttgaatatattttctcaattaatggtttcaatttttttgttttgttttgtgagtggaaccactttttatgtggaattgttaaccctaatgccaaaatttaaactatgcgaaggtcgccagcaaacgaaagaaagagattatctccgccgttgtcaaaattattggaagggattataaagtttatcaaaaccggcgcctctc

SEQ ID NO: 149599 - DNA, 1659 bp, Arabidopsis thaliana landsberg
gtgccttcttatggctactgtggcgtattgagtcctttgcttgctaatgtatgtcttaatgagttggatcgatttatggaagcgaagatagttgagtattttagtccttgtaaagatgattcaatatggaaggaatctattgaagatggttgccataatccagcctggccggagtttgttccatctagtgggaaggagaaaactaggaaaatggattacattaggtatgggggacattttctgattggcattagagggcctagagaggatgcagtaaagatgcggaaggaaataattgatttttgcgatagagtttttggtgtgagattggataattcaaagttagagattgaacatataagtagaggtattcagtttcttgaccacataatttgccgaagagttatttaccctactctccgttatacaggaagtggaggcagcattgtgagcaaaaagggtgtgggaactttgctatctgtgtctgctagtttagaacaatgtatccgccaatttaggcggcttgcttttgttaaaggtgacaaagatcccgagcctttaccttgcaacccaatgctttattcaagccagtctcatagtaactctcagatgaataagtttcttgaaacaatggctgattggtacaaatatgcagacaatcgcaagaaggctgttggattctgtgcttatgtaattagaagctctttggctaaattgtacgctgcaaggtatagacttaaatctcgtgccaaagtgtacagcattgcctcacgggatcttagccatccattaagcgagagtagcaataattctgcacctgaatactctgatcttctgagaatgggactcgttgatgctatagaaggagttcaattctctcgcatgtctttgattccgtcttgtgattatactccattcccaaggaactggatcccaaatcatgagcaagttttgcaggagtacatcaggctacaagaccctaaattcttctgtgggttgcataggtcaataaaacgcgagggtctaaccttgccccaggatgagatctcagaggctgtgtgggatttcaagactcttggtgcttggagatcaaagtatgaaaataaaagagaagcagatgatgggttgcagaaattagactcaccaacatgattgtctaccattacctcctttatttggtgtatctggtacaaggatcatgatacaccagagactgagagttatagcggagaatttcatcgctattcttttttaatccccttcttcgcaagagaccctgattctggatctggcttccttacccagcaaatcattgaacttggtaatctaactctatacattgtctcacttcatagatgttttcccagatgtgagtattttactgacgtaggttatgttaaaaacttcggaaaatgtgcataagcattatgtcttccttcaccagatttccaagttttaactttagctagaatcctaggatgtgtaagctgtttgaagtgaatcgtttctgttgtttgtttgatccatctgattgtttagatttagtcgtgtcatacatcaaggcatgaattgcagaacctgtttatttactgtgatgatccataagcaattcattgtaagaaaggcgtgtccttatgatatttaatgaaactatctctt

SEQ ID NO: 149600 - DNA, 432 bp, Arabidopsis thaliana landsberg; identical to SEQ ID NO: 76800

SEQ ID NO: 149601 - DNA, 1105 bp, Arabidopsis thaliana landsberg; identical to SEQ ID NO: 33594
  unsure (1)..(1105): unsure at all n locations

SEQ ID NO: 149602 - DNA, 326 bp, Arabidopsis thaliana landsberg
  unsure (1)..(326): unsure at all n locations
accacaccaagaggaaagaaaaataagataccactcaccaaaaacttcctcaaaactaacaaatggatactaataaagcaaaaaagcttaaagttatgaaccaactcgttgaaggccatgacttaaccactcagcttcagcaactcctctctcaacccgggtccggtctagaggatctagtggctaaaatcttagtgtgtttcaataacaccatctccgttcttgataccttcgaacccatctcctcctcctcatccctcgccgncgttgagggatctcaaaatgcttcatgtgataacgaccgcaaagttgaagattccggcgat

SEQ ID NO: 149603 - DNA, 174 bp, Arabidopsis thaliana landsberg
  unsure (1)..(174): unsure at all n locations
ctgcttatctgtcggcagaccaagccaagaagatgttcgaatcagcctgcgacggtcttaangcttacaccgccaccgttgatcgcgtctccaccggaactatcttctttcaatgcgttntcttgcttctccaaaccacccctgaggtataaaagtcaggacttttcatttcaa

SEQ ID NO: 149604 - DNA, 667 bp, Arabidopsis thaliana landsberg
caaaggccaaacatataataacaacaacttctcttctttactcgtttctctctctctcttttcttctcttttcttcaagcgcttctttaatggcggctgttcaatgtctcactttcctcttcttgtttcttctccaaaacgcgacgtcagcttcacctctccctctcttccggcggccgatccaaagcaaccacagcaacttcgtgaagcatcctcgccgaagtcaggtggttttcccggtgaatcatagtagttgtgatctgttcgccggcgagtgggtgcgggatgagacttacccactttaccggtctaaagaatgcggccgaggaatcatagatccgggattcgactgccagacttacggcagacctgactccgactatctcaagttccggtggaaacctttcaactgcaatgtccctaggttatttaaactcactcacttgtcactagctctactttgttagattaatttggttaatgttaattttagttgtcttgtttttgaggaagaaatattcattttattgataccgaggttataatctgacatccaatagtaaaacttatgctttggcaaatgaatttttggtagggccactataccaaccaagattgtaaatttgattactttatgaaaaagacaaaaacaaattctagctggtta

SEQ ID NO: 149605 - DNA, 3469 bp, Arabidopsis thaliana landsberg
  unsure (1)..(3469): unsure at all n locations
actaaagccaagatttttggtctttttcagggcatgtcaatgttgctccccgccatttgacttcagaatctgggactttgctttcagcaaccctcattcacgaggttatgcatgtccttggctttgatccgcatgcctttgctcattttagagatgaaaggaaaagaagacgcactgaggtatgttatgagtatctaatgtcctcctaatccagagaagaagttagctattattaacatgcctcgggctttttctttttcgtgtttcattgcttatttatatggatgagatgtctgaactttctatacgagctaccttgtaataagccattcttttcatgtttgaaggtcactgagcaacaaatggatgaaaagctgggccggttagtaacacgcgtagtgcttccaagggttgtcatgcattcacggcatcattacggagtgagttcaatgtcttttaattacttcattcttaggaaccaatgaatctttgcaagttaatttctatgactttagttttctgtcctgtagtcataagaatgtcaaattgttcaacaggcattttctcaaaacttctcgggattagaacttgaggatggaggaggacgtggaacatcgggttcccactgggaaaagagactactcatgaatgagataatgactggatcagtggacacaagatcagtcgtttcaaaaatgactctagcgctattagaggacagtggctggtataaggctaattatagcatggcagaccgtctcgattggggtcggaaccaggggactcagtttgtcacatctccatgtaacatgtggaaaggtgcttaccattgtaacacaactcaactatctggttgtacatacaacagagaggctgaaggttactgcccaattctaagctataacggagaattgccacaatgggcccgttactttccacagcctaacaaaggtatgtcctgatgattaattggaacatgctgatacgattatctagttctttcagtttttatttatactatatattcttaggttgttacctgcttcaacatgttaatttgatacgcaaaatatatatttcttttgccttggttgtatagtatataccaaattatgcaatcctgtagtcgtttcttgtttggtaaagactaatgaatttcatacctacaacgattgcaggcggccagtcttccttagcagattattgtacatattttgttgcgtattcagatgggtcttgtacggatatcaatagtgcacgtgcacctgacagaatgttgggcgaagtgagagggagtgaatccaggttatttaacttaactttatcactgaatgtttgtaaatatccaaatggaatattgctcatgaaagagtttgatttatatataggtgtatggcctcatctttagtgcgtactgggtttgttcggggttccatgacacaggggaatggttgttatcaacatagatgtagaaataatttgttggaggtatgtcttctacgtcttcttctctgtcctaagatttcattttattttagtttttaaatttgggtacaaacttttatagatgtaaggcagttttcagaaaccacacaagtcatagtgccatcagtcctatttcaacttgtttttatcttgatacatggagatgaggagatcatgcttttatgctttctcatggcttcactagtaatgtttttcatgtcctccacaatgccattctattaggttgctgtggagggagtatggaaattttgccctcaagctggtggaccaattcgatttcccggttttaatggtaaaaattgctctttatcttcctaaaagaataataacatattgctaccaaatcttttgaaccatgaatgttttggttttgtaggtgaattaatttgtccggcttaccatgaactctgcagtacatccgtagtttctgtacttggtcagtgtcctaattcttgtaactttaatggagattgtgttgatgggaagtgtcgttgtctccttggttatcacggtcatgactgtagaaaccgtaagtatcctgtatcattcacactaaattgttgcttgtcaagcctctatctttccctaagatctgaacttagaagttatgcttttcaccatgcaggttcatgtcctaataattgcaatggacatggaaaatgcacaactcagggtgtatgcatatgtgaaaatggatttactggaatcgactgttccactggtaactatccacatttctatagattgtgtcaagaatacgtttatcaatattatatctgataagaagtttcttttcaactatacagctatttgcgatgaacaatgcagcctacatggaggagtgtgtgataatggggtttgcgagttccgttgctctgattatgcaggctacacatgtcagaacagctctaaactagttacaagtttattggtgtgcaaagatgtattggagaaagacatgtcagggcaacattgtgctccaagagagcctagcattcttcagcagcttgaggaggttgtggtaatgcccaactacaataggctgtttccgggcggggctcggaagttatttaacattttcggtaacagttattgtgatgaagcagctaaaagactagcctgttgggtgagtaacaatctcttgggatttgtagagttgtctaagtttctccatgattataggcaagagactagcattttctgatactgccatttgttctttatgatctctctgtaccagatatcgatccagaagtgtgatatcgatggagacgacagactacgagtatgccattcagcatgtcagtcctacaatatggcgtgtggggcttctttagactgctcagatcaaacccttttcagcacggcagaagaaggtgatgctgaatgtacggggtctggcgaaatcagatcgccatggtttagcagtttgtggagtagattagtagcaagttaactaggaacaattcatctgggcgaaagaaagattgtgtgtacaaggtagatagtgaggcagagtattattttccaatctgtaatttttatagggtttatgaggagacgtaagttaggggtcttgccttagcccacctgttagatgaattagagtatctttgtctgtctttcgagtgcggtgccnctgtgtctttgtctntnttnttntaggntngtttgggttttttcggccgtgggccttcctcgagcatgcnccaaggggccgtctatttgtttgtcttcttcttctaagctctctatatgtgtctctaattcattcttcaagctcttatgtttttgttacgcttcttagactctagaggtgcactttgtagttggaggacttgttcctcaacagcaatcgctagataaaagttgtcccggtcactcttttcgattggtcgcttgtgatgttgtgtacattagagtgaggaccattgatgatctgcaagtgtttggcaatgtctag

SEQ ID NO: 149606 - DNA, 698 bp, Arabidopsis thaliana landsberg
aagtccacttgccttgaatcattgtctttaggagtgcctggtgttaaaaaggaagatattaaatgtgttctaagccatcctcaggttctcctgctcccttcttcttcaggcgctgctaagttcacttgttttgagtacatttcgtttaattttttccttctctccaggcgcttgatcaatgtgtgaattcacttaacaatttaggcatacagagaatttctgcaaaagatactgccactgctgctcaggtgatagctcgaaagaaagagtgtttttttagttcagttcacatatggatttgactaaacattacacgtttcttcagactgtttcttcaagtggtaagatcgacgtaggagcaatcgcgagtgtacgggctgcaaatatctatggtctagatattcttgctgagaacatacaagtaattagtctccatcctcttctttactaataatgttgtctcctacggaaatatattaacatattgtaatgcacatcattgggtaaggtggaatgatttatgacatagaaggaatgtaatgatacatatcaatatccgttatctttaagttgatattttgttctttcgacggttttcaggatgatgttaacaatgtgactcgccttctgatacttgcgagagagcctatgattccaaaaacagatcgaccatataaggtaatcacatctttatgtac

SEQ ID NO: 149607 - DNA, 647 bp, Arabidopsis thaliana landsberg
cactcctattggtgttgacttgtttgtctgtccaaggaagattgatcatatcgcccaacacatcgagcttccaaacatcaaagccgaggcaaagctccctgctcttcttgttgtcaacattcaggtaaccaccactcaacattaaccgcttcgtaatctttgtttgtggactaacttttgcttgtgtttttcactggcagttaccaacctatcctgctgcaatgttccttggggacagtgatggagaaggcatgagcattgtactttattttaaattacgagacaattacgaaaaagaaacctctcagcaatatcaggagagcatcaaggtagcttgaaaagccattcctttatgacattcatcacatcccatgactgatctaaatgcttaccgagttctttttgttttcggtttcaaaacagaaacttgtcaatgatgagatggagaaggtaaaagggtttgctaaagacagcaacgttgctttccgtgaaaggcttaagatagtagctggacttgttaaccccgaagatctagctctaagctcgactgaaaagaagcttgtacaggcttacaatgcaaaacctgtcctctctcgtcctcaacacaaattctttaaggtttgagcacaccatcactacctcttaaa

SEQ ID NO: 149608 - DNA, 1986 bp, Arabidopsis thaliana landsberg
tggttccttttgtccattgtttgacgctggacgcaattgttggacatgagcccaactcggattagcaaacgtggaggaaagcgtttcccagatctccgcagatgtgttcgccttcgagagaagaggctgaacagagagagatatagcaccaagcagagcactataaatcagcttgtcttgtcgcttccaaagtgtatagtcgttgttggtagtgacaacgccatcagcagtggtgcgagtcggggttgggatggggatagatccgtcgacgtagccggctagatcataaccatcaagtagggcgtgaacctgacgactccacataacaaagttggaatcggtgaggcgggtgacgttcgtcatgttgacattcagcaaggtggaagtggagacggcgatggtctcggagacagatactggggaggttgaatcagacatcgtgaaagaagagagagaaaaagagagatggaaaagagaagaagaaagagcggcggtagggaatttttttttctttttttttttctttagatttaggtatcgacaagctctgataccatgtatgaaatgaggctcaatagtttattacatagatgtttgtacaatatatatagtgattacaagagtaattaggtatctataatttacaattatatccttagtcatttctcccttacaggctgatgctattagtgatctgccaccggtgtgtatctaaacttcagaactgccattgatgattatgttacaatatatctgtctgatcactgctctcttaatgctgcaggtgacaaattatgtggcaaatgatgtgatggattataatgatgctgctcctaagacagagtttgagaactttattagcctcaaaagatctggtgagcattttaaactcgtaaatttggtaggtactactaatccaatactaacgtatcttgtttcagagacactgttacccgcatgtggtggagatccgacacgcaggttgtttgatcaccaacccctcgtattaggagatgatgacttggaaagagtttcctacataccaaaacagaaggtgcgaccttttttaagtacgtgcttcaagcattcaatatataatcatttcttgttcatgtcattgtattcttattgttacagggggcaaactatcgctttttgcctggtgttttagttcacaacaacagaggggaaattaatcctaggtttcgagcaaagttgaaatctggaaaaaatgtggtataaaataaaccactcgcaaccttatcatttttctgctctagtttctttttgcaccttctatatgacatgtcttttggttttcacaggtccctgcttatgcaatttcattcataaaaggaaaatcaaaaaagtgagtttctccaactaatatgcttcttgtggatcttctttccataacgtaagcatgttaaattcattaaaagtaacacatctgttatctgaatttcaggccgtttggtagactttggggtgatgaaattgttaacactgttgtgacaagggctgaacctcacaaccaggtaagcccttttgctttcatttcccatgtgtctgggtacgttccacttagaattctctagtggctggtttattaaaactggttgatgcagtgtgtaatccatccaatgcaaaaccgtgtgttgtctgttcgtgacaatgcgagattacaggggttccctgattgttacaagctctgtggaacaattaaggaaaagtaagtccttggttcttgctgcttttctatctatgtatatgattgtttttgaactggagatcctaatgtatgtaaaaactgggtttgaatctaaattttgtaggtacatccaagttgggaatgctgtggcagttcctgtaggggttgcattaggatatgcctttggtatggcgagtcaaggactgacggatgatgaaccagtaatattaaacgaatcgtcatctcaattatttactaaattaacccagaatcta

SEQ ID NO: 149609 - DNA, 1172 bp, Arabidopsis thaliana landsberg; identical to SEQ ID NO: 25521

SEQ ID NO: 149610 - DNA, 4818 bp, Arabidopsis thaliana landsberg
atggttgggagagtcaaggtcccttgttgttccgtgtgccacacgcggtataatgaagatgagagagttcctttattgcttcaatgcggccatggcttctgcaaagattgtctttccaagatgttctctacttcttccgacacaaccctcacttgtccccggtgtcgccacgtgtctgttgttgggaactctgttcagggtctcaggaagaactacgctatgcttgctctcattcacgccgcatccggcggcgctaacttcgattgcgattacacggatgatgaggatgacgacgatgaagaagatggtagtgatgaagatggagctcgtgccgctcgtggatttcatgcctcaagctcgattaatagcttgtgtggtccagtgatcgaggtcggagctcacccggagatgaagctggtgaggcagattggggaagagagtagtagtggtggttttggaggtgtggagatgtgggatgcaactgttgcaggcggtggtggacggtgtaagcaccgtgtggcggtgaaaaagatgactttgacggaggacatggatgttgagtggatgcagggacagcttgagagcttgcggagagcatccatgtggtgtaggaatgtttgtactttccatggggttgtgaagatggatggatctctttgtcttttgatggacaggtgctttgggtctgttcagtctgagatgcaacgcaatgaaggcagacttactttggagcagattctaaggttcctcttttgcttctcttattctttttttttgcctagtatctggcttttactgtgatcgtttctgtgcttaaagtctcaaactttgatagcctgttccctaattagaaattactggactagacccgacttggttttttgtgattgctattagaaatatatattggaagtgcacagtttttcagattttagtgaaacaagcaactaaaacctggtgtcatttgccaaaagggcaacttgtaagataactttagtttagatgttcttaaaaagctaggcacgaattatagtagttgtcatctctctttgtcattaccagctgcagctacttttcatctgtcaatgcctcaatagacaaacattttttggactagtcctttcctttttagtagtggatccttgaacctacgtttgcaagatatctttgagaaagccctttacattagtatgcttccttctaaagtatatgaccagaaatcatttttcaacgaactgacatatcaaatcatgcaaaaaattgtacgaattgttatacattaatttatcaaaggacgcatcatctaaagatgatccttattttgttgtcctggttctaatattaccttcaattcacttgtttgtatttcctcctattttctgtttttaactgaattgcgtcatttgggactattaaatgtaagcactaatgcgtaaatgagtgttttgtattctcctttcatatcgtgctcatgttgttttaagtttacaacttagaatattccttcagtgaccaacatatgtattattccattgctcttgttgtgatattaaattttaccaactgtagatatggggctgatgttgctcgaggggttgcagaactccatgcagcaggtgttatctgtatgaatataaaaccttccaatcttcttttggatgcaagcggcaatgctgtggtttctgattatgggctcgctcccatcctaaagaagccaacatgccagaaaactcgaccagagtttgattcctcaaaagtcactctatacacggactgtgtaacactcagtccacactacactgccccagaggcttggggaccggtgaaaaaacttttttgggaggatgcaagtggtgtatctccagaatcagatgcatggagttttggctgtacgttagtagagatgtgcactggatccactccgtatgtgaagcctcttcctagttgatatttcagttgtgttttgtgtctgccattgtactaactgtcacttaattttacaggtgggatggtcttagtagagaagaaatttttcaagctgttgtgaaagcccgaaaagtaccaccacagtatgaacgcatagtgggtgtgggaattcctcgggaattatggaaaatgattggtgaatgcttcagtttaaaccgtcgaaaagaccaacctttaatgcaatgcttgctacatttcttcgtcatctacaagagataccacgtagcccttcagcaagccctgataagtaagagttttaagtccctaagattactttgttttatggagtccctgttttcgttacttgtcagtaaagaagaccctttcacttgtgttaagattaatattagcaccaacacctaagattatttttgtcatcatggctatattccttcgcctaacaataatataaaccatgtatgatgtagtgggattgccaaaatatgtgaagtaaacattgtacaagcacctcgcgcgactaacataggggtctttcaggataaccctaacaacctacatcgggttgttttggagggagactttgagggtgtaaggttagtatctgttaggaattctagttaatccttttgttcgcactagctataaacaacctgttctcaactacattggtttgatttttgttttggagtagaaatatacttgcaaaggctgcagctggaggcggtggaagctctgtgcgatctctattagaggcgcaaaacgctgatggtcaatcggctcttcacttagcttgcagacgtggcagtgctgaacttgtcgaggctatactggagtatggggaggctaatgtagatatcgtggacaaagatggggatcctcctcttgtctttgctttagcagctggatctccacaatgtgttcacgttctcattaaaaagggggctaatgtgaggtccagactgcgggaaggatctggcccatctgtagctcacgtgtgttcgtaccatggccaacctgattgtatgcgtgtaagtctctgctcccgaggaagctatcagtcactttaaagcttccacaacatgatcgcaaatcttccacttatgtgaagtgtatcagatattatgcttgtcttatatctattatcatgttaataactattctctgctaattggtactatcaataggaattgctggtagctggagccgatccaaatgcagtggatgatgaaggtgaaactgtgcttcatcgagctgttgccaagaaatacacagattgtgccattgttatattggaaaatgggggatctagatcaatgactgtttcaaatgcgaagtgcctgacgtaagtacagaaatgacctctttctatgctaggtagacgggaccataaaatttggcacggatagattactactgggccattttaaagcaatttctgtttggttttattttgtagttcttatactcctatttgcatctacattataacttattttgagcattgtatgtgcttaaaaatgtctactacattaacctgtttggataagtcacaatgaggtagctgaaccatttaatgtgtaccttggttcttttctttcttaggaaagtttgtaaacctatgtttctgatgttttatgctacagatctttatacttttatgtttgtttcagaccgttacatatgtgtgtagcaacatggaatgttgctgttatcgagagatgggttgaagtttccagtccagaagaaatttctcaggcaattaatatcccaagcccagttggcactgctctgtgtatggctgcttctataaggaaagatcatgaaaagggtaatgatgaaatcgtagtatctttcgtttggtgaattgcttggtagaagtatgactatatctgatatattttatgaggatctttacgaagttttatctttatttgatgacacgatgattatggtcatctctataagataagaattttttcaagcacatttccaatggtattttatgtagtacatctaaaagatcagttacttgtagttttgcacattaccaaaaaaggatgttatttgaactttttcctgctatttcttacaagagtattgtatcaaagttgaatttattggatgttatgtcattattcgtcttaccatatgaatcagtttacttaacatgtatactgctgcagaaggtagagagctggttcagatattgcttgcagctggggcagatccgactgcgcaagatgctcagcacgggcgaacagcgttgcatactgctgctatggctaacaatgtggaacttgtgagagtaagatgctttcctaccaagaatgtattaccattgatgtttaaacgagaaggatactattatgttttgtccgtgttgatagatatgctgttgtgtagcaccatacatcttaaatccaagggttcaatgccttccctatcaaagaattagatattatatggtgtgaattgaaaattatactggtagttattgagggaatagtgtgccaagtatcttgagagttgatagagttgcatacatttcactcatatcattcattataatttgataggtcattctagatgctggtgtgaatgcgaacatccgcaatgttcacaatacaattcctcttcatatggctttggccagaggcgcaaactcctgtgttagcctacttctggagtctggttcagactgcaatatacaggtaatattgcagcttccctaggtttcatgagttatttgttgacactctcctttactgccaagactatattttcttattatcttggaggcattgtatattcaaaactagaagatgctaagcttaaccatacgtaaggcttgaattttgccaatctgaatga

SEQ ID NO: 149611 - DNA, 1756 bp, Arabidopsis thaliana landsberg
  unsure (1)..(1756): unsure at all n locations
atgatcaagagggtgatacgagatgaccacagcttcgatacacattggaacctcacaagtgacttaacagggagtctcgagagtatatcggttattacatcgaaagggatatgtataccgtttgaattttctctctcggagatttcgttctgacgttgttgtcgtcgttttggagatcgtgaggtcttcttctcttggcgtcctctcttcatggtgtcagttttctatttcattaaacttgaacgaagaaaaacacatatatatttttggtttttgacattttttgggggtttatgacatttgtttttttggatattttctatatattggcaatacaaaagagtttataagctaagcagcccagtttcatgtcccattaggttttagatctcaagtcttaaccgacctacatttaaagggaaaacattaagaaacaatgagagattaatttagtattttcgattgatgcgcctcacactgaaacctgaggcttgtgtgttctgtttctcttcatcttgattcaattcgtttgcagtttcgtagcttgatgagaaaggaatattaagtgattcatatatagcaaagtgtttacatagtaaacctaaaaagagagtaaaactaaaatctcttctctttattcatcaatacaagttgctattaacaaagtttttggttacagcacatattcacttgctttgtattattgtatatactatacaagatgctctacacaacatttactatgacatgaatatgagacaacaaactctttatacataatgatgtagtaatagtaaatgtaattatgtttgagaaagagaaagagagagagagagagacagaggtattaatgtgagtgaagagccgggtgtttctcatgcatggggtacgagcggagtcaacggcttcatggctcaaatttgaaaccacgtgtcatgcgtttgttactctacccagattctgctgattcacagactcactattaaaatccactttttcttttttctctgtgcataaagcagaaaccaaaaataatccaaatatcaaaaaaccaaaaacagaacctagaaaccacaccaaaaaaaaaaagctatttcatcaaacaaacaaaactcacatcacaaatcagaaacaaacaaaaaagaaacgcagtactaaagaaaaaaattataaacaagaatcatcgaaaagaagaatcgaaatcatcaacatattctgtttctcttcttcttttatttttataaaataacaattagttctttgataaaatctgtagaagataaagaattcttctttagaaccaaagaaaatgacggacccccacaccgcccggacgatcgtcggaatcgttggtaagtcctccacaatttactcaaacataaagtttaattcaatcaacaacaaaaacatttgctcatgtctttgtttgtctgttatatgtttaggaaacgtgatttctttcggcttgttctgcgctccaatgtaagcacacatgatgattaaatctttttttgttttgttgcatgcaatgacatatgtgaaaattgtgcagaccaacgatggtgaagatatggaagatgaaatcggtctccgagtttaagccagatccatacgtagctacggttttaaactgcatgatgtggacattttacggacttcctttcgtccagcccgacagtcnnnnnnnnnnnnnnnnnnnnnnnnntggtcttttcatggaactcgtttacgtcaccatcttctttgtcttcgctac

SEQ ID NO: 149612 - DNA, 274 bp, Arabidopsis thaliana landsberg
cttgatctgacttttttttgttcttcgatctgataggaaactcaacgtctgcttagtgaacctggtaatttcatcacttcattcgatccttgttgatttctcacagttgattttagctcaaacagttggttttggtagctggaactattgattttaattctaagttgtatatctttcgaaattgcagctcctgggataagtgcgtctccatcagaggaaaatatgagatatttcaatgttatgattcttggtcctactcaatctccttatgaag

SEQ ID NO: 149613 - DNA, 619 bp, Arabidopsis thaliana landsberg
tctaaggaacaccattgagttggagaaacaccttttacctattctccaagtaacaaaaccattccattcatataataaagtttatgcaccaatagaaaaaatctatctaattaaatctgctttttttgctctcgatttactaggcaaatgaagtggatctctacgtaaacggacatgatcattgcttacagcacataagcagcgtggacaggtagaataaaattactgattagttcgttaattattttcttattaatcaattattgtaacgtaagggtccacgtacgggaggatataaaatgtcaccatttttggttgcatatagtaccatacaatttatgacaagtggaggtggatccaaggcctgaaaaggaggtgacgtgaactacgttgaaccagaagagatgaggttttactacgacggacaaggtttcatgtcggttcacgtttcagaagctgaactgcgtgtagtcttttatgatgtttttggacacgttctgcatcattggaagaagacttacaaggaggcgctttatttcgcttcttgattccaatttaatcggacgtaattgtttatgatcgatgtactatgaaattatcaatatcgtacttcgtcgaa

SEQ ID NO: 149614 - DNA, 805 bp, Arabidopsis thaliana landsberg
  unsure (1)..(805): unsure at all n locations
taaaggaaattagaaaatccaaataacgaatagttaatcaatctcagcagataatgcatccaaaatattctcatcactgatacaaacaccaagaccaagcaacttttagttatagcctactagcaagataagaactttgcaatgagaatgatactacaaaacgtatctgaatcaatcaattccacattggattcgatagttgtttttccaaaatagatctnnnnnnnnnnnnnnnnnnnnnncaaattatcagattccgcattgatcctatcttaattccaaaagctagcttatgaacagatcagtttaccttcaatctgtgattaacggcaggatggatatcaatatgattatcgctctcactcgtttcccctgtctccttctctttctccctcctaacgtacttttcatgatccgataacgcaacattgaaatcaaacgcttcgttcctctcagcgaatcctagcccgataaacgcatacttccctctcccgtcatcgatcctgagaacgaaatacctagacgaatcgagagacggctctacagagttctctctacgtccaggatccacaaaacaagctgcgaaaagatcaccggaattcgaatcctcgaggcggatctcgcatcgatccttgcacgatacgacgcggagtctaccagaccagatcttatcggattgaagccattcgccgcacttgtatccgccggatgtggttcgcggcgggatcttgtaaacggagacctcacgcaccacgagaagtgtatgctcgaatgtttcctcctcttcttcttcctcgaacgacat

SEQ ID NO: 149615 - DNA, 575 bp, Arabidopsis thaliana landsberg
aattatgagctcagtaacaatgcccagtagttaaaatgagctccttaacatatatcatctacgtcgtgtttggggttataatttgctagagggattagaattgataaatggtggattagtctcaaagttgtaagatttatgtgcattgacagtgaaactccatatatcgagctcaagaagaaattaagattgatcctcccataaaatatgttcttttaccaggtacaaccaggtttatgcaccaattttactatgttgtcgtaccctttatttttttttaacccaatgagtgtgtgtatgtggtggttggtgcaggatgatagaagcgaaaactggagaatacaagcagtttcggtttcaccagagaggtttgagagccgtaaagctttgccattagcatggagaggtttataaaaggagaagctctcagaggaaagctcaattccacgctgtgtttttgtgcatatgagtggtttcattggtgcaaaccaaacctatgaaggtgccttagcaatggcaagagcttctttgatggcttagagtcactgcagaaccaaacatcggtttcaatggtt

SEQ ID NO: 149616 - DNA, 649 bp, Arabidopsis thaliana landsberg
tgcagttggttttggtgttagtcttttggggagagagatggggagagggaagatagttatacgaaggatcgataactctacaagtagacaagtgactttctccaagagaaggagtggtttgcttaagaaggctaaagagttatcgatcctttgtgatgcagaagttggtgttatcatattctctagcaccggaaagctctacgactacgcaagcaattcaaggttagcttctttacttccttagtacaagttaatgaagttattttgcattttccttgcctgttagattcctcacttctcttgatcccatgacatgtgtgtgtatatacaattgtcactaatgataatgtctcatcgttacatagtttttgtctctctttttctttttgggtctaaatattagtttctcgatcgatagggttatagcacatgttcaagtatgaagagctattttgaacaatggtttttgatgtttgtttcttcgttttttcaaatcaaacttaatctcttatctttagataggctttagtttatcttacacatattgatttgaatacagacgatatatccatgtaaaacttgcatagcaaattatgatttgaacactcttaacttaaaattattttatttccctcatagctttcgataa

SEQ ID NO: 149617 - DNA, 2081 bp, Arabidopsis thaliana landsberg; identical to SEQ ID NO: 1940

SEQ ID NO: 149618 - DNA, 1840 bp, Arabidopsis thaliana landsberg; identical to SEQ ID NO: 36519

SEQ ID NO: 149619 - DNA, 1133 bp, Arabidopsis thaliana landsberg; identical to SEQ ID NO: 58335

SEQ ID NO: 149620 - DNA, 1502 bp, Arabidopsis thaliana landsberg
ctaacctgcatgcagttaactggaggaagaatcggggaccggttaatggcagaagctgaaacaaatcttgccataaacgttattccaggcttgtcagagtcatatgaagtccaagggagaggagaacttcaacttggtttgtgcttttccagtttgtgtttagtgtttgttcacctgtaaagacggatataaagtatgacacacgccagaaaacacgtaactgtatttatttctctatgccaggtaaattaatttctgtcgtgtctaacaggtatcttgattgagaatatgaggcgggaaggttttgagctctcagtctcaccacctaaagtcatgttagtcacatctctttgtttacactacatactatattcgtcgtataatcagagttagttgttgaggttattagatgttggtagttgtagaggttcttagtgggcttttgaagaaaagggtcttaccagtttatgtcataaagcaatagaagaattcttttattttttaccaagttacctgatttctatgctgttactattacactaaacattacttggttattgtttgttcgactatggattactttttagcctagaaaaactccttatagtgtctttatttctacaaactttgttgtacttcttcgtctgacttctgagcgtttgtcctttatgttcaggtataaaactgaaaagggacaaaagcttgaaccaattgaagaggtgactattgagattaatgatgaacacgtaggattagtgatggaagctctctcccacaggcgggcggaagttattgacatgggccctgtccctggaaatgagggtaggacgagactgtcactaacttgtccttcaaggttagcttactatttttaattacttttataaaatcttgcttgctgctcattgaatcattccccatgaagaaatataacctacgtatacttgtgttctgcagaggtctggttgggtacagatgtgtgtttagcagcgacacacgaggaactggattcatgcatcgtgctttcctaagtatgaaacttttctacttgcatttactgcaactccagtccgctatttatccatctattttctcaatgttttcttctttcataagcatcaattcagttgacttctcttctaaaggaatcatctatgtaaataatatttcttgcatatatctgctaaacacaaattcagcttcagatatcattagttttcttgcaagaggattcatcatagatccaaacatatctgtctggtagttagaagcatcttaggttttacgttttattacattcttcttcaattgattgctgtttgtgtatcgcgttcttgcagcttatgaaaagtaccgaggtccgcttggaaatgttaggaaaggagtattggtatgtctatggcttgttactcttatttcaataagagatcgctttcccttgacttttttccttcataaaaatttgtatgtagtctcaaatttttatttttatttatttatct

SEQ ID NO: 149621 - DNA, 1299 bp, Arabidopsis thaliana landsberg
ttcgaataaaaatcaattgacgagccgtgttgttactttgtggtatccagctcctgagctggtagtgggatccactagttatggagtatcactagatttatggagtgtgggatgtgtttttgctgagattctcatgggaaaaccaatcctaaaaggcagaaccgaggtaaaaacataattcaatttcccgctctttattaacttcaacaagattttatatattgtaaattcatatattatacataacatgcatcttgatatcattgctttaagcttcatttttttctttccatttttgttttttggttttggcagattgaacaattgcataagatctacaagctctgtggatctccacaagatagcttttggaaaagaactaagcttcctcacgcaacttccttcaaacctcaacatacttatgaagccactcttagagaacgatgcaaagatttatcagcaactggtgtttatctattagaaactttactctcaatggaacctgacaagcgtggcactgcttcatcagcacttaactccgaggtgaagcaaaaaaaattcaatttcgcattcctccttttcttttacatctcagtttattttctttctgatttgtctcaatctggtcttagtatttcttgacgaggccttatgcatgtgatccttcttcattgcctaaatatccaccaaacaaagaaatggatgctaaatatcgcgatgatatgcgcaggtcagaattcgtctccttaccttctatccactttgtcgtttcaagttaaaaatctcttaatgcatattcttatacaggaaaagagcaaacctcaagttgcgagattcaggagttggcaggaaacacaaaagaccacatagagcagaatatgatccaaagaattacgctaagttaccaataagacaggttcctccttctctctctctatctgaaattcctctatcagctttattttttgtgtctcaagtaaggtttttaacgtgcaggacacgcttgaggttaagaacataccaaatgaggcattttgagccactacaacaacacatggaaactactacaaagtatctgacctcccaacgaccacaggaccagccagtggctttgcatgggctgtgaaaagacggaaagaacctgataatatctctactcttacctactatcaacccagcttgaagagtcaattgagtggaacaagtgttgcatttgtaaagaacactttcggtttgaacctgaaaccagacaatgacttagtttgtgaggtttagggaaacaactatgatgatgttatc

SEQ ID NO: 149622 - DNA, 770 bp, Arabidopsis thaliana landsberg
aaggaaattcattttcagtaaaaaggttttcattatttcactttaaaaagcaaagatatttaattttaaatatatttctccatttaaaaaccagataccagtcttttttttagggaaaaaatattttttacttaataaaatattttagtaaaatatcgctttccttctataaatacacttcgacctacactattctctaatcattaagcactatacaaacgaccaaaccaagaagaagaagatggtgaaactggagaactcgaggaaacccgaaaacatttcgaacaagaacatccccatgtccgatttcgtggtcaatctggatcagtgcgtttcttctctctcataaaaataaaccctaacggcattgcaagatcataggctcaaaaagaaatcgaaatctccgttttcactaacaaatcagatttttatatagtttttcgctatattgttgcagtggtgatccaacggcgtacgaagaatactggaggaagatgggtgacaggtgtacggtgacgatacgtggttgtgatctcatgagttacttcagcgacatgacgaacttgtgttggttccttgagccagagcttgaagatgcgatcaaggacttgcacggtgttgttggtaacgctgcgacggaggatcggtacatagtggttgggaccggttcgacgcagctttgtcaagccgccgtccacgcactctcttcactagccaggagtcaacctgtccaggtcgtcgccgccgctcctttttactccgtaagtccc

SEQ ID NO: 149623 - DNA, 546 bp, Arabidopsis thaliana landsberg
ccacacagatccttaaatctccaaatttcctcctcagtcttatcattatagacaaaacccttttctttgtaaattttttcccaatctatggaagtgcctagtgaaaccacgaatttagccgatctccggcgaccattggtggttccggttgtctcggagcgtaaacctccggcagacgtcggactcggactagagagtgttttaacggagcgtagccttccgtaccggaggcgcgtgtacttaggggcatgcatagagatgaagctacttttccggttggcacttccggcgatacttgtctatttagtcaacagcggaatgggtatttccgctcggatcttcgccggacatctcggtaaaaatgagctcgccgccgcgtccatcggaaacagctgcttcagtctcgtctatggcctcatggtacgttttaatgtcaacgagttatcagacgcggtgatattattaaatattaatttctgatttttgcattcagtatttaatgggaaaggttcgtagcacgataactagtggagtcaaaaaaaaaaa

SEQ ID NO: 149624 - DNA, 496 bp, Arabidopsis thaliana landsberg
tatataaaattgctttacctatatgtgagctagcaacatttactcatacataccaacagtcaacaatatctcttgttccggcggaaaaatgcccattaatcagaaaattccgacttggtttgccgttccggctgtttttgctgtcttgtccgtaatctcgtatcaaaccttaattgtgccggaaaatttagagggcgccaaaaatgtattgacaatggctaagaccataccaattcctgtcgctggaccggagagcattgagtttgacccaaaaggagaaggtccttatgctgcggtcgtggacggccgtattctcaagtggcgcggcgatgatctcggctgggttgattttgcctacacatctcctcacaggtttttatttaaaatatttacaacgtcttttgtcatcatacatcgacacataatttatctaaaccaaataccaaataagttgatgaaaagtacccgagagatctgggaactcttgtgttgtgta

SEQ ID NO: 149625 - DNA, 493 bp, Arabidopsis thaliana landsberg
tggagaatgcaaaagacgtacaaaagaagatggtacaaacattgagcttgtgacatctccaaacaaccttgatgggttcttgagagaatcagtagtgaacagtactgaaggtatattgatccatgatttggcttactattggccacagtatacaccgataacatcaccagctgatcacgatgttatgctcttcactgcttcaaagagcactggccatgcagggatacggattgggtaagtacaatcttttgcttttgtgggagcaaaacagagaacaagtctcttaaacgttacattcttgttcatttaatttgcagatgggctttggtgaaagacagagagacggctaggaaaatgatagagtacattgaactcaacacgattggggtttcaaaggactcacagcttagagtagccaaggttcttaaggttgtgtcagacagttgtgagaatgtaacgggcgaatctttagagaacggggtatcaaaagggg

SEQ ID NO: 149626 - DNA, 1102 bp, Arabidopsis thaliana landsberg
ggtttattatggttagtgagattattactgaataagggcagaaagtttgataacggctggttagagttaagggaaatcagatgaagttatttttttattttttatcgggtataaattacatgattgctatatcattttactaaattaagaaaaaaaaattccggttgttggacataactaggttttggttcttcttcttcgtttttttcatgttaaagtgtttaattaggttttggttcatttggagatttatgaaccttttatagtctggttaagtctgggtttggtagagattcaataagatttcttgattctctttcaggttatggtctggttcagtctagtttagttcaatattggtttccttgaaggttgtgtaaacgttgtctatatttaagttaatcaccttttaaccaaaaaaaaaagtttatggaccgattagttttttttttttttttttttgctatggttaggtttggatccgaccggctcagttccaactccaagtgtttagaagtagcgctacttttacatgctatatataggttagattataaattataaactggtaaaagattatagatactgcttccaaacttaaaagcttaaacataaagaacacacaaattatgagaaacataaccttctgtagtgttttttaatggttgttatttggtggtgtgaaaaagatattccttggatagaagacaaaaagagaaagtgaatagtgattttgacctatgattatcgtacagatggagaataatcatcatgtgggagcagaagctgagatggagatgtcacctgctggacaaatctccgacaatcttccggtgactctcccactacttaattagccaccttaaatcggcggttgaaatcaaaatccaaaacatatataattatgaagaagaaaaaaaaataagatatgtaattattccgctgataagggcgagcgtttgtatatcttaatactctctctttggccaagagactttgtgtgtgatacttaagtagacggaactaagtcaatactatctgttttaagacaaaaggttgatgaactttgtaccttattcgtgtgagaattgcatcgagatct

SEQ ID NO: 149627 - DNA, 527 bp, Arabidopsis thaliana landsberg; identical to SEQ ID NO: 65425

SEQ ID NO: 149628 - DNA, 1109 bp, Arabidopsis thaliana landsberg
  unsure (1)..(1109): unsure at all n locations
ggatcgggtaccacttaacaaaattactctttcctttttttcttgaaagatgactggagaaataaccaaaagaggacttttaatagggaaactcaagatactgaaggagatgaacaagagacaagaggagaagcaggtagatctaatggacgacggggacgagcagcagcgattcacaacgagtcngaaagggtaaaaactaatccatcttttctctttccgtgattaccaaactactgactctgagttttgatgcagagacggcgtgataggataaaccagaggatgagaacacttcagaagctgcttcctactgcaagtaaggtaaatgtctatcctagaagaacccacttttaagtttaagaactttgtttatattgatatcggtcagtttaaacgcgttattcggatattgcaggcggataaagtctcaatcttggatgatgttatcgaacacttgaaacagctacaagcacaagtacagttcatgagcctaagagccaacttgccacaacaaatgatgattccgcaactacctccaccacagtcagttctcagcatccaacaccaacaacaacaacaacaacagcagcagcagcagcaacaacagcagcaacagtttcagatgtcgttgcttgcaacaatggcaagaatgggaatgggaggtggtggaaatggttatggaggtttagttcctcctcctcctcctccaccaatgatggtccctcctatgggtaacagagactgcaccaacggttcttcagccacattatctgatccatacagcgcctttttcgcacaggtaagaccgcttttaactgttttcgagaaaagtgttcaaacatatacaaatcttgagctcacttccattggccatgctgatgcagacaatgaatatggatctctacaataaaatggcagcagctatctatagacaacagtctcatcaaacaacaaaggtaaatatcggcatgccttcaagttcttcgaatcatgagaaaagagattagtctagcgacctaggattattgatccatatatatagctcttgaaagactgctgtatcatgattgaaaaactgatttgagtattgaaaaagacttgcagat

SEQ ID NO: 149629 - DNA, 415 bp, Arabidopsis thaliana landsberg
cgtaaacaccctttatccctcaattcgcttcttcgggttttattccgtatcgtttttgtggtttttctgagctaagtttgtttctgtatacagctgagggatgacataagggattatgtgagaattttggtgattggtgctggtggattgggttgtgagcttctcaaggatttagctctttctggttttcgtaatctcgaagtgattgatatggaccgtattgaggttactaatctcaatcgccagttcctattcaggttttttctccttcttttgcctctatggttttaccactataaaccctatccattatgttccctgtgtccgtctcttgtgtagtatcttagtaatgtttgtaaaattctctgtgggaattgaaatttggttgattgttgttttaggcttagagatgtag

SEQ ID NO: 149630 - DNA, 189 bp, Arabidopsis thaliana landsberg
atgtggaggttaaagttatcggaaggagacgaagagagcgtgaatcaacatgttggaagacagttttgggaatatgataaccaatttggaacctctgaagagagacatcacattaaccatcttcgtagcaactttactctcaatcggttttcttctaagcatagttctgatcttctctaccgttttcag

SEQ ID NO: 149631 - DNA, 1428 bp, Arabidopsis thaliana landsberg
cggaaaaccctacactctaagcaaaaaataagatctttctctctctgacgacgcaatccctaatttctggttctccgttcgtcggcggagaagatgggattcctttccaataaaatctccagagacgatgtgaaaccaggcgatcacatctattcatggcgtcaagcctacatttacgctcatcacggttcgatctcactcttatctctctctttgtaatttcctttttacagagagatacatacattttacattcatgatgatacgagatgattcaatttccaattttagctgtcgcaatttgattatttgtgcaactgttgagattttgcgaaaatttcaaatttggggaaaataatgtgattctttcgtttgggatccaaatacgtagaaggtttaggaaaatgtgattttaacagctattctctgttactaggcatagctcattctttgatcgtcacaatgcatgtatctaaaattcaaggcctgaatttgataatgtgattagtgagatcttcttggcatcttttctttgttatgtaatctatcatgtaaacttgtatatgtgtatgattttcaggaatctatgtaggtgatggacaagtcaaccattttactcgtggtgatggtcaagagactggaactggaactttcttggacaacatcattgttagttcatctcataatcatggagacaacccatgtcctgattgtggagatcgatccaatcttggcggtgttatatcttcctgccttgaatgtttccttgctggaggtgatctctatgtctttgagtacagtgtttcccctgctatttttcttgccaaacctcgaggcggcgtatgcacaatagcatcttcagatcctccagaagaagtcatttatcgtgcaaattttctcttgcaaaatggttttggtgtgtacaatgtcttcaagaacaactgtgaagattttgccatctattgcaaaacgggtttgctagtggcaaacaccgacgtgggaaggagtggtcaagctgcttcaattgttgcagctgccagtgttcttctttcttcaccactcaggtttgtagcaggttttggtggtttggctgtggctggctatggcatgtactgcaccagtcgcttagtttcagatataggcatgcgatgggatgtgagcaaggtgcctgttgagagactagttgctgatgtggcttgtatgtcggagatggaagctaaaccagaagatgagaagaccacttaatccaaaactgctaacacctgtattaccatactggttgatctctgattgtaaatgttttgaagtaagagaatctgcttctgctgtatcatgttgtgcaacatttgttatgtgattatgaaacttggcttttgattaacactgaactatgatgcttcactttattatatacaataagattgaaga

SEQ ID NO: 149632 - DNA, 543 bp, Arabidopsis thaliana landsberg
ccaacaaacactagtctcttctgatttgtaccctaacgtttactcgacttatctaaagccgtgaacctcgccggaattcttaaagtcgcgatttttccttaacgccgtttgattcccttacggcctttgaggtccaggagatcgcaaatttgttggtgagtactgaaaaatggaggaagagaacgaagtagtgaagacgtttgcagagcttggtgtgcgtgaggagcttgttaaagcttgcgagagattgggatggaagaacccttccaaaattcaagccgaagcccttccttttgctcttgaaggtaaattccttacgattaaatcgttttagaggttcttagttctgagtttaggtgtttgcgagattgtaaaggttgcaactttttgattgttagggtttatcattgcaattaattggaaaaatctaatgtgtttcaggcaaagatgtaattggacttgcaccacccggctctggtagaaccggagcttttgccaatcctaaaatgcaagcactacatgagtatgttatgattctagcct

SEQ ID NO: 149633 - DNA, 1358 bp, Arabidopsis thaliana landsberg
cgattcattacgccaagcaccgtattacaccaaagctcactgatgaagtgagacagtgaactcaaatatataaatttttatgtatctgataatctcttccactaaatctcttttgttattaaatttgcaggcatcggaacgtattgcagaagcatatgcagatctcagaaatgcaggttccgatactaaggtaatttatttcataaaataacattggacactgtatctttttcgtcttgggaacttgtatttgacacaccatcgaaatctctgcagactggaggtacgcttccgataacagccagaactctagagacaataattcgtcttgctacggcacatgccaaaatgaagttgagtagcgaggtaacaatctaactcaaatcttctgtttccccacctggtcgtgaatatgttctattcagattctttctaaagtgataactttattttgaaaggttactaaagctgatgcagaggctgccttgaagcttatgaactttgcaatatatcatcaagaattaactgagatggatgatcgtgagcaagaagaacgtcaaagggaacaagctgaacaagaaagacctccaagtggacgtagaggcaaccaacgcaggaataatgaagatggagcagagaatgacactgcaaatgtcgacaggtaaactaatttgatctcctccatggaaacctatatcacagctttctcaacccttatacttttttctttctcttttgctggtccattcagtgaaacaccagatccaatggaagtagatgaaccttctgtagagcaattcagcggcacggtctctgcagcaaggattgaaacctttgagcgagtgtttgggcagcacatgaggacacacaggctcgatgacatttctattgcagatatagagactgttgtcaacaacaatggagttggcgcttctcgtttctctgcagatgagattattgctctcttagaggtaattcacaaattaagagacaagctttctcattcttttacgttttatacaatttcttcataactttactctattgtggattttatgcagaaactgcaagatgataacaaagtgatgatcagcgatggcaaagttcatatcatttgatcatatgaagaaatcaatattgattgcatcatcatcatcatattagaactaaaaaatagtgtagtagtgaactcttggaaaccaaaatatcattttgtaaaatctgtattcatacgttatgttatttgcatttactagtgaagtaaaactgatgatgaaatgcttaaaaaacgcatctgattacaaaattttggaatttatagcgaaaatcacaatccaaaaatgaaatactttcatcat

SEQ ID NO: 149634 - DNA, 378 bp, Arabidopsis thaliana landsberg
aacaggaaacgattgagaaaatgcgtaaagagattgagtctagtcaggaaaatgcgttaagtttgtgtaccgagaaggttttattggcccgacaagcgtatgatcttgtaagttatatattcctctaaggcttcctcttgctatttaagtatatttgctgctgtgaatgttttgttgtctgtcacgaaaacattgatggatgtgtatgtattaattcaatcagaatctttgttgctaaagtctgaatatagctcctttggttgtttcagccagttttggtgttgtggtaattattatgtttattctggttgtagatagatagtcatgtaaaacgacttgatgaagatctgaataattttgcagaagatttaaagcaag

SEQ ID NO: 149635 - DNA, 556 bp, Arabidopsis thaliana landsberg
gtgctcccatcatccgttggcttcatgatttaagggtaacgattgacaagataaaatgtgagaacctagcgaaaagactactttcgttaatgctgaaactagctgcagtttttcgttatactccgcttgagcttctgagaagccagactacagtcagcccttcaagtccaacagaagatgacagtcggtgcagcctcatctcaccacctcctagagagcccacaatgaaagaccggattcttccatgtttggaacgtattcagaaactggagaaaagttatgaggatattcggaacaaacccgttgcaatacctgtagagaaggagagaatgttgatggattcttagacagaatcaagtcagttgagtttgatctcgacaaaacaaagagggtgcgatgcctttcctgttagttttaaaaccttcaaacataaagattcagtatggactcaaaagcgttttttcattggttgcagcttttacacgccacggtgatgaaacagatggagataactgaaatgctgcaaaatatacgagactcccagcttcacgtaaga

SEQ ID NO: 149636 - DNA, 656 bp, Arabidopsis thaliana landsberg
aattgtataaatgaactgcgagaaagggttgccagtggagttgatccaaacaagttatacgaaaagcaggaagaaaatactgttccttctgatgatcaaggtatgtcaaacagatcagcttttttcccttgaatcttcttttaagtttaagatattgatacgaaaaggaaacgcttcttatgtggctgcataacacttaagttcaatatctgttacattacaatcttgtgggtaatgaatagtcttctgctggtaatctagatatggatcagccaagtcatgacgaagagaacataccatcaaagagcgttgatgctgatacaaatgctgatgcttttgaagacagtatgttgaatgagatatttgataatgcttcaaagttaccgagcgatgaacaaaacatggataaaagcagtgaactgacagaagagcaaagagcacgtatggaagctaatagattgaaggcaatggagaaagctcagaacatttccgaggaacagagagtacgtatggaagctaataggctaaaagctctcgaaagagccaaagcaaggctccaaccaaatcaagattagactagagatgttcaatttgaattttggattgaaaaatttgtgcttttgaatgtttcaattagttatctaatagtaacaaat

SEQ ID NO: 149637 - DNA, 592 bp, Arabidopsis thaliana landsberg
cataacggagatctgcaaagtagaaataacgaaggagagaaagagagtgcatagtcgtgcttgtcgatggcgatcaaagcgggaaaggtgttgagaacggcgactgctgctgcgaggaagttccaacagaaacagttctcagcctcatcttcggcgtttccagagccaccaccggtgtctccatcttccggtgtaggagcatttctgggtattcccaagattattcgctcggaatccgatttattagtctccaagtacatcagaattgcccaggtaacatataatctatcttctgatttctaagatccgtaaccggagtaaataattttgaaacagttcaccacctgttcgatgaaatgtctctttttaagagcgatgaatttaatgatgggtaacttgttgttttctctagggtcgattgacgaagaagggtgattacacagaggagaagctaaagaaaatgttgtctggtgaagacagggtagggatcggtgagaccatgaagttactcgagggtcgcaacactggactagtatcttctaaaaaaccaaactccggtcgatccaaaaagtgattcctctgtttccatcat

SEQ ID NO: 149638 - DNA, 415 bp, Arabidopsis thaliana landsberg
ataaactcttacgtcaaagccaaaaatttcaagtccaagaacatttggaaacaatataacccaaaacaaaaggtagaagaaacttaaaccaagatcaaatccatagaaagaaaacagagtaccaacaacattcatataaaagaggaagtaattcagagggtttcataaacctgaaaagctaataataccatatggtttttcagcatctctagaacagtgtcttcacttgtcttccttaacagatgttgtttcttctgcggctggtgccttctccgtcgcaggaccttcctccttaacggcatcatccttcttgtctcctgattttgctgtctcttctgcaatttacagaaatgtttcattacttataaattctgcattttgttgaggaacaaagaaacacaaaagatatgcaaaa

SEQ ID NO: 149639 - DNA, 853 bp, Arabidopsis thaliana landsberg
ttatgttctgcttgcatttacatttaccagatatagttaactgcaaacgcagctttggtgttttgaaacaaccaagaccaattccaatattttgttgttgactttttatcatgttctgattaggtttgaaagtcaacggatacccttgcaaagacccagcaaaagtaacaccagaagacttctacttcataggcttagccactgctgcagccacagccaactcttcaatgggctcagctgttacaggagccaacgttgagaaagtgcctggcctcaacactctgggagtctccatctctcggatcgactacgcacctggcggacttaacccaccacatcttcacccaagagcctctgaagccatcttcgtccttgaaggccgtctcttcgtcggtttcttaaccactaccgggaaactcatctccaaacacgtcaacaaaggagacgttttcgttttccccaaagctctcctccatttccagcagaaccctaacaaagctcctgcttccgtcctcgctgctttcgatagccagcttcccgggactcaagttgttggaccatctctgtttggttctaacccaccgattcctgatgacctgcttgccaaggcgttcggggctgcagcaccagagattcagaagattaagggaaaattcccaccaaagaaataaataagtttcagaccagagcactaatctaataatgatatacaatgatgaacataaaaatgtaaacttctaagcaaaagcttgtaactttttttcattcttttctttattattgtagatactcttttgactatatttggcccattgattacgatgagaccagttttaacatgtttaagagtcta

SEQ ID NO: 149640 - DNA, 490 bp, Arabidopsis thaliana landsberg
aaatgatgtcgtcattgttattgtattgggtaaattttctgttttgtaattgttttagcatatgtctctgtctgattgtgtcagagttttgagtgaaacccccaaagttttattttttttatttaactggacatgaagctgtttttgaattcagcttttggtgaattttacgctgatttttgaatgtgttttatcttttcttgggtacagttagatagatagcatgaattggttacctgaagctgaagctgaggatgacttcaaaggtcttctctctggtgatttttttgatgatctcatcaatcaccttgaggtcccgcttgatgacattgataccaccaatggtgaaggagattgggttgacaggtttcaagaccttgagcctcctcccatggatatgttccccactttgccttctgacctcacctcttgcggctctggcatggccaaggcccctcgtgtggatattcaaaggaacattcctgctttg

SEQ ID NO: 149641 - DNA, 825 bp, Arabidopsis thaliana landsberg
cattgcaattggccatgaaggtggtattccgcctctaattgctcttgtacgatctgaagctgaggtaaacaatttgtttcgttataagttctcacatcccactcttttgggttaatctgatgcagcttttgcttttttccaggatgtacatgaaactgctgcaggagctctgtggaatctttcttttaatcctggtaacgctctgcggattgtggaggaagggggagttgtagcacttgttcagctctgttcgtcttctgtttccaaaatggctcgttttatggctgcattagcattggcatacatgtttgatggaaggtacgtaaaacttaattactgtaatcatatccacatttaaggtaatttgcagatctgactttgatcttatctatctattataacaggatggatgaatacgcgatgatagggacttcattggaaagtacatctaaaagtgttaccttaaatggtgctagaacaatggctcttgatcaaattaaagccttcattaaaactttcatggaacaccaaatcttctcaactggtgctttatcatctgctccatctatgttagcacaagtctcggagagagctcgaatcccagaagctggccacttgagatgcagtggttccgaaattggaagatttgttacaatgttgcgaaacccttgtcttgtactcagagcttgtgcagcttttgcacttcttcaggtactttttatgtgtgggaagcaatttgtttttttgtgcacgctttaatcaattgcattttagtactaaccgatgaaatgacagtttacaatacctgaaagccgtcacgcaatg

SEQ ID NO: 149642 - DNA, 337 bp, Arabidopsis thaliana landsberg
atcacggcttgcttcagcgagtgttcctattacaaaaccagaagagttgcaagaaagtgaacaggaaatgattcctttactatgttcaatctttctcaccaatcaaggatcagcagagaccaaagaagagacaactaccttcaccttagtgagtagcagcatcacttgttgtttactcgaacttctagatccacagaaaaggctttattgttaaacgtgctggttattttttgtattcaggatgatgaagaagctgttttagaaggcgaaaaggaagcggaaaagatgattgtagaagcatactctgctctactactcgcctttttttaactgaaag

SEQ ID NO: 149643 - DNA, 1143 bp, Arabidopsis thaliana landsberg
tgtttcggtttcttctgctgttggtgaagcaatggagtttgttgctttatttgatagagattatgggagtaataatgcttttaagattgattttgttgtggaaggatttatggatgcgcttcagcgatctaggagttcgtttaagctcttgtttgtttacttgcattctcctgatcatcctgatacacctgtgttttgtggtgggacgctgtgtaatgaagccgttgtagcgtttgttaatgagaattttgtttcttggggaggtagtattcgatctagtgaagggtttaagatgagtaatagcttgaaggcatcgaggttcccgttttgcgctgttgttatgcctgctgctaaccagagaattgctcttcttcagcaggtaaagatacaatcttagattctaaaagaatgtaatcaaagaggcaatttatcaactttaggtagacttggttatgaatccggtaattaaattattagtcctcttagggaactgcattggaactgaatccattctactaccttgttgttgaagtggttagtagtaaagggggaaaagatagttgtttgattctgctttcatctgtgagccgtcatttcatacatttggtgtaaagttctgcgttctgatccggcttttgtgagtttagtagtgtgttgtgtggcagaagatgtagttcttgagtttatcgtgttctttgttctgtttgtttgtggcaggtcgagggaccaaaatctccagaagaaatgcttgccatactccagagagttgtagaagatagctcacctactttggtaactgctagggttgaggcggaggaaagaagaaccaatctgcgtctgagagaggaacaagatgctgcttaccaggctgctcttgaagccgatcaagtatgttttctgttctttgtaggcctgttcagaatttacaagactttatgattagtctactgtctaaatttgttgcgtcatttgttctgctgattaggcaagggagcaacagagacaggaggagaaagagcgtttagagagagaagctgctgaggcagagaggaaacttaaagaagatgaagaggcttcggagagagcagcgcgtgaagcttgagagagacaagctgctagagtgcgaatgagacaagagaaagc

SEQ ID NO: 149644 - DNA, 356 bp, Arabidopsis thaliana landsberg
tgtcgggaaagttttttcttggaagaagaagaagaagagctcaacaagctcaacgaccaaaaaacttcggacacgaagactttttaagtcagttctcctctttggtttttttcgttccaaaatatttgatactctcgatctcttcttagtgatcctcattaaataaaaatacgatttttattctttttttgtgagtgcaccaaattttttgactttggattagcgtagaattcaagcacattctgggtttattcgtgtatgagtagacattgattttgtcaaaggtgcattcttttatataaaaaaagtttaatttccttttttcttttcttttctcttttttttttttttccccc

SEQ ID NO: 149645 - DNA, 211 bp, Arabidopsis thaliana landsberg
ctctctttctctcttcctttacagagaaagcagagagagagagacaaagggaaagctaaatccgtgacccggatccgaaataatcgggttttcaaaatctaattcctcttatcttctctcttcttcttcttcctgggttcttcccaaaattcaatttcattaaaagggcactgccctttatcatgcctaaaattctcaggtacctaatcaa

SEQ ID NO: 149646 - DNA, 940 bp, Arabidopsis thaliana landsberg
aatgagacgcaggtaaagctaaggaactgatggagcatttggtcttattgcaatcttcaattcctgaagttaacaagtcacacacttccacttctctgaaatcccttccttttatacttgaacacgtactcatcagtttggtactctgtttttctaacctcttcttctctcttgattttattcaggattgtgaaaggaattcgttcggacgtggcaagcgtcgccagtgctgatgaattcgagtacaaagatccagttgatggatccatttcgaagcaccagggaatccgttacttgtttgaagacggatcacgacttgtaagtcatctttttcttcggtatttgagcttggatacattccagctaagaacaaagtgatagaaatcaaaactaactaatcctctcttgttatatctgaaaccatatgaaggttttccgtctctctggaactggctcagaaggagcaaccatccggctttacatcgaacagtacgaaaaggatgcttcaaaaaccggccgagaatcccaggaagctttgtctcctctggtcagttgcttactataaaacctcaaatccataaactgttttccgactcattaccatttagctaataccaaaggggttttctctaatcaaatgcgtaattgttgatgtgtgattcacaggttgacttagctctaaagctgtcgaagatggaagagttcacaggccgatcagcccccaccgtcataacataagaagggtcaagctcaacgactcaaacctttcaccttttcgtctatatgatgttttcttcttatactatccaagttacattataagaataattagtctcagggagaatttgtatttctcatcagaattctgaacaaccaagactgatttcttgagttgttgtgaggcttatacttgtacggatttggctttctcagttttgtt

SEQ ID NO: 149647 - DNA, 1115 bp, Arabidopsis thaliana landsberg
ctgaacaacgtcaagtgtttggacccgatcaaagatggatcaacccgacccgaaaaatggctctggtctgattctctccgccactgaaccgctgcgattgtttctcgctctcgcctccggtgatcgtcgtctctccgacgagctcagaggaattgcttccgatcttcgctcgaagaacaccattccgtacaaattgctccgcgctatatggaccggatccgatccgtcgaccagaccggatttgttgggacttttctccggctccaatttcgtcttcaccagtcccaaacccagagaaaaggtacacgaacctccatttctacatcaagtttctttgctggggaatttcgctatcaggctcatttaacctggaatccggcgaaattggacctaattagattctgtttctgctcactaatctgctgttaatagtttccactgaaagatagatgatactgaacttgcttgaacaatccagcaacaaaagagatttgtcttttggtatagtttagagaaatttatggaagatttctagttatctcttggtcaaaactagcacaaaattgtggtttcatagttttgtttgattcatattcaaatccaatatgcacaattctgttgaattgattggaaaagttgagcataatcgaagaaacgtcgccgcggttctattgagtgtaattcaaggatgcttctgggtttctttctttgaagttttccttatctatgtttaaacctcttcatgtctcgccatgtttgatttgatctgatttttcgattgatagagcgaagaactgaaactgagattagtgaagctcagagaaatagcagagaggaaggagtatgctgagcttgttaaagatataacaccaaagaaacaagtcgaagagcctttctcttcttacaaagaccagctcggttttggtaagcattgtcgctcggttactttgttcttggaaaagtattacacattactgaagattttgcttttcttgcaaactcgttttataggtttacatgttggtcttaccatgttcactggatatttggttggatacgcttccttcagagctttattcaaccgcaaccccgctctggtacactttgctgactaa

SEQ ID NO: 149648 - DNA, 298 bp, Arabidopsis thaliana landsberg
gacagacgtaaattggcagcatattgatcctatcggattcagaaagatgttgaatcacctaaataataggtaccacagcataccaatgtacatcaccgaaaatggtactaatacctcaactttttttgggttatatccattttataagaatggcatgctgagagattcatattaaccctggttttgcaggtttcggacagttgcaaaaaccagagacgacagttgaagaacttctgcatgatacaaaaaggatgcaatacttgagtggatatttggatgctttgaaagcagcaataag

SEQ ID NO: 149649 - DNA, 515 bp, Arabidopsis thaliana landsberg
ggctcttttgcatgttctgtcataaacccgtccatttcattcttcctcttcttctccttctatcctctgttttttgccctctctctttgtttagtggctgtggtcgtttgtatttggtgaaacataatttaaaaacaagtgcggctatctttaactctggccgacacatcggcggattcgactgtggtcggatcaagaagtgcttcctttttttccggcgtcgtttcttcttttatattcatcgatttggtgctctcgcaacttccaatagattacggctaatttctaaaatgaagatattaccatgctttggatttatccgtagaaagaaaaataaggtaacgtaattactactatttagtattattcttgtgaatattccggcgaaacagattttgcgttgaactcgttctgttggctgaaacaggggaattcaaaacctcagaaaacgcagagaatacttcagatcagacttgaagagccagtgaagcctttggagaatgatgagcctaaca

SEQ ID NO: 149650 - DNA, 818 bp, Arabidopsis thaliana landsberg
actccgctaaagcttttttaaaaaggattactactgtttacttctctgaatgcgttcactgcttcaccgtactatcttactcacatctccgtctcattctcttatccggcgcacttctctctccgccatggccaccaccgcctcctcttccttgctcctcccttccatatctctcaacaatctctcctcctctaaaaatgcctcctttggcttcgccgccaaaaatctcagccgatctaggatttctatgagcgtctctgctggatctcagagtactactgttcacgattctctgttcgctgattacaaacccacctctgcttttctctttcccggtcaggtaacttccgattacatgttatcaatctgaacaatgaaaatgtggactctgattgatttcgtatcaatttaggaaatttggaattgcccagattgaaaagtttgctaattttgatctgattgatgtgattttaattacaatgtagggtcttcatcataacgtcatattctttgcttgtaatctctcagaactcgtttcaatttttagatcaaatgtgacaaagtttagatgaatttgctatgtctcagggagctcaagcagtaggaatgggaaaagaggctcagagtgttggagcagctggagagttgtataagaaagctaatgatatcttagggtatgttcctttgtttaaagttgaaacctttttgtttgtttttgtgaatgaataaactatatggtggctttctgcaggtatgatcttttggatatttgtgttaatggaccaaaagagaagcttgattctacggtcataagccag

SEQ ID NO: 149651 - DNA, 253 bp, Arabidopsis thaliana landsberg
tggaaagctacaatattattatttagaaggtagaaccaaaattaatgactaaaaatatttttctttgtataaaatatacctcatatggaaaatattttttcagacaaaaacataactcctttcctttttaacagcaaaaccgaaaacataaattcaaagatacatgtcgattttacacacaaagtgtgcgatcagacaagactcaagggagagatcgagaatggtgaagatggcctgaaaattcttctctccg

SEQ ID NO: 149652 - DNA, 1653 bp, Arabidopsis thaliana landsberg
attgctgggttgtcaaggcaacgcaagcggcaagaacacacggatctcggcggtgcttttccacagcgattcctggtccttgcatcgtccacaagcgtggtgctgatattcttcacgatccatggttcaataaggttgtgtgttttatcctcgatcttctgaattttagggttctaaaaattgattataatgctgatggttgttgttgttatggtctctctatctctttggtgcttttgcaggacacaggttttcctttgactgagagagatagattagggatacgaggcttgcttcctcctcgtgttatgacctgtgtacagcaatgtgatcgtttcagtaagttttgatccattgtccaaagttaaaatctttttatgtttcttttcgggtttctgagacttttggttttgaaacataatttggcagttgagtcgtttcgttcgctagagaacaacacaaaaggagagcctgaaaacgttgttgcattagctaaatggaggatgttgaatagattgcatgaccgtaatgagactttgtactaccgagtgagtctttttggctctaaatactgtcccacattgacacatctctgagacatcataactcatcttctctgcaggttcttattgataacatcaaagattttgcccccattatatacactcctacggttggacttgtttgtcagaactattctggtttgtatagaagaccgagaggaatgtacttcagcgccaaagacaaaggagagatgatgtctatgatttataactggcctgctccgcaggtagatatgattgtcatcactgatggtagccgtattttgggcttaggagaccttggagtacagggaattgggattcctattggaaagctcgacatgtatgtcgctgctgcaggaatcaatccacagagagtatgttgatctccacatgatcttgtgtgtgtttttttgtttgctgtacctaactaaggtttcacctccttattcaaaattatacgcttgttcctctgcaggttttgccaattatgttggatgtaggcacaaataatgaaaagctcctacagaatgatctctgtaagctgtgaacttaattggtccatgtggtgtacatgtgtttccctaatatctcattcgtctgtctttccctttgtacagatttaggagtcagacaacctaggttggaaggagaggagtaccttgagattattgatgaatttatggaagctgcatttacacgttggccaaaggccgtcgtacaggtatatatctcttactatcttctttagatttacctttcggttggaaggatgactaaatgattcattccatcattttagttcgaagatttccaagcgaaatgggctttcggaacattggaaagatatcggaagaaattttgcatgttcaatgatgatgtccaggtatgctcacaattttgcaatccagctgccttcctttttagctacttcttgtatgtatctttttcaaaaataataataataaggtttgggtatgagttatcagggaactgctggtgttgcactggctggactattgggaactgtcagagctcaagggcgggcgatatccaactttgtgaaccaaaagattggtggggtgggagctggaaggtacttggatttttc

SEQ ID NO: 149653 - DNA, 2117 bp, Arabidopsis thaliana landsberg
cgatcccattccttagggtgtcaggtcacggtcgacataaaaacatcttttccatccaatatttaccggtttcgtttcaccggatttgggctctccggcgacggagaatagccaccatctccgtaggtcagctttctttttttttcttctctttcctctctctcatatctctgtatgattggccgaggtgtagggagctctggccgccggcaaaaaaaataggttaactaaatttggtgtgttctcggtttttgttaacagcaacgagacgaaattagaggaaattgaattgagctttaagggtgattgaaactggaatctggaaagtttgtctttttggttatgtttggttttaggatctgtaatgaagattttgcttgtgaggttattaaatgcagccaaaggaattctatcaccaaaggtttatactttgatgataagaaaacagaaaaatgagctgggactttgtattgcatggttttgaaataactgattgttgtgtggttataggaagtggtgtttgatatggcgaatttcttttgtggttgctaatgcttgcagctcactaaacaatttttaagttgaatttgaattgttgatcagatgtttgctactgagttgtgtgatcttttgaatatctgctataacttgtatactcattcttgatacacgagcttacatgtttcagagtttagaaagctttataatgtgtgaactacactgttgtgcatttagcttcttctaacaaactgttgtaactcaccgttaaaccaaaactagattccttttcctgtctaaatgtttaactccatgaattgtttaatgaaccctgaaaatttgatacagaaaacagtatacttgatagctgaggaacaagagaagtgacaagggtgattgaaaagttgaaggactcagatgggaagcagaagcggagaacaaggaaagcgaatggcggaactgagcaaaaatcttaaagaaggtgagaggattctggagcccacacgtagacctgatggtactctccggaaacccattcggattcgacctggatatactccagaagatgaagttgtcaaatatcagtccaaaggttctctggtatggaatccttattccctcaacactctattctgttcttggactcattgtttctcgtggaaatgaatcgtttaaatatgatttttctcagtagtcagtactggttgtggatagcctgctttcattatttgtaccacccttatgttctttgttcgagtgctcaacagaaattgttaccaaatttttgctcttctatcttggtttgaataagggcaaaaatgtagatagaacatatcttttttctaatttgtatttcatttgtaatagatgaagaaggagatggcctcacaagggcctccaggttatgaacctgatccagctcctaaaccaaagactaaagctgctaagaggaacgaacgtaaaaaagagaagcgattacaggtatgtgtttcaactcaattcatatgctactagcttggtcttcggttaatggaacatgctttctaattatcacctctgcaggctactgcagaaaaagctaacagctctgaggatggatcagctagtaatggatcccaatcggtgaatgtattggcttctgaaatggaggctttggacgtttcgtcaaataatgatgtatgtgggggagcacctaatccaggaaccacaggagaagacgtagagaaaagaatccgcgcacttaagaagaaagtaagatttccatctttctcagttgctttaattaaaataagacattcgagaacctttggctttgaagatataatctccaccgtctagattcctaattgtggctggtaagccgtaacagcgtatgttccaaatggttttcaatcaattttcttcagtttacagcaaaattgtgtttgaggtttagcagaaatctgcagtctagcggttgtgtaattgcttcattctgttaacatttgcagatccgactcacagaagctcaacagcagaagactgcttcccgagacctaaacccagagcagttagagaaattctctaagttggaagaatggaggcaagaactcaaggctctggaggataaggcggcttaa

SEQ ID NO: 149654 - DNA, 947 bp, Arabidopsis thaliana landsberg
atcaatcctttttcaggccgccacaaaagaacctacatttattccagtggttgttggtcttttggactcaagtgggaaagacattactctttcctctgttcattatgatggtacagagcagaccatttcaggcagcagcacaatacttcgagtgactaaggttagctaagaattccttctataaaccactaaattatgtgatctttaaaaatgatgtattcttagattacatcattctctgctctgttctcgcatccagtgtttttaactttttaataccttttgtcctgatcttccttatctatcttttcctgactttatgtcttggtaatgtacagaaacaagaagagtttgtgttttctgatataccagaaagacctgttccatccctatttaggggattcagtgccccagttcgtgttgaaactgatctctctaatgatgacttattcttcctcctagcacatgattcagatgaattcaataggtatgtggctttttacaacatattagttcttctctatgctctttccgctttttcaatcattcatttttctgtatcttaggtgggaggccggtcaagttctggcaagaaagctgatgctgaacttagtttctgatttccagcaaaataaaccgttggctctaaacccaaaatttgtgcaaggtctcggcagtgtgctttctgactcaagcttggacaaggtatggttctacattcccttatctccccagtaatcataaatgtaaatgtaggatagggttttgaaatctggtttctttatgtattgtgtaggaatttatagccaaagcaataacactacctggggagggagagataatggacatgatggccgtggcggatcctgatgctgttcatgctgttagaaagtttgtacgaaagcagcttgcatctgaacttaaggaggagcttctaaagatagtat

SEQ ID NO: 149655 - DNA, 1341 bp, Arabidopsis thaliana landsberg
aattcactactgttatgtttcttttcagactgctgcaagctaccatgccattgctattgctctttctctgatggacgcatactccttgagcgttcaacatgagcagaccactctacagattctacaagcaaaactaggccctgaggatcttcggacacaggtgcttaattagttatgatttacagggagtttcagttaaaatgtatttcttacgctctaaaactatgttaggatgcggctgcgtggcttgaatatttcgagtccaaagctctggaacagcaagaagctgcacgaaatggtactcccaagccagacgcctctatttccagcaaaggccatctcaggtattaaaacatgagaatatgcactagatgactatggattgtaaaagaattaacaaaatagctatggtgtcagagtacaccctcaaatctattatttcttctaaaaacatgatttaaatgttaaaactttctcaaatctattattttatcttcgtataagtttgctcctggttcaacttttcaaatgaaatgatattttgtttatataacatgctatttgtgtaaaatgtatgttataaaaaatgtcatttttttataaatatcgtgtcattttaacatgtttcatgcgatttactaaaaaacatcaaatatatctgcataaacttacttttggttcaacttgcaaggatagttttgaactgtcttatgccgtcatataattatttatccatagaaaaatgacaatggttagttactcaattcttttcaattctatagttagtttctaatattacccttaaaacatttgtcttttaaatatatgattttatactcttgcattccatcttatagcactgtttacaaaatggaaatgagtgccaaaagatattaatagaactgactaccaaaaatgaaaatttaaatgcagaccatttgcctagaccagtagtacaaatttctatcttgcgtaaatcttgtcctgagtgatataaccaatgagctttcttcccaataacagtgtatcagacctgttggattatataaccccggattctggtattaaagcaagggacgctcaaaggaaagctcgcccaaaggttaaatttgcttttcgctgacttaatccttgtttttattgaaccactctcattaataaggcgtgacagatatttttcttgcaatgttcattcaggtcaagggaaagccaggtcaaagtccaggaccagtgtcagaagaaaatcagaaagatgatgaaattttgagtccggctcatctcactggggagagttcaagtgataaagagaacaaatccgaaacaaaatctgaagaaaaaaag

SEQ ID NO: 149656 - DNA, 1813 bp, Arabidopsis thaliana landsberg
atggagaacaggctaacagaagcatctgtcgctctagaaaagactgtgttagaaagagatctaaaccaaactaaggtttcaagttctgaggccaaggtggaatctctggaagagctttgccaagacctgaaacttcagttggaaaatctcagagtgaaggaagagaaatggcatgaaaaagaggtggaactgtctacgttatatgataaactattggtgcaagagcaaggtaatttttatcttttgttgtctctcatttctttaaatcttcatcacataattatcactatactaaaatgtcacgtgctgttgcttcgaattgcagaggcaaaggaaaatctaattccagcttctgatatgcgaaccctttttgacaaaataaatggtattgaagtgccatcagtagatctagtcaacggattagatcctcagagtccatatgatgtgaagtagctattcgcgattgttgatagtgttactgagatgcagcatcagatagacatcttatcatatggacaaaaagagctcaattctactttggcagaaaaggatcttgaaattcaaggtctaaagaaggcggctgaagcagagagtacgaccgagctagagttagtgaaggcaaagaatgaactgtccaagctaatatctggcttggaaaaactgctgggtatattggcaagcaataatcctgttgtagacccaaacttctccgagtcatggacactcgtacaagcactagaaaaaaagataacttcccttctcctagaatcagagagttcaaaatcaagggcccaagaacttggtttaaagttggccggtagcgagaaacttgtcgataaactatcattaagagtcaaagagtttgaagagaaacttcaaaccaaagcaattcagcctgatattgttcaagaaagaagcatcttcgaaacaccgagagcaccttctacctcagagatatccgagattgaggacaaggtaatatcttatttcgtgctatttcagcttattccttgacccttgttttgtttacgccatccgctgccattgtgattggtgatatcttataagtaatcatttagcttcaatctcttgctatgttttgatctccaagtttggactgaaccccattttgttctcagggagccttgggaataaaatcaatatcaccggtgcctacagcagcacaagtgagaacagtgaggaagggatcgacggatcatctttcaatcaacatagattcagagtccgagcatctgatgaacaacaacgaaacagatgaagataaaggtcaggactctggcgtctacatatatatctcgcttattacttaagtatgataccgctcggttgactcatatcttaaacacaaatattctttggcaggacatgttttcaagtctctcaacatgtctggtctgattccaacgcaaggaaagataatagcagatcgggttgatggaatatggtaaatatactcactaatatcgaacagttctgtaatagctcccaaatatttccatcttactcatccccgggtttgatttctgcaatgcagggtctcaggtggaagagtattgatgagccgtcctcaagcaaggcttggcgttatggtatacagtctcttattgcatctgtggctcctagcctccatcttgtaatcaagacaggtgactcttaggtctctcacatgaaactactacacacaaaagaaacacataaattgctctctcttctcttctctattcttccattctttgtcgacccgtaaacagagaatgataggtgtcgtcttgtatatataacctgaataatg

SEQ ID NO: 149657 - DNA, 2608 bp, Arabidopsis thaliana landsberg
gttgtacaggggtctcattcagctatccctgattcacctctaggtccagacgcgtatcgagagtatgaaaccttacttgttcaggtttccaatgaacatactaagaaaagcgacaaaatatctaaagacaaaggggtttctaagttctcttctgcacttgaatcccttactatggagcctattgaaagcgaaaatgtagatatttcatcaggtggtgcacaaggtttggttgtctcagttcaccacttccccttgattatttgtcctttcactcctcgagcgtttgtcttaccttcccaaggatcagtcgcagaagcgtccttgtcccgtcaacatgagaattctcttagttttggtttgcctcccataagtactggatctatgtctgacactgatgatgttcctcctggtgcaactcttaccgcacattttctttaccagctggcccttaaggtaaactaacactgcagtaaccgctttgaacttaattcacgatgttcatgaagtacgtgagctagaacactagaagatatctgtttcccttgtttgtcaataatttaatttcttctgtacgtttttcttaaatttgtgaccatgtcgtcacttttttaaaattgtagatggagttgaagttggaaatattttcacttggtgaccaatcgaagaatgttgggaagattctaacagacatgtcaagtgtttatgatgtagcgcgtcgtaagcgatctgctggcttgttacttgttgaccgcacacttgatcttatcactccctgctgtcacggggattcacttttcgatcgtatcttttcatctttgcctcgggcagaaagattttcttcacaagcacagcttaaacaaggggtcccaagcatcaatcgtccttctcttgatgttcaagtgccgcttggggaactgcttaatgaagaaccaagcaagattcgggattctggtcttcctgaaggaattgaagcttttttacgtggctgggattcatatacctctgctccacaaaatgtaggtttgtttaatgaatgtgacaagaaatctaccaccaactggactgaactactaaatggatctcttgtcgctactgaatgttttagaggaacaccttacttagaggccatgattgataggaaaacgaaggatggaagtgtactggtgaagaaatggcttcaagaggctatgcgtcgcgaaaatatctctgttaacgtgagagctcgtcctggttatgctacaaaaccggagctccaggccatgatcaaagcattgtcccaaagccagtcgtctttgttgaaaaataaagggattattcagttaggggcagctacagccgctgctcttgatgaatctcaaagtgccaaatgggatacttttagcagtgcggagatgatgttaaacgtaagtgctggtgatacgagtcagggtttggctgctcaaattagtgacctgatcaacaaaagcgctgtggcagaacttcaagcgaagaaaaacgagaaaccagattcctcatcacgagggctgctatcttttcgtgatgccctgcttcttacaatagttggttacattcttgctggcgaaaatttccctacatctggctcaggtgggcctttctcttggcaagaagagcattttctaaaagaagccattgtcgatgctgttctggagaatccatcagcaggaaatctcaagtttcttaatgggttgacagaagagcttgagggcagattgaatcgtctcaagtctgaggaaaccaaagaaattccctctgatgatcaattagacattgatgctcttgatgatgatccatgggggaaatggggtgacgaggaagaagaagaagttgacaatagtaaagcagacgagtcctatgacgatatgcagctgaaactggatttgcgtgatagagtagacagcttatttaggttcctccacaagttatcgagtctaagaacaaggaatctaccattaagagaaggctcattggcttcagagagcagctttcctggcgagccttctggaaacaaagggctagtctacaggcttataacaaaagtgttgagcaaacaagagatacccggtttagaataccattcttcaactgttggaagatttattaaaagcggatttggaaggtttggtcttggtcaggttagttagacctttctctctacccatgactttcattttcctacacaagatatacattaatgtttggcaatgctattgcaggcaaaaccaagcctggcagaccagagtgtcattcttgtctttgtcattggaggtatcaacggtatagaggtgagtttcttcatcacaaaagtcacctcgcattcacgttgtagggctatattttttataactgtctatgtttcctccattgttaaggttttggaagctcaagaggctgtgtcagagagcggaagaccagacattaacttggttattggaggaacgacacttctaacccccgacgacatgtttgagttattgttgggacaattcagccatttttgatatcttgcaaactgacctcactctcataatctctgttgttagcttgtaacattagaagaaacagaaatacccatgaataaattaatgat

SEQ ID NO: 149658 - DNA, 1050 bp, Arabidopsis thaliana landsberg
  unsure (1)..(1050): unsure at all n locations
aatatacaagctaattggagaggtgagggccttaaatttttttttttttaatggcgttatggtttcattgatatgcagaggaaattaggaatgctgataaagtctctttttcatattttaggaaatattgcacgaaagatatctaaggaaatgagaagggaggaagctgccatcaaaatccagaaaaacttacgtagacagattgcaaagaaagattacgggaagaccaaatcttccgcactcaccttgcaaagtggagtccgcacaatggctgcacgtcatgaattccgttataaattaaccactagggcagcaactgtgattcaggttctattctcattactaccctttcgtacttaacaagttctcatggaatcattctatctcaagaactataaatgacgttcaactctaatcaacttgcaggcgtattggcgtggttacagtgctatatctgactacaagaaactgaaaagagtttctcttctttgtaaaagtaatctcagaggaagaattgccagaaaacagttgggacagtcaaagcaggtattgcaaaccaatccctgcacgtttgtttttagtatcaagtgttttcaattactcagcatgtagggatacgtagaaaaaagtatctggttttgattgatgtaaaatcatatgtataggctgacagaaaagaagagacagaaaaggaacgcaaggtggaactttccaatagagcagaagaggcagttgatatgtcctttgtactgcattcagagcaaagtgatgatgcagagagtggacatggacgaaaggcaaaactttctattgaatcagaagatggacttgataagtcctctgtattgcattcagaacaaagtgatgatgaagagnnnnnnnnnnnnnnnnnnnnnnnnnnntccatcgaatcagaagatgggcattcagatcagagtgatgatgaagagatagaacatgaaagaaagacaaaacattgcatccaagcagaagatggaattgagaagtcctatgtaatgcattcagatcaaagtgatgatgaagagatac

SEQ ID NO: 149659 - DNA, 546 bp, Arabidopsis thaliana landsberg
atggcagttaaagacgatttgatagttgctgtagggttccaaggggagcttatctgcaaggtatattaaaacattctctgttctacagtgatcttatagttactttgtttgctcactttgcatggtcactctgattccagaaaatcaacgaacctgaggttgctttctgcactaaactaacatcagctgataacgacatcaccaattcagttgacatttacaacgcacctaggtaattactaaacagaacatacattggtttcaaaaaaaaaaaaaaaaaaactcatctaactctttcttccttaatccatatagtggctcgttaagggttatgaccgcgaacaatgactgtactgtccggctatttgatgccacaaactttgccttgctcaacagtttcgcctttgattggtctgtaaatgtaagtgaatctccttctcttaagacccagctgttatcatctgctctagcttcaaagtgtttatgactaatgtctttggtgcgtatctgtagaacatctccaccagtccagatggtaagctagtg

SEQ ID NO: 149660 - DNA, 304 bp, Arabidopsis thaliana landsberg
gaatttggttttctcaagaaggtgaatcactatcccttgtccttactcagatttcaaacgggtccaaacccgaattgaatccgggtcgggtttctgtaaatttccctggactcggcggcggcaataacgaccgtggaagaagatgatgatgatgagagagttctttaactcttttttactattttctaccttttcacttttgttactatttttacccttttgttagatatgtacatattctgtatgtgaaaagtgacgtttgaatttaggcgataatgtaaataatatagagattttttatttt

SEQ ID NO: 149661 - DNA, 601 bp, Arabidopsis thaliana landsberg
tctgagcttcggagctatcgaaaattctgaatctgaaagggtaaagatcccatctttttccaaaaatcgataagggaattagtatattcgttcattcatcatcgttctgatgatttcgatttgaatctgtatctagtactctgtattatcagaaattttgattaagtagctttgatgtgttcttgttttgcagtttgagtgaagatgtcttcagatcaggaaggttctaagttttgaagaagtttcaaagcacaacaaaactaaggattgttggcttattatttccggcaaggttagatcttgtctctttgtttgagaacatctctgttttttgacgaacttagttctcttccgccattgatttgtgtcaaagcttcgattttaaagttgtagagttggattgttactgttagaagctttaatcgagcccctcgtagatttagttgattctatgttaattcacactagagaaacagagtttgtgtctactacttggttatgatctgtgattgttgcgttctttaggtgtatgatgtgactccattcatggatgatcatcctggaggcgatgaagtcttgttgtcctcaacaggtataaaac

SEQ ID NO: 149662 - DNA, 616 bp, Arabidopsis thaliana landsberg
acctagatatggaatcttggctctccggatccaaattttactttggatgcacatctcaaaggggtaaactgtgtagactactttactggtggggataaaccatacctaatcactggttctgatgatcatactgctaaggtctgtactgagctttcttgcttctttgcaagttgtttgctacatatgtgtgcttgtatgtatcaccatttgtattgtatgtatataggttcgtgcagggttttctgtttgtatattgttcataaatatcttctggaagcaggtgtgggattaccaaacaaagagttgcgttcagactctcgaaggtcatacacacaatgtttctgcagtatcttttcatccagagctacctataattattacaggatccgaggatggaactgttcgcatatggcacgccaccacttacaggtaactcgtatgctgtctgcattggagctgctattgattttgtctttaaaaacttccttcaatttttcaaaaatcttcatccaacagttttttacttaatacttgacatctaggcttgagaatacattgaactatggccttgagagggtttgggctattggacacattaaaggttcacgccggtaag

SEQ ID NO: 149663 - DNA, 776 bp, Arabidopsis thaliana landsberg; identical to SEQ ID NO: 13391

SEQ ID NO: 149664 - DNA, 1575 bp, Arabidopsis thaliana landsberg
  unsure (1)..(1575): unsure at all n locations
gcacttcgcaaaatcagagcgacaaaaaaaaataaaaaccaatcctttcgattccaaattttttgttactcactcgcacgagttttatttggtcgttagttatctctttcgttgaataacggttttaatttaaaccgttactttttatcaatggcgacttcgtcaccgtctctgagtaacaatggtctttcctccgtcgtcacgcctcccaaaactctccgtggtctcaataagcctaagtgtattcaatgcggcaatgtagctcgctccaggtattgcttctacgcattgtttcatcgaaggacttaggttttttacatctggggtttcgatttatggattgttcttgggtttttgatctgaaaggattcgaatttgtcttgtatagtactttttcgttttgatttagggttcataggtttgtgggtttgggtttttattcatgatttggtgattaatctgttggagattgtttaaagttttgagctttagtatcgaaagatcagttttttgagattattggtgaagtaattgtaattgtattgcttggatttgataaatgcaggtgcccttttcaatcttgtaagggttgttgttcaagagcagagaatccctgcccgattcacggtatgtttgccctgtcaaatctcaacttcataattagctaaagtgatcagttttagagtttagtgttgataactttgattggagagttctattctttcacttggtaagtttagagtttagtattcttgacttctatagggttcgtttggttgtctcgggacaaaaaaacctnnnnnnnnnnnnnnnnnnnnnnnnnnnnnnnnnnnnnnnattagctgagagatatagagatgttatcatggactgttttgtgtttcttcttatgtgttttatttcgctgcagttcttaaagtagcttcaacttctggtgagaagacgcaggcgccaagtactccatcttcagagcagaaagcaaccgagggcactcccgggtacatatatataaactaattttctgttttgtttgtgcttccacgggcaagtgaatcttagatgataaaccggtgtttgcttactaatactttgataggagattcttcagctttcttgttttattgcacgtagttgatagtgagatgatatattggtcttgtggaactaaaatatggcgctttatgttgacgttttcttcttttggaaattgtttcaggagtaccactagagtttcgtcaatccggcaactttctagcaactttgctcagtttaataacctgaatgcttcttcccgccagagaaaacctttgacgataaaggtatactaattaagacgtctttcattgactttagtactctatgaaaaatctccatttagttgttttcctcttatcagtttttgttctgtctatattctataggatgctcaagctttaaacgagtggcggtttacaaagctaaaagagtacagagacagaaacattgaagtagaaaatgaagcttttgatcggtacatgagtaatgtgaatttactcgaagaagcattttcatttacatctgttcctgatgaagaga

SEQ ID NO: 149665 - DNA, 421 bp, Arabidopsis thaliana landsberg
cggtctgcaattaagccagctgatgatcagctgagcttgtcggatttggatatggttaaagtcattggcataggaagtagtggtgttgttcagctggttcaacacaaatggactggccaatttttcgccttgaaggtactcattggttaaccttcagattcttctatgtatatgatgagctaatttcctcatcttttctctgtgtttgaagatttacaaatctttttcttccttgccttggcactcactgcgcataactctgaagctatatgagtaggtcattcaactaaatattgatgaagcaattcgcaaggcaattgcacacgagctcaaaatacatcaatcgtaaccgtgctcaaaccttgttacctcgtaccagtcattttatgacaatggcgcaatctcactaatcttggagtac

SEQ ID NO: 149666 - DNA, 375 bp, Arabidopsis thaliana landsberg
cgatattagcagcacatgttgattgccataagccaaagccaatcctcttcttctctgtttctggatgtccaccaatcatcttcgcacttctttcgtccagtcgatgataataacggtggagaacgacggaggcgggcgacgttagggtttctaatcatttctctctcttagacgcttatggcagtgaagaaagcctgcgaaatgttcccgaagagtttgatcgaagatgttcacaaatggggttgcatgaagcaaaccggtgttagccttagatacatgatggagtttggttccaaacctactgagaggaatcttttgatttctgctcagaaataacataaggagcttccgattcgcgtcgccaggagagcgatc

SEQ ID NO: 149667 - DNA, 590 bp, Arabidopsis thaliana landsberg
ctaatcttcgatcttgagctctatttccgggtttatacatttccttcaattcaaaaccttttctttcattgacaaatgatttgaaccaaaaaagttgtttcctttgccaaaatctgaagcgccatgactgaagttcttcactttccttcatctccaagcgcttctcattcatcttcttcttcttcttcttctccttcaccttcttctttatcttacgcctctcgctctaatgcgactctcttgattagctctgaccacaaccggagaaacccagttgctagattcgatcaagatgttgactttcatgcctcaatcgaagaacaagatttgagaagacggagcagtaccgatggaggagaagaagacgatggtggggaagatcagatttcgttgttggctcttcttgttgccattttcaggagatctttgatttcttgcaagagtaaccggagggagctttgtagcatggagattggatggcctaccaatgtcagacacgtggcgcacgttacctttgatcgtttcaatggcttcttgggtttgcctgttgaattcgagcctgaagttcctagaagagctccaagcgccag

SEQ ID NO: 149668 - DNA, 411 bp, Arabidopsis thaliana landsberg
attgctcaacataaaggggcatgggcgttcttggagcctgttgacgttaaaggacttggactacatgattattacaaggtaaagattcaaactgttgctaatatactgtgggttaaatattccatgtttacatggaattttgctgaaatgagcgattttgaaaaatgttcatagcttctgttcattacttaacaggttatagagaagccaatggacttgggaacaattaaaaaaaaaatggagagttcggagtatagcaatgtcagggagatatatgccgatgttagactagttttcaagaacgcgatgagatacaatgaagaaaaagaagatgtttatgtgatggctgaatctcttctggagaaatttgaggagaaatggctcctgataatgcctaaacttgtggaggag

SEQ ID NO: 149669 - DNA, 1513 bp, Arabidopsis thaliana landsberg
gctgaagtcaactatttaggacagctgagtcacccgaatttggtgaaacttattggctactgctgtgaagatgatcatagattgttagtctatgaatacatggcaatggggagccttgagaaacatcttttccgaagtaagtttatttcatattcatcgcatatacgtgactaaaggtggaacgtatggatggtttatacagattagttcttagtgtcattataagtatcttgaagaggaattgataaagcatatgttcccatattataaagaaggagtagtgacgaaatgtgtcgtcttttcgaattcacttgacaggagttggatgcactttgacatggacaaaaagaatgaagattgcgctagacgcagccaagggtcttgcatttcttcatggtgctgaacgctccatcatataccgggatctgaagacagcaaatatattgcttgatgaggtcagctattgcctcttctgttttgagattacatatgtttttaattcttcttcttcaatagatagtgtctacaaaggtagtgaaatgacttggtttttctatttgtccgcctatgtttcccctgaaaggtgtatgtaatgcttgtgcagggttacaatgctaaactctctgactttggactggcaaaggatggtccaagaggagaccaaacacatgtgtctacacgtgttatggggacttacggatacgctgctccagagtatgtcatgacaggtctgtctttattactttccgtcagcatatgtctgaattcagcatgtttaattgacacaagaaccttttaaaagtcatggctgttttgtcaagcagtgttaaaaaggaccctttttaagcatatgcatgttgatacgatcacattatgtaaatggtcatatatgtgattgttgtaatagggcatttgacatccagaagtgatgtgtatggattcggtgtacttctccttgagatgctccttgggaagagggcaatggacaaaagcagagcttgcagggagcataacttggtagagtgggcacgacctcttttgaatcacaacaaaaagcttttgaggatcatagaccctcgaatggatggacagtacggcactaaggcgttgatgaaagtagctggtttggcataccaatgcctaagccaaaacccgaaaggaaggcctctcatgaatcatgttgtagaagttcttgagactctcaaggacgacggagatgctcaggaggaagtcatgactaatcttcatagtaggggaaagtctgtaaccttatatgaagcttctagcgattctcaaggcacaagagatgggaatggacagaggaggagaagaccggaaagtggtagaagcaagagcgaagccgcggtcgacactgaaaaatatgtttctactctttcggaaccggatactaccaaaatttaagactcaagacagaatgattcaccagtgatttgagactgtaagataagaaagtagcagagttggcttaaaatgtataaataagttgagtctt

SEQ ID NO: 149670 - DNA, 1610 bp, Arabidopsis thaliana landsberg
atggagggaagcccagtgaccagtgtcaggctctcttcggtggtgcctgcttctgtggtaggtgagaacaagccacgacagctcacacccatggacttagccatgaagctccactacgtccgagccgtctacttcttcaagggtgcacgtgacttcactgtcgccgacgtgaagaacaccatgtttactctacagtctctactccaatcttatcaccacgtctcaggtcggatccggatgtccgacaacgacaacgacacttcagctgcagccataccttacattcgctgcaacgacagtggcatacgcgtggtcgaggccaacgtcgaagagttcacagtggagaagtggctcgagttggacgaccgttccattgaccaccgattccttgtctacgatcacgttcttgggcctgatcttaccttctcgccactcgttttccttcaggtaaacacacatacacaaattttagtataatataatggattatttaagttcacatagcaacgaaaacggctgattctcccacgaacttagtttctttcttagttactaactatcaaacattcgtttcaaattctttccaatcattagcttaattaataattatgaaatgaatatttaatataaccgtggaacttgaagagaaaatattttttacatgtgaaattgattcttcactatatatgatcaggttagattctgtgtgtgtgtgtgtgtgtgttttttttttgtccaaatcaggctagctagagtaaactaaattttttactttgaaattcgtttttcagataactcagtttaaatgtggtgggctctgtattgggttgagttgggcccatattcttggagacgtgttttcagcatcaacgttcatgaaaacacttggacagctggtatcgggtcatgccccaacaaaaccggtttacccgaaaacccccgaactaacctctcatgctcgtaatgatggtgaagctatttccattgaaaagatagattcggttggcgagtattggttacttaccaataaatgcaagatggggagacacatttttaattttagcctcaaccacattgatagcttgatggccaagtacaccacgcgagaccaacctttctcggaggttgatattttgtatgcattgatatggaagtcgctactgaatatccgcggcgaaacaaacacgaatgttataacaatttgtgaccgtaaaaagtcttcaacctgttggaacgaggacttggtaataagcgtagtggaaaagaatgacgaaatggttgggatatccgaactagctgcactgattgctggtgaaaaaagagaagaaaacggtgcgatcaagaggatgatagaacaagataaaggctcttcggattttttcacgtacggtgcaaatttaacgtttgtgaatcttgatgaaatagatatgtatgaacttgagatcaacggagggaagccggatttcgtaaactacacgattcatggggtcggagataaaggtgttgttttggtttttcccaagcaaaactttgcaaggattgtaagtgtagtgatgcctgaagaagaccttgcaaaactcaaggaggaggtgactaatatgattatataa

SEQ ID NO: 149671 - DNA, 881 bp, Arabidopsis thaliana landsberg
tctcctacttcaacctggtcagaacttcacagctacaccaaccacaaattcttctaccttagaagaagatgattcgccttcaggggcttgtgatgaagaagcgttgagtatgggagactaccgcgacatactgagtctcataagagtgctttctcatggtcctcagagcaaatcagacgtagatggaatagtcgaactgtatgtaatcaatcaatctcttttgagaattttatcactttaaactacacatcgctcatgatttcatcttcttgttttggcattttataggtgtgctggtgcaggacatttgcgagaagacatcgtttactacagtaaagagctgaacaaacttcctattacaaaagatgaaaaccgttcatacatcatggacatgggtgttaaagccttaaggttagttacttacaacttcaatccggttaaaacgatccaaccaaaccatgagtttcgtttcttcccatatccaaacaaataatatgattgttttgtatgagcaggcgctacttttacctgataacattcagatcatacctctatagcacgtcgccggaagaaatgaaattcttggattggatgaagtcacggccggaacttggacatctctgtcataacctcaggatagataaataaaagtgtgattttgggtttcagtgtccatacatatatgtataaatctaggcaaagttatgttgtttggtttatacagagcttttagtgtataaaaaattgtacagccttctcttctccttcgtctgctttgtagagagatctctgtttataggtttgtacctttatacgcattgcttaaaaccctccagctgattcagcaggttattctaatgaacaaggtttattttttcctt

SEQ ID NO: 149672 - DNA, 488 bp, Arabidopsis thaliana landsberg
cccatatttttttaaaaaagtttctttgcatttttcacatattctgattttctaacttgggccaaaatactagtcagttgtcactgttctaatcaatgcagcgttttcacagaactcaaaaggttgctgaaaaaacatcaaagaatcattcattcccctaacttgtttcttaaatctgccgacattatcatatggcaaaagagacaccaaaccatcaagctggtttaagacgatggaggattcacgtctggctctgggttatcgtcatccatttcatcttcaccggtagagtccctgtagattttaagagacatcaattaaattatttatctcctgttaagaagttagacaatgaggatcaattcaagtgttggtagatttgagtaggaggaaggtttttaattacctccccgtagttgccccaccacgacatgagtaacaatgaagaggaaaatcatcatcgtcactgtctattcatagtggcagtc

SEQ ID NO: 149673 - DNA, 277 bp, Arabidopsis thaliana landsberg
gttctaaggtttgaaattctatatatgtatttagttatttgtcaatattttctataatttcatatttcagatttggtatataaccaagaagctccaataggtaacacaaattactaacattttggtattataggtgcttctctctatatgctctcttctaacagatccaaaccctgacgaccctctggtgccagagatagctcacatatacaaaactgacaagaccaaatatgaagccatggctcgaagctggacccagaagtatgccttgttttaa

SEQ ID NO: 149674 - DNA, 1220 bp, Arabidopsis thaliana landsberg
  unsure (1)..(1220): unsure at all n locations
tctgagatcgaagagaaagcaaaatcaaagttgtgatgaaatctctattgatgagaaccggttcgatgccggttnnnnnnnnnnnnnnnnnnncaggtggttcatcgcggaagatgacgcctatctccaggaccaactccgtcgaatcattatccagctacggcgagagattcgccggcgggaagatttcgatcgaggttaaggctaatgtagggatgcggagggtgttatcggaaagtgatgtgattagatctgagagaatgttgaaaagtgttggatctaagccttcgccggcgagaatcccggaggatgatgaagcgggggaggaagaaattaggtttgcagatggttgggggtctatgatctccggtggtttacctgtggaggagaaatgtttcacgggtggcggtgttggtggtggatctggttatagcggcggttatggaaacggaggaggaggcggttatgaagataagagcaagatcggtgattattatcgagagatgttgagatctaatcctaataattcgcttcttctgatgaattacggcaagtttttgtatgaggttagtgattttagaagctgaatttgagttttgggaattggagattaggttttgatttgggattgaatcttcaggtggagaaagatgcagagggagctgaagagtactatggaagagcaatactggagaatccaggagatggagaagctttatccatgtatggaagattgatatgggaaacgaagagagatgagaagagagctcaaggttactttgatcaagctgttaatgcttctcctaatgattggtataatttgtatactttgattacttttactaatcccaaattaattttctttactttgaatctaaaatgtttgtgttgttgtaactttgtagtatggttttgggatcatatgcacgtttcatgtgggaggcagaggatgatgatgatgatgatgaagaagaagaagaagaagaatggatggctgcatcaccactcatggtttctgcagtttagagactaacacgacgaagatgaagaagaagtaatggagactaagattatgtatcaagtatcaacctttttttttgtctatttcactgtctttttactaacttttgttgtaataacctgaagagtaatgaaaacatgtatgtgaaagaaaacgaatgtaaccttattataagagaataaaagtgcttttgtatagt

SEQ ID NO: 149675 - DNA, 603 bp, Arabidopsis thaliana landsberg
tcatttccttactgcgatctgattgttcagatatgcgagtttttaatgaattggggactttgagatattcttcaaggaagagacgggacgtggttgctccatcgcagagctctacgagttagttcagcatgccggtaacattttgccaagattgtaagtttcttttgttcttgttgttcagaatacgttgtcatttgcacactctgattttaactttgtagatactcatcaattgagtttcaggtatcttttatgtaccataggatctgtatatatcaaatccaaggatgttactgctacggatatacttaaggatcttgttgaaatgtgtcgagctgttcaacatcccttgcgtggtcttttcttgagaagttatcttgctcaagttactagggataagttacccagcattggttctgacttggaagggtaaggccacacgacctgctgttagatgattttgtttaagctatgaaacacatgttaagaggcaagtgttttgcttttctctccagagatggtgatgcacacatgaatgctttagagttcgtgcttcaaaattttaccgagatgaacaaattatgggttcgaatgcaacatcag

SEQ ID NO: 149676 - DNA, 2961 bp, Arabidopsis thaliana landsberg
ttgaatggagttcaaaagggagttatatcgctgtagctcaagataacagccttcggattttttcgtcaaaaattaatgagaagcggtgcatagcactatcatttgactcttggattggtgattccgatgaagactgtttcgtgaaaggtatgttgcaggttttggccttcttctttcttaccagtattttccgttttgtttcaaatttcattgttgttgtaaggtatttgagatcttttcttatggactgagtcatactgtattctggggcttggtcgtgatatatacaaactgatcctgttgaaatttctcgtttcctgctatctcccatcacacttccattacaaaggtcataaatggctctcaagttaagccctctcaatgaatgactgtttactaacaatactctgcaacagttgattctatcagatgggtacgcaacaactgtattcttcttggatgctttcagctgattgaaggcagggaagaaaattaccttgttcaggttatcaggagtccagatgggaagatttctgatgtgagtaacatttctattgcattgattttgctgctgaggcgtagatagttaggcataaccccttttcggatggaataaaacaataggatctgtaactttacttatatttttttaatctgatttgtgagtttttgaacttctttgcagggttcaaccaatctggttgctttatccttctccgatttgtttccatgttctatggatgatcttgtcccggtcggtgttggacctcatttactctttagctacatagaccaatggtacgtcaggctaattttactattctttctattctttttattttgatttctcttttcataaatactccacttttcttgctcgctgctagccatttgtcattctttcccactgtatatggaatcttaaagtttttgtccatacataaactatcttggaagggctgtaaattaccaagaatgttctaacgagaatggttttcaaatacaactaactatgatacgtgttccgcattatatactagaattaaatttgagctcatattatatttatccatttcgtttggagatgcaacaaagtcagtttaattgttcctgacatttcctctttttatattaataaacggactatgtaaactaccactattttcgatgtgaagatggtaaatgttgctgtgttttcacctcaccctacagcaaactggcggtcacagcaaacagaaagagcatagatgagcatattgttttactggattggtcatctggtgatgataaaagtgcagtttccgttgttgatattgatcgtgagacctttttgccaaggattgggctccaaggtatgcagtccatagtttctgtattgtatgtgtacttttcctacaatgacacgttcaatataaagaagataatttgttttttcagaaaacaacgatgacaatacagtcatgggactctgtatcgatagggtttctatagaggggactgttaatgtccgttccggagatgatgaacttaaagaacttcaaccatattttgttcttgtgtgcctcactttggaagggaagctggtcatgtttaatgttgctaggtagaaattataactctcagtggtttaactcattgctgttgacaacattacttaaaaaacattaatttgttttcccgaacattgttgcaggacggccagcttcatctgatactgatttggcctcttcttctgatatagaagatgcttatacccctttgattgaagatgacctttctaaacaatcttctgaaaaacatcaacagttgaatattgcagtacaaaatgatcagaaacacctcaacacagagaagttctctactgaacaaaggttgccaaatgaaaacatttctagcaaggaattcgagtctgtgaaaagctcagtgtctggggacaacaacaagaagcaagaaccgtatgctgaaaaaccattacaagttgaagatgctcaacaaagcatgattcctaagttgtccggaacaagttttgggcaactacccatgtccttaggatatgacaccaacaaatttgcaggattcggtcctgctctccctgtttccgaaaagcttcaaaaagacatatttgcgcagtccaattctatgcatttgcaggccaatgtggagtcaaagagtacagcagctttttttggatctcctggcctgcagaacgcaattttgcagtcaccgcaaaatacgtcatctcagccatggtcaagtgggaaaagcgtctcacctccagattttgtatctggtccctttccttctatgagagatactcagcataagcaatctgtacagtctggaactggttatgtaaaccctcctatgagcatcaaagataaatctgtacaagttattgagactggtagagtatcagcgctgagcaatttaagtcctctgctaggccaaaatcaggacactaatgaaggggtagagaaaattgagccaataccttctatccgtgcctctcaattgtcacaacaggtgaaatcttccttcgaaaaatcagccagtcatcagcagcacaaaactccgctcagtactggacctctgagacttgagcataacatgtcaaaccaacccagtaatgtaaggtttactcatgaattcatgatagtaattagtttctcaatgattttttcgtgtggatatgttttttctaggagagagtcatccgacactcatgctttcacaatcatgccttgctgtagtattttacttactggactgataccattagcgtaactgactcttccttttttgcaccagataaatgagatggcccgagaaatggatacacttttacagtccattgaaggaccgggtggtttcaaggattcttgcgcgtttatactgaaaagcaatgttgaagaactggagcaaggacttgaaagtcttgctggcaagtgccaaacgtggaag

SEQ ID NO: 149677 - DNA, 659 bp, Arabidopsis thaliana landsberg
atggtgtgtatattcaacaagaggttagatataagcaacatttggttgagatttgagatttccatagtgtaaactttgttgcttctttatgatttgacaatctatcttcttcttgttttgtcgaatagactaagaagtatttcaaagaaataagtactccaatagatgtgaagtatattgatccaacatacatgattcgcgctgtacgtgcaaatgcctcggatggtatcctctgcaccgttcttggacaaaacgctgtaagtcactcacacacacatctcttcaagtcactctctcatcactttagataagaatcttagaagtagaaactaaaaatgttccgatttgttttaagtccattgaatttgttaagcttatgatcttataaaaaacaggttcatggtgcgtttgctggatacagtggaatcacggtaggcataatcaacactcactatgcatatttgccaatcactgaggtaattgcatatccaaaatcagtggatcctaatagtcgaatgtggcatcgttgcttgacatcaacgggccaacccgatttcatctaaaaagatattattattcaatcacgaaacaaactgatgataaaaataagccttgaaatgtatagacagtagcattcttggttccttggtatgatgtat

SEQ ID NO: 149678 - DNA, 449 bp, Arabidopsis thaliana landsberg
tgtggcaccaaataataacatttgtttttgttgaaacataagcagctatggaagctattaatccagaacagagcaagtgttggaatacgacgatgaatctctctgtgatgggagcaatgagtttgatgcacccagagtaaagatctttgagggtgatactaagtttgtttctttactttttattttccatttgagtttgatctcaattgttcttttgaattttgaaaacaactttcttacatgaaaaaggaacataagacttggaaactgtttcagatcacaaccaacgaaactatcatcaactctgttccttgtctcattaagaatctttagttcatctcattgtgtttatctattctgtcaatgtcaactcttaccctgatcataagtttgcttatattgccaattctgttgattcagtagacaagtgtttggaggacagtcaatga

SEQ ID NO: 149679 - DNA, 1544 bp, Arabidopsis thaliana landsberg
catttttcatcgttgatcagtcgtcgatcctcttgagtgatttgattttagactttctacttatcaaactcgaaagatggattctgtccttgtagtgggcattgcatcggttattctcggtgcgttgatcgctgtactcttcttcggtagctacttccggaagcggacatcggaggtgcaatccatggccaaagcggagcctcaggatccgatccggaatccaaagtcgaatcatcctgctccgaagaagaatcatcccaaatctcaagcgtccgataaggtaaggttttaactccattttgttccgagtttagggatttcagatttggatatgagttgactttaaagctttctcttcttcgtttctaaattgcttgtggaatgcagaatcagaacaaacggcatcatcctttagatttaaacacgttgaaaggccacggtgatgctgttactggactctgtttctcgtccgatggaaagagcttggccacaggttagaacctataaacactcctacttagctaatccctgtcaagaagatatttttgctattttacaattctgatcacatttgttcctgtttttgatagcttgcgctgatggagtaatcagggtgttcaagctagatgatgcatcaagcaaaagcttcaagtatttcttcctatatataatctttcaatagacaatgttagccggtgggagtttactttgcaagcccattttcatgatctaactgttttttttgtttgctttctaaaattcagatttttaaggataaatcttcctgctggaggacatccaaccgccgtggcatttgctgacgatgcctcatctattgttgtggcttgtcatcatatgtctggttcatctttgtacatgtacggtgaagataagcaaaaggatcagcaagggaagcttcctcttcctagtatcaaatgggaccaccatcatattcatgagaagagatcagtgcttaccatctctggagctactgcaacttacggtactgctgatggaagtgttgtcattgcctcttgttctgaaggtatgtttttccatggctagtgtcactgtcatagcgatgttaaattggtttcagaatctctagtttaaaacttgtgtataaattgctaaagggtgatttcaatttgtgaatacccttatgttcaatataagttcttgtattgctgttcaaaatgtactgctctggtgaaatatcccttgttttttccttaaaccttgttattcgccagggactgatatcgtcctttggcatgggaaaactgggaggaatttgggacatgttgatacaaaccagttgaagaaccacatggcagctgtatcaccaaatggacgttttttggcagctgcagcatttactgcagatgtgaaagtaagtttttgtataaattcaaaccatcatgagtgtatgtgtgaccgtatctcatgtcttagcaagtgctttgtaggtgtgggaaattgtgtatcagaaagatggttctgtgaaagaggtttcaagagttatgcaacttaaaggccacaag

SEQ ID NO: 149680 - DNA, 1130 bp, Arabidopsis thaliana landsberg
ttctaacactgtggtgtttctcttgattttctatattttttctcgcagcaagccaatggaagaggataccaatgtaagcttccttctaatttctctcgctactgcttttctcgattcgctgtttgccataattcatctactgtttccagtttcatcaatcttagctgtctctagtacttgagtaggactgtgccactaaagattttcactgaatttttgttccgttctgcgttgaatgggcagtagagaattggatgttttcatcacttctgccctttgttgtaatgtcatttgattgttgctgttataaactccattagtttcctgcttgtatgatactcttaaggatgtgttctctccttaaatgttgtttctaatcatcatgcttgatactgtccttagcagggcaagactgaggaagaggaattcaacaccgggccactctctgttcttatgatgagcgtcaagaataacactcaggtatagagatctctaggagatgtattgagcttctgatgttagataatgatgttgtatatgaaaactgattaaatggatagatgtttttgaccttcatgggctaggtgttagacaatgaaatattgaaatgtataacgaagagtggttaaaatggaaaggttattaacaaggtcaacttttttatgttcaggttttaatcaattgccggaacaacaggaaacttcttgggcgagtgagggcgtttgacagacactgcaacatggttcttgaaaatgtcagagagatgtggactgaggtagccaatattcattatcctgaaatcagttttgtctacatatataacttgtggtgcctgagatggcgttggtttggtttaggttccgaaaactgggaaaggcaagaagaaagctcttccggtgaacagagatcggttcataagcaagatgtttctacgtggagactcggtcattatcgtcctcaggaatccaaaatgagaggaagagagacttagagacatgttccttgtttgttgtgctaaaactgataaattcttgtaggtagtagcatcttttaaagttattcgtctcattttcgtttatgtccgaattgacaagatcttttaaagatcttttaaagacatgttccttgtt

SEQ ID NO: 149681 - DNA, 383 bp, Arabidopsis thaliana landsberg
agaatctgctcctttagtcatcttctcttttgagaaaagatagatcttcttcaccttcttcattgatctcagatcccgatcccgtctccttatcttccgccggagagttattcatttttctcttctaccgaccacctgttaatcattctctctccccccgcagatctagagaatcggtatttatctccaaagaaaaattcaatcacaatttctcgttggattctccattaatttctcaaccaaattgctactttttcttttgtttgtggtttttgaagaattcgaatccttaagtagtagtggaatcatggcgctaagcatgcgaaaagcgatcggagttgttaaggatcagactagtatcggcatagcgaaggtagctagct

SEQ ID NO: 149682 - DNA, 478 bp, Arabidopsis thaliana landsberg; identical to SEQ ID NO: 10893

SEQ ID NO: 149683 - DNA, 4078 bp, Arabidopsis thaliana landsberg
cgtatatttacttccttcaatattcagagacacttgagaatgcacaagagatatatgctgcaagttaagagagagaaaagtaagctacaagaacattacaagaaagacaaaagagagcgctgatattggagtacctttgggggaatttgccccttttctagatagccaacgtaatccgaaactacagcagaactggtcgtagatgctttctggacaaagacaacatctagtcaccagataaaaacttttcaagacaaacagagctctgagaaagagggtcttacataaagagccccaccgactacagagagataccatggaggtctctctgctctgacccgcatagcaatcctactatccaaccaaccagtgtgaattttgttatcacggtaatcagaagcctggttgacaattgaaatgatcttgtcagggtattgcatacacagagtgtaagtttgtgtgcaagaagaaacgtacatgtaaaaggtcgatcgtgtagtcaacgttagtcctaatttctccacggatctgaatttcttttagcccaagaaccatattcgctatcgccagggctctggattccccaaatgcaaaaacatgtcctgaatggaagattaaaggaagtttcaatttttgtaaactcaagaaaagaacctagcagcccaaatacatttatttcattcaacttaccaaactgggaatccgagaactcgtggatgcctccaccagactgtaaaaaagtagtcgtaaaatttaaaacattgtgaaacacttatatagcagagtctctatagatataattaccttgacagagaagtacgcccacacatttggcttgctcttaaaactcaactcctgttgcaagttcatacaagtgttacccacagagttctcagtgaatgaactttcactttgcattccacagatatcacattacctgaactctaccgctggttggtttgaacccgtcatcaggatcctcacttgtcacacgtacagccacacaatgaccttttggccttatagattgagctttatcaaaatcaaaagggaaggctacaacagatgtttttcgccaagaatcataacctccaccatgttctattccatagaaccgtcttatctctacgaaattaaagagaaacagacagtacattattcgtgtgcatggataaagaagaggaaccgctgcctgtaagaaataaggacgtagattataccagggatttgccagagaggaattcccatccccacagcaacttgggcagcagaaagatttatctcggcaatccactcagtgacaggatgctcaacctgacctcaaacatcaagttaaacaagtcattcaattttcaagtccggaccttcaatatatttcaacgcaaaaagctgcagtatgaaaccaacctgtaagcgagggttaagctctaagaagtagtactccccagtgtccatactgtagagatactcaacagtagcagctccaacatagttaacactcttagccaaccttctagctgcttgttcaagtttcttgacagtttctggcggagccacagtaattggaccctcctctatgatctacgatacaaacgataaggtaagagctcatgcaataatttgcaatcgctaaaagggactataactcagttggagaacaaaaattgatgtatataactatataagaataaatggacagaatgtttttctatataaccactaaccagacaattaaaaatccagaatcaaccactaacaaaccttttgatgtcttctctggacgctacaatcacggctatgcagagctgaaacatttccatgcttgtcacagagcagctggacctctagatgccgactctatacaaaaaaaaaattagaaaaaatgaaatgtaaagaaaagcaatgcattactactttaaattctctagtaaagtaaccagataagaactcagctaagcttcgatcaagagatatagttaaggagccatacctgtgacgcaaccttcattatgaatattggtgagcctgggacctcaccctgaacttgcttgaatagagccctaacctcatcatcattatgaacctataaatttaaaaccagaataagtacttatatagtaatcggcttagtccacaatcaaaaggcatatctacagaagctgaccttcctgattcctttaccaccaccaccccacgatgctttgatcattgctgggtaaccgacaacttgacagctagcaatcgcttcttcagttgtgtagacacatgcttgccggtagatctcctctgggatggttaccaagttgctattaggaggtattttaacctgaaaacataggaattcagtatataaaaatgaaaatatatacctctggtacacaagctaagcttaacaagagtagatttacttacatgggagccactccatggcagagtgggtacatcagcagcttgtgcaatcaacgaagaaccaatcttatctcccagtgctgccattgaagatgctggaggaccaagaaatatgattccttttgcatctagggcatcaggtaattcggggttttcagatgcatgaccccaaccaggccaaactgcatccacgcgtgttacttcagccatctgcacacaggttgtagacaaagatgttcagatgaatgaaaaataactccaaagaccaaaacttcattgctgaaattgagcttaatacatgtgttctgtacagtaaaacacgataattcagataatagtagttcccaaaagttggattcacctccacaatcagctgaacgtagcataattgttaatgttagttcctccgggaacctcaacaggctgatcagcgattgtgatatgctccgcattgatcggcatgtcttcaggggttgccatcgccaccaacgatatggctttttccgtaccaaatgtttcataagcccatgttctgacgcgacgtataagcttcacagccgccattccattgttagctatcaaaatactatggatcggccttttccctttaagtgctttacagagctcatccacttgagacaccgtctcataatttataacaggtcttacagcactatgattcccgttaaccgaggcagccattgtcactgcccttcaagcttccgcatatatctacaaaacagccataaacacatactgaatcactttacaaagaaactgatgctatctaccaaaatgacttgaaagaacataacaggaatattaaaacaattcctaatctggttgcttaatctaacaaacaaagatgcttcagattacaaggtggaattaacaaagatgacagcaatgcttttgcgtaatcacatgaagaaaaaaagagtatagaaaaagcaaaacgcaatcataagcaaagatcttgcaagtaagaaagcatcattacccaataataatgagttcctttagaaatctgagagatctcagaactaatgattataaactccccaaacccactaaaattctacaatattgaagtcgaaaactcaacaaaacccaacttcaacaagaagttaaaatcacaaaaacaagtgcaaattctcattgctaaaccataaaaatcaaaactttaaaacacccaaataacaaaaactcaacaaaacccaactccaacaacaagtaaaaaatcacaaaaacaagtccaaattccgattgctaaaccataaaaatcaaaactttaaaacacccaaataacaaaatcagcaaaagcagaaaactttaaaccttgtaaggaagcagagatacaaattggcttaaagaggcatcagagaaggccagaattgtgggtgtttagctaaagaataacagagaggaggacatggaagagaatgagggagagagaaagggtttaaagagagggaagagagaagagggtaggttggagttagaagaggagaaggaaagtggggtcagaagagttaataatgggagatgatgaagagaggaagaagatgaaggagaagaagagaagagagagcacgtggtctctgcctccgccacactccacaccttctccattgttttttttcgatccctttttgttaggaggcgccgt

SEQ ID NO: 149684 - DNA, 2889 bp, Arabidopsis thaliana landsberg
gaaccgacaagagtcctaaaaagggcaaattttgtaagaaagccagctttaatctctctatcggagggaacacgaacgttgacggagaaagaatctctcagcttctttttttttttatagatcctttcacgcgtcaaatcattttcaatctccacccaactctcaaatccgtggcaaacgtttaagggtcatcttaaagttccttgctttttccccggaaactccatcaatgtcgacccttttcgtttctcgctttatctggcaaaaaaaaatttcaggatttcgctaattgattcaatttgacgcctagaatatagctgctttccttattttggtggaggttaattatattgatgatagggttttggaaacttttttaattgattttagcttatagagaccaaaaaccctagaaaaatatgattcctacgacggcgacggttgatgatgagccgggacagattaaacgtgctctgattgatgcttctgccggagctatctctggtggtgtttctcgttctgtaacttctcctcttgatgtcattaagattagatttcaggtttggcttttgttctctatcctctgagtgataaagtctagatttttatttggcttagctaaagaatatttgagttcgttgttgctgtggatgctttggattgtattgaggaggttccagatgagaattatcattggtggacaatgggtagctattatatacttagagatggttgctgaatgtcatatgtgattgcaggttcagctagaaccgacgacttcatggagtgtggctcggagaaacttgtcaggagcttctaagtatactggaatggtacaggcgactaaagatatatttagagaagaaggttttcgggtccgtctcttgaacatttccgttttctgaaaccatttcttttttgtttatagtatgttagtagtttcaggtttgtggcattagtttttatgaggtcttgctctctgttttgatgtttgatacttgttttctttaggggttttggcggggtaatgtgccaactttgctcatggtcatgccgtatacttcaattcagtttacagtactacataagctgaaatcttttgcatctggttctactaaaacaggtaatttagtctactgagtaacattgcggtctctctagatatggtatttggtagattgccagtgctattttttgttgtagtctggtggctatcttaggggtatcatttctgtttgttgattgtgtatttctttgaatagcttttggaattgactcgtataatttagagatcaatgtggttccttacttattagctggttgtgatcttatggcaatgcagaggatcatatacatttgagcccttatctatccttcgtcagtggagcgttagcaggatgtgctgctactctaggatcttatccttttgatcttttaaggacaatattggcctcacaaggggagcctaaggttagttgcgtgacttatgaacctgtaatataatttaaattccatgtactggggattttcttgtttttcttccttattcatgcttaagtgacatatagatgactgactgatgactgtcgacaggtgtatccaacaatgaggtctgcttttgtcgatattattcagtctcgaggtataagaggattgtataatggattaacaccaactcttgttgagattgtgccttacgctggcctgcaatttggcacatatgatatgtttaagcgttggatgatggtaagagcataggaatatatagtttatgtgtgatcaatgttcatatgataatcaactcaattgattatttttaaacaggactggaatcgatacaaattatcctccaaaatcccgatcaacgtggacaccaacctttctagcttccagcttttcatttgtgggcttggggcgggcactagcgccaagctcgtctgccatccccttgatgtggtcaaaaaacgattccaggtcagttaatctttacccaatggattctctgggaagataatgtgataggatccaaactattaaactccttatttattcacttcagcaagaactacacatcatagagagacttgattaatgagaatctctactcgacctaattacacatcccaaacttccttttagccacttagctctcttgctaacttactcaactatagttgctgagttgtcaacacatctactatctactacaaaccagctagggtaattacaatgctcctacactgaactagcgcaatgacttatcgtattcatgtggtttcatgttttgggtctatccttatgtatcttagactagactttcacatttgctgccctatgatatgtgcttgctgagtctacttactgattccgggtaccccacttgttctgtcaccgtacctatagaaagaaaactccaatttgtgtgaaacatttcttaaatataaaagcttttcaaacttgccagtggatctccaacgcaatgaaaatgcaattgccttcaaacatgaaataatagaaatgccagatagattttgaaagtttcttttgttgcagattgaaggtttacagagacatccaagatatggagcccgagtggagcgacgtgcatacagaaacatgttagacggtcttagacagattatgatatcagaagggtggcatggtctgtacaaaggcattgtgccatcgactgtgaaagctgctcctgctggtgctgtaacctttgtggcctatgagtttacctccgattggttggagtcaatttcttggtagagattttactcttttgatacttatatcctactgtctctagcatttattataggctcatatgaacatcgatcatttttggaatgtaaacgtcaaagtgttgtcggcaactgcataagc

SEQ ID NO: 149685 - DNA, 2513 bp, Arabidopsis thaliana landsberg
cggcactttcagatcgagacgaagatggaaaagatctgtgtcgcagtcagggtaagaccgccggcgccggaaaacggagcttcactctggaaagtcgaagataatcggatctctcttcataaatcactcgacactccaatcacaaccgcttctcacgcttttggtaaattcatctactttcttatcaatcagtttctggaatttcaatttctacagatctgattgaaatcgtaagtctcttcctttttagttttggtgttgtttacttttttcttctttttgcagatcatgtgttcgacgaaagttctacgaatgctagtgtctacgagcttcttactaaggatatcatacatgccgctgttgagggttttaatggtaatctaacctaaattataaaacttgagcgatttcgtgagctcaatttttttttttttttcaagttttgatgtatggagcttctctgattttgttaggtactgcatttgcttatgggcaaactagtagtgggaagacgtttacgatgacgggctctgaaactgatcctggaattattcgaagatctgttcgagatgtgtttgaaagaatacatatggtatagtgcatagaattattcagtgatctgtgaagtaagaaaaagagtacagcttttgattcgtgtgtgttttgttctttgtttttagatatctgatcgtgagtttctcatccgggtttcgtacatggaaatttacaacgaagaaattaatgatcttttagctgttgagaaccagagactgcaaattcatgagcatttggaggttggtttgggatcagtttcattagtgatatcttctccattagtttgtttaagagttgttaaagttcacttgctttctcttgatgtacagcgtggagtgtttgttgctggtcttaaggaagaaattgttagtgatgctgaacagattctaaagcttatagattctggagaaggtttttaactcatatctaaactacaaagtagcgttcctgcattttgtttgtgcctaatgtgtattgacatggtcttctaattaacagttaataggcactttggcgagacaaacatgaatgttcatagtagcaggtctcacaccatattcagaatggtacggttcagaagctatgaacgagaccttctacttgtaaagtttttaatctgatacaatctctctggtgtgataggtgattgagagcaggggaaaagataatagttcttcagatgctattcgtgtctcagtcttggtgagtgataattttcactacagctaacatctttcaaaagtttcttgtgaaagttacataatgctatttttttttttaatgggtgttctttcaatggaatctagaatttggtcgatttagctggatctgagcgaattgctaaaactggtgctggtggtgtacgcttgcaagaagggaagtacattaataagagcttaatgattcttggtaatgtcatcaataaattaagtgacagtacaaagctaaggtactttcttacctttgatttggtttacttaacaacaatacagctcaccgcagctcatttctaacatttattattatagggcacatattccgtaccgagatagtaagctgactcgaattcttcagcctgcacttggtggtaatgcaaagacctgcattatatgcactatcgcaccagaagaggtaaaataagttgctttgtggttagcttttgtattttcttggctttaagtaatcatttgaagggcaagattagattgtttacttaccaaaggtacattgatgatgtgtgtagcatcatattgaggaatcaaaaggaactctccaatttgcaagcagagcaaagcgcatcaccaactgtgctcaagtgaatgaggtctgcatttatttaaagcatctaaacttctgttgattatttggagatatttgttactctcgtttttagatgttactgcgctacgttatttcttcccattacaaaggatcaccgcctacatgtgtccaattgactgttttttttcctctttatcggaatataatctgaccatgtttaaatgctgcagatcttgactgatgccgctttattgaagcgccaaaagttggagatagaagagctacgcatgaagcttcaggtatagtcacttttttttttcaattacatattggaaaggagcaacaatacgaaaattggtgatgtttgtagggatctcatgcggaagtgttggaacaagagatcttaaatttaagcaatcagatgctgaaggtagcttttttgcgctttttcttagtgtatacattgagttcaacattaagcatacacacgatacaaaacagctacacttttgtttgaattccagtatgagttggaatgtgaaaggctaaaaacacaactggaagaagagaaaaggaagcagaaggagcaggaaaattgcatcaaggagcaacagatgaaaattgagaaccttaacaattttgtcactaattctgacttcaagaggaaccagtcagag

SEQ ID NO: 149686 - DNA, 1677 bp, Arabidopsis thaliana landsberg
ctatttcaatggatccttcaattttcaagctccttgaagaagacgaggttaggtttctaatctcactcgtttcataatccaattttgtgtgatgtatctggaatcgtcttcgtggtttttgattccggtcgaattgtattgttttaggatgaatcgatgcattcaggagctgacgtagacgcgttccaagctgctctgaatcgtgatattgaaggttctatgacaacttcaatacccctcgtgacaaacccaggtttggcttctctacaaattcgctcttaaattttatgtctgagattttaatttttgtggtactattgtttaatgtaaagatagtatcttttggttttctcttggattggctgctttgggaagctttgacatgttagcaaagttgtgcttgtttttaatatatacagttttctcagataggttattactcttggaacatggataacttaagaagataccttggtaaaccttgctaatctagtgacatgtttggaagtttcagtcctgtattaaagcaatagttaaggtcatgaaatattagtttgttagggtttctgtatgttaatatcgggataagctttgtcattgccaatatagcctgtactagttgattgttgagtcattaaaattgatcagtgtgatgggatttaatagccagggtagacataggttggtgatgctgatactattttagtgttaggctttgttcttggttcactgcaatcttgacgatgattacgtgtctccttaaatcattattttctgtctctggtgctggaagtgatctctttcctcttactacaccattaaatattgaaatacaattaggttgtgatttgtggataggtgtatgagagctactgagtatgcattaatctgctacaacaaaatcctgtcttttgtccttttttgggtattatatgatttttcctccagtttaacttgtgatttgagtatcatcaaccaattgcttctattatttttataggaaacaaccattcttccagccagcagttttcgacatggaagaatggtattggagattctaatatcaatgtccagactcagcatagccttgaaagtactcagatgaaggagcaagaaggatcgactttagaaaatcaacatcaacatgatttgaaacgcgcaaatgaacctcatttacaacacaaccagcctcaagaccttcatcgagctggtcaactctgggagaatccctcgcaggtcccccaatcaactgggttaccgattagtgaaaagaatcctactggtaatgaatcagatagatcccataatcaagagagtgaatctcagtatatgaaactgcaaaagatgagtagtcaacaggctcggggagtggatccacctgttaaccctataaaccgcaaccctaagcaagtaccatttgctgctttgcttcctactttaatgaaccaactcgataaagatagagcactgcagctccgtaccctatatgctagacttaaggtatgtctatctgtgaaatcatatgacattctgttccaaagctattgtattatcatttctttccttctgctactttttttgcagaaaaatgaaatccccaaagaggggttcacacgacatatgaaagatattgtgggcgatcagatgctcaggatggcagttagtaaactccagcag

SEQ ID NO: 149687 - DNA, 482 bp, Arabidopsis thaliana landsberg
agaggatatggcgacgacggcgaagaatttgaagggtttctacaagcagactaaaagcaatatcaccggaggtatctccaagtccaaaccttcttcccggaaagtcgctcccaaacacgcggcggctcaaggttgtgatgttacccagaccgccgcattgatttcacacggctccgtcgatctcaacggtacggcttttattttctttgtaaattgtaacttattagggttttctttctattgatgatctgattccttattcatggtagaaaattagggtttaattttccaatcccatatgagatttagggaacaatcgaaacttggcattttattaagttgactagaaaaaaatttattttgactcaccccaaaggaggcacccgccgcgttttaattaacagaggattatgacaaggaggaggagatgcttagacaatttgacatgaacatcacttatggtccgtgcatgggtatgacga

SEQ ID NO: 149688 - DNA, 262 bp, Arabidopsis thaliana landsberg
agctgccaaaaattggtcccatcctgccagaagacattgatcgagctctgagcaacactcgaccatcggctcatctgcacgcccatctttacgacaagttcaatgatgattatggtagccaaattctcaagtaaattcgatgtaatatatacatctatgccatctagaacttgctcattatttgtatggaagcatccaaattacggatgctcaatgaacttttctgtcttaaattatgaataaatgctcctagttccttggg

SEQ ID NO: 149689 - DNA, 728 bp, Arabidopsis thaliana landsberg
cagggagatggttcacttggctattgatgggatgtggcaggtatttaaactcaaaaaatgcacctcgagaaatgatttttgccgtattgctgcaaagaatggaattcttcttatgctagtcaacactctttatagcttgagtgaggcaactcgactggcttctatatcgggggatgcattgattttggatggtcaaactccacgagcacgctctggtcaacttgaccctaacaatcctatctttagtcagcgtgagacttcacctagtgtgattgatcatcctgatgggttgaaaactaggaatgggggtggtgaagagccttctcatgctttaacttcaaattctcaaagttcagatgtccatcaacccgatgccttgcacccagatggtgataggcctagattaagcagtgttgtagcagatgccacagaggatgttatacaacaacataggatatctctttctgccaatagaacatcaacagataagcttcagaaactggcggagggtgcgtctaatggttttcctgttactcagccagatcaagttcgacctttgcttagcttattggagaaagaacctccttcaagaaaaatttctggtcaactggattacgtaaagcatatcgctggcatagagaggcatgaaagtagacttcctcctttccatgcatcagacgaaaagaaaaccaataaagacaaagaatttataatggctgcatttgcag

SEQ ID NO: 149690 - DNA, 710 bp, Arabidopsis thaliana landsberg
  unsure (1)..(710): unsure at all n locations
tcgccgctcaaattctccgccgaaaggtttcgtctttcatcatctcagattctctattttcgactcctcaaaaacccttttttaaccctcttnttctgtgttgtgttntcagattcagaacgaagcatcgaatcttcaatctacagctaaagatgctcttctcaatgcccttcttcttgctgctaagagatatagctccggtgttcctcaggtattgttgtaccctttttgtgtttctccggtgttatgaacgaaacgattgtgtgtttatgtgtgtttgtggaattttgcagctattgacgcagatatgtttagctctctctgcgcttcttcttcactcggatccttattcaaagccctttgataagttaatgttcgcactccagaatcttcaggctcatgatgatggtaatgtcgtcttgcttgagcttctcactgtgcttcctgaagaaatatctgatactcgccatttttctcatcactctgatcttcgtcaggaggtttcttccttctctttcccctttctttctcgaagtctgtgtttttttttatcctcgttttacttaacctcgcttttcgctctgtaatagcttctctcgcatacttccatggttcttgatttcttactccagcagtctgagaaccaatttgtctctcctctttacccgcatgataacaatcgcaaaatacttcgttgcttactgagttgg

SEQ ID NO: 149691 - DNA, 9076 bp, Arabidopsis thaliana landsberg
atgcatggaagcgtttcaggatatcttctagtaaatgctgaggttgagtccatgggaagagctatcgatagtggaggtggtattggtgttaaaacatctccgcgccgaacagctattgagaaggctcaagcggagctaaggtatttcagattgagacatcttgatcttctgcagtgtgtttaaatgctctataatttctacagctttctattatttccaatgtgtaacaaagatgcttatttcaacaggcaagagtatgatgttcgtgaggaaaggaggagagaattggagtttctagagaaagtatgaatacctatttccctgttctataattgttttgtgtgtgtgtgtgtaagaacttatgatgacaagcctttactcttctatctgcttcagggcggtaatcccttggatttcaagtttggtattgcaacttcacatagcgtccaatctacatcactcacagatcagcaagcagagcattttgtaaacaggtacattcgtgtttggtgtagttcccacattaatttcatggaataactcatcattatttgcccataacccccacagtgaagtcaaagatagttttgccctgactgcctcaccacatggtgactcggtggagagtagcggtagacctggagttcctacaatttctgaacccaatacaggagataatcttttactgtttgattctgaaaacaagtcagttgaaggggaaagaaatttgagacatcctaataggcaaaacagaacttctgagtcagaacgatcttccaaagcacacaccaaccagaataccaaagaaacagaagattctgccatctttcgcccgtatgctcggaggaacagatcgaagataagtcgggatccagcacggtcaagctctacggatttagttcagaatcgtggtggtcttgcaacgtctatatctattcgcagaggatcagtggaaggaaagggttgcattcccgaagcagccaatcaaaaggatatgcatacaacttctgtatcttgtccagtatttgcaaattcaaatggtaatatcgttccgaaaaatagagtttccagcaattcgctgaatactaaggtggatggtgaacctgttgtacgagagagtactgctggatccaagactagtctattgaaagatgaagccgacatttcatatagtaaaagctctgcatatttgccagttggagagtctggccttgctggggagaaggcacaactagtttcgactggtggttctcccaaagctgcaacaatagctggccagaaaaatagttctacccaactgaatggcctaagagattccacggtagaggaagaaagcttaacaaatagaggagctacagggactaatgggttagagtcagagtcttctcatgcgaacaacgtagaagtaaatgtagataatgaaagagatctttataaagtggacaaacttgactctcatgaaatctctatgcagaagactttgagagtagaggggttactggatcaaacagttggtgaaatgaccaaaactaagattgaagatgagacaggtcaatctaccaccattatcagtgagtgcattcctgaatgtgaaatgcagatgaaaccggttaaaattgagaatcaaagtcacagaagtaaagctgagatgcaaactaaggagaaaagttccgagactgagaaaaggcttcaagatgggttggttgtactcgaaaatgacaggaaagttggtagtattttacctgaaaatcctagcagcacgttgtgctctggaattcctcaggcatctgtagacacaagttcttgcacagttggcaatagtttattgtcaggaactgacattgaagcgttaaaacatcagccgagctcagatgcagttatgttagatactgtcaaggaggacgctattcttgaggaagcccgaattatacaggttttctttttaatcttgacttgatgatttttagctatctagttttcgtagaagttatgatgttatgtacctattcatctttttatgtatgacataatacattaacaggcaaagagaaaaagaattgctgaattatcttgtggtactgcaccagtggaggtccgtgagaaatctcaatgggattttgtcctcgaagaaatggcatggctggcaaatgattttgcgcaggtctggtctagttaaattatctttctaacataaattctatatatctgcatggaaaatgctgcattttgtggatttttgttctgtttatttactacggcgtctggacattcgtcttcttaaatgagcttgtccacttttatgttactggaacatttttccgggactgttctaattgcattctgttaccttttttcttttcatcttctaggagcgcctttggaaaatgattgctgccgtacaaatttgccatcgagttgctttgacttgtcagttgagatttgaggaacgaaatcagcacagaaagctgaaaaaaatagcttcagtcctatctaatgctatcttacaattctggagttctgtggaggccgaggttcctggggagctggaggagacgagcttgggaattgttaaggtatttgactgtctgacctcttttatggtttttgatgacaatgatgatcatatggttctttccttttcttttaaattagaattatgcatatatatatacattcgttgaattaaagtattgacaacactgacattctgagaaaccatattattatgtttgtgactagactgcaaaacaacacaattctactgatatttccttcttatgattgagaagcctgatctttcttatttgcttgaattgtctttgataattacctacaggagtctctggttctgtcgctccttatgttatgatttttgtaaaacttaatggtatcatactaaataataccttggttgtatgcaggagacttgccaagaatctaagtgtttgaatggcagaagatgtttagctgcgggtgtcaaggaatatgcaagtagatttttgaagtacaacaactcttccatctcctatcattcagctgcaccgtcaacacctgacaatatgtgcgacccagaaatattggatatatctatggttgatcagcttacagaagtatgaacttctgaaaagattttccgcagcctcagttgaacactattgttgtggatagttctacattattgctaattgagctttattactgtgcaggcaagcctcttttattcagttccatctggtgcaatggaggtgtaccttaagtccattgagtcgcatcttacacgttgtgaggtatgtgagattgttctatgctaggagctcgcatattgtaaccttgatggcgtatattttcctgagaatatatatctgttctccaaagatatttaacagtatttctctgttcccagaagtctggaagtagcatgcaggaggaggttgatacatcagcctatgatactgctggaggtatgcacaattctgggttgtttgagcttcgctggttggttaaatttttgctaattttttttctctaattgtagatataggatataatgttactgcgttcgatgaggatgaaggagaaacaagtacctattatcttccgggagctttcgagtctagcagatcatttaatataagccacaaaaaaaggaagaatctgatgaagtctcattctgcccggtcatatgatcttggggacgatttaccatacgtcaacaacacaggtggctctaactcatcaagtttgatagtaaaaaggcctgacagtaatattaatgccggctcagttccgacaaggcgagtgcgcactgcttccaggcatagggttgtgagtccttttgggtgtgctactactgggaatttaccagtgccctcgaagacagatgcgtctagtggggatactagttctttccaggatgagtatagtagtttgcatggtggatcggcagtccaaaaaggcacagaggttgagtcaagtgttaattttgaaaagctgttaccttatgacatggctgaaacctcaggaaaacctaaaaagaaaaagaagactcatcaggtagttagaaatatcagcatatctcttactattgcagaaaatagttgctattagttttagttgacattggattgcaattttcaatttcatttgttgcagggctccgcatatgaccaaacttggcatctcaatccgtcagtccatgttgaacaggtgaattcatgataaaatcctaagaatcaatttgaacaaatgtttagggaaaggcgagtttaggtggtgtgaattaatcaatattattgcttgactagcgtgataaaataatttttgcctcttgcttaactggtttgatacttgagtcctactctttggattaaaaacaaagttattttttgtttccattttaatcttgaggaggtgactattaaacagtttcctattatttgaaatgagaactttaagttatatagttggtaaatgtttaccatttagtagtaattgacttcttagaaaggattctaattcatccttatttgggcagaaggaccactggaagaagcgaccagagaataatttcgatatgaatggtattatttgcaaattcattttttactttgtggtgcattgtagttcttcagcggctgggggatcctcagcctctgcctgtataaattaaacaatactcctagaggatatcatgttttaagcagcatttttacgtacatcttatcattaaccaccaattatacaactaaagcaatgattatcgtttataattctgtgacatattttaattattttttgtaaggtctgtatggtcctcatagtgcaaagaagcaaaagaccaccaagcaattggtagagaataattttgatatggctattcctcacactggatcgattccttctccggctgcttcccagatgagcaatatgtccaaccccaacaaatctatcaaatttattggaggtcgtgataggggcagaaaaataaaaggcctgaaggtatgctcttgaaggtttactaactccattcactttgtttaaaatatctgttttaaactagaattttgtttttctcagatttctcctggtcagcatggttctggaaatccatggtcactatttgaggatcaggttttttattcgtcatctttcattaacatcgatgtactgttggttgctttatgagtatctaatttattttttcctaccatataggcgcttgttgtcctggtgcatgatatggggcctaactgggagctcattagtgatgcaatgaacagcactcttaaaattaaggtaagtgcctgttgttttgaaaaatcttgggattctttctttggtacctttcgaacagagtggcagagctatacttcaatagttttttttttttctattctagtgaatggttgtgttggatattgttgtccaggttattgctttctcgtatcagtgaacaactggtatttgttactggctgattgatttttccactgtttctccagtgtatatatcgcaatccgactgagtgcaaggaccggcataagattctgatggataaaactgctggtgatggggctgatagtgcagaagattcagggaattctcagtcttatccatccactttgcctggcataccaaaggtttttctatagctctgagatggtgaacaaagtgtcttctatgcttagactaattaaatgccctggatatgtctgtgatattcagggaagtgcgagacagttgtttcaacgactgcaagggccaatggaggaagataccctgaagtctcattttgagaagatttgtttgattgggaagaaattacattataaaaagacacaggttagttcaccaactactttgttactgtttccaagcttgtaacctaaaactagtggatttctttctgcattttttggctagtcataattcaactgttgcctggtaatagggatagttcgttgtgtatgtactgtgtagtatactagcatcaaggagatgatatgttgggtgatggtagtccaaattttagtttttgagtcccttgtgggcagaatgctaaagggttcttatagtgccagagagtgttatcggggtttctgtggtttcttttgttcacggaattcagttttcaagttgcactggagctggtaaatgtttttgcttatagatatggaatttgagaagataggtttgcttaattcagtttttaatttgcttaataaagtttatgggtgaaaggcatatcttaatcacttcgacatacccaggtctgggggttgggaagtatagctgcaaatcttagcaaagatttgctgaagtcacattgtagtttgaagtatgaatctactaaggacctaaatctgttttcttgttgctgcttttgtatttttgcgactgtttcatctatcttcaagaatgatggtcgggatcccaagcaaatagtaccagttcacaattcacaagtcatggctctctctcaagtattcccgaataatctgaatggaggtgttcttacgtaagttctgttgtttccttgtattcacatacatcttgacttctactcttgcaaattctaatattttgctactctccggatgaaggccccttgatgtctgtgacgcatcaacttcaggtcaagatgtattttcacttgaaaatccaggtcttccaatgttgaatcagggaacgccagtgctccctacttctggagcacatccatccactcctggatcatctggtgttgttctgagcaacaatttgccaaccacatctggcctacagagtgcttctgtcaggtagagcttttactgaatgatttgttttggtgaatgcacacgtctgtgaatctccgctcaatttacttgagggttattacttcttttgattgttgatatatttttttctttgtagggatggtagattcaatgttcctagagggtctttgccacttgatgaacaacaccgactacaacaatttaatcaaacgttatctggtagaaacctgcagcagccctccttatcaactcctgcagctgtctcaggatctgatcgtggacatcgcatggttcctggtggaaatgctatgggtgtaagtggaatgaacaggaacacacccatgtcaaggcctggttttcaagggatggcctcagcagcaatgccaaatactggtagtatgctttcctctggcatggtagaaattccaaacactggaaatattcattccggaggaggagcttctcaaggaaactccatgatcaggcctcgtgaagctgtgcagcatatgatgcgggtaagctacttggatttttttactgctacgctaattattacacttcgttttacgatttctcacatgtgggaacttaactatctatttcttacttcactacctggacttatttatctcgctctttgtttagtttgtagacgttcagcgcttctaatttttgtcaaccgctggtcgattgtcattttgaaactcgttgacaacattacgaactctacaatggtgataaaaactgatattcatgagtttcagatgcaggctgctcaagggaacagtccggggatcccagctttcagtaatttgagttctggatttaccaaccagacaactcctgttcaggcgtacccaggccatctttcccagcagcatcagatgtcaccgcagtcacatgtgcttggcaactcgcatcatcctcatctccagagcccaagtcaagccactggggcacagcaagaagcatttgctatccgtcaaagacaaattcaccagaggtatttgcagcaacagcaacagcagtttccagcatctggttctatgatgccacatgtacaacaacctcagggctcttctgtttcttcttctccacaaaacagtcctcagactcaaccacctgtttcgccccagccattatccatgcccccggtgtcgccctctcctaatattaatgctatggcacaacagaaacctcaaaaatctcagttggcgcttcatggtttgggtaggagtcctcagtctggtacttctggagtgaacaatcaagctggaaaacaaaggcagcgacaacttcagcagtctgcaagacagcatccacaccagcggcagccaacacaaggtcaacagctgaataaacaactgaaggggatgggtagaggcaacatgatccatcagaacatcactgttgatcagtcacacctgaatggccttaccatgccccaaggaaaccaggctactgaaaaaggagagatagcggttccagttaggcctgatcagcagtcaagtgtggggactaccacgagcacgaatctgcagtctaaaccatttgtttcgcccttgtcttcaaatcattcacagcaactgtcaaaatcattccctggtgctttgcctccatcccctcaacaacagatgcaattacattcagacaatagcatccaaggccagagctcacctgcgaccccatgtaatattttatccacctctagcccgtcaattgcaccagcggttgcaccttctaaccatcagcatttgttgatacaccaaaagcagcgcaatcaagtgcaatcaacagctcagcgagttgttcaacataatcatctagggaactctgagttatcaaagaagtcccaagctgaacgcatgccacgtgttccacagtctgtaaccaatactacccaaactgttagtatgggtacgaccaagggtatgcctcaagcgagtaatgatttgaaaaacataaaagcagttggttctactgcggtgcctgctttggaacctccatcttgtgttgcttctgtgcaaatcactgcttcgaaagtagtaaacaattccaatacagattcagcaggaaatgatccagtatcaacaccgaaccaaggactagctcaaaagctcgggatcaagggcgttacacagagacaacaacagtctctaccttcagaagaaaagagaccgaaattgccagggaagccgactgtacaaaatcagaaacaccttgcttctgaggagcagcctcatttagaagaagcacaagaattatcatcttccaagcctcctgatacaaaagtggaatga

SEQ ID NO: 149692 - DNA, 885 bp, Arabidopsis thaliana landsberg
ccattgaaaaaaatggcggacgagagcagagtcccatcatcggtgtcggtaacagtcgcccacgaccttcttctagccggccaccgctatctagacgtcaggtaacgccccacctttctcttttgactatttcaatcatcaacatagcatcattaggatcttgatgtaatggggatgatgaatataggactccagaagagttcagccagggacatgcctgtggggcgatcaacgtgccttacatgaatcgaggagcatcaggtatgtttttatttggttagttgataactgagtgatggatataattttgtgattgtgaaacagggatgtcaaagaaccccgacttcctggaacaagtctcctcccatttcggacaatccgataacatcattgttggctgccagagcggtggtagatctatcaaagccaccaccgatcttctccatgcagtaagctccaccacaaagctcttctttctgacttttactttgttggtgatatataatttgcgaatttgcagggtttcacgggagtcaaagatatcgtcggtggctatagtgcctgggccaagaatggccttcctacaaaagcttgatgactcaccattcaccaaacatctttccttatctcttcgtctccttcttcttcaataatgcatcctttccgcatgtaatcatcaataaatgaccctcctttctctttgctgtctgatgtgatagcttggagggaggggttcatcgcatctttttacaatatataaaaatgcgagtgtgtgttgattgcatcgaaatctctatatacatagtttcaaaaaacaaatcaattagaaaggagaaaggagcatccgatcatcgattatatctacaagattgttaccttaaaggt

SEQ ID NO: 149693 - DNA, 2145 bp, Arabidopsis thaliana landsberg
  unsure (1)..(2145): unsure at all n locations
gtgcaggaatatgttgaagctgctacgttttataaattctgtttgtctgggacgctatgtactctagatgagattaatacaacgcttgtaccacttagtgacccttctttagagccgttgcagatcaatatccttgactatattcttggggtattttttagaccatctttatttatggttaatacatactgtcaaagattttcgctattgtttggagttctgaattgtgtttgattattgtttgttacttgcacagcttgcagatttgacgggagagctaatgcggatggcaattggtcgcatatcagacggtgaaatcgaattcgcgcagaggatttgtcagtttgttcgacagattcatagggaactaatgctagttgtgccaaagatggatgacagttacgacatgaaatccaagatggaagtgatgcttcaaagtgtgatcaaaatagagaacggtatgcacaaatctcatatcctcactctattagataccaaccaatacgtttttgtaactcttttgcttgtttgtttgtttannnnnnnnnnnnnnnnnnnnngtgagaggatcagagtatattccattgcttggagatgatgcaccaacatcatacctattgggagctgcagatgtcgaatgattaaaagtgagtggtcttttccgtctctcggacacattttaaagttcttgttaaggttggtgtgtttgcgacaagtaggatcgttttagtatggacttatcttcagagaattttagccacttcttacttctgaggaactttaaatttgtatgctgcaagacttttaagaaacaaatggttagaacaagatgtaaaacttttcttttgttgaatggaagctaatttataatagaatctagcaattactttattattcaagttaataattttggcccttcttcactttttctagatctttcgtaatccagaaagtacattttttggttcttgctgtttgtttgtgcttaatgaggaaacatatatagatactcttatcttttatgcagctacatataatgcttcttattatagttcgacatttggtacttttatataggattttgacattttttataaatttatatctatgattcatagatagagttttattttgaaatcataaatctttcttttgtaaagaaagtgataaaaatagagaaaaatctcacattttaagatgttcataatctagttatatatagagttatgtgcaagcaataccacaatagtacaatctgtgtgatatgattattgggttttgatgtttttcctttttatttttaagatttcatggcttatataaaggatttttatgctaatgaaaacacaacttccaacaattagcctaattctctgagagagacttgggttaaaaggaaggattgtttaaatctctctttctttcttacgttaacaccgattactagataaaagtcgaagtgttacaaaaaacgtatttagtcagggcagattctcttttattaagaccctaaagttgtcttgttgtttctttgtgcacggctaaaatcttgttgattaaatgtcagttataagttacaccttacataagtgtaagcgatccaaattggtatgttagtgatgcaaagtataccttatatatactcggaactttactgttttggttgcttatcttgttttaccatccatctttcttgtaggatggggaaaagaggcaatgtgctaagctaatgaaacagttaaatgaaggttagatttttttattgtacgtcaatgctattttcccccaatgtttgagctgttagctccttttgtttgtcttgatagtttgatttatgtggaaaatgaatgtttgcgttgtgttcttatgttagatcaagtgagtgaagctgaatctatggaagaagaaaagcagagaggagccgaacctaaagaagaagaaaagcagagaccgacagaaaagttgaaaagcgatgaagctcttcagttgaacatcatggattcagagtctatcgaagctgctgtcttggacttggaagagatgattgttcgtttcgagtggctgaaagacatcttaactcctgattcttcggaaaacaattcctggatatacgaggattatcatccatcctcctcaagaatgtga

SEQ ID NO: 149694 - DNA, 1234 bp, Arabidopsis thaliana landsberg
accactacatatgttttggcagctgtcttggggcgtcttccttggacctctgtgtacagaaacatgaaacagtgtccaggggcatacacttacaacgggattgtgattgttcgaatcgatgctcccatttattttgccaacataagctacatcaaggacaggtgaaattgacatttggttcctgacttgctttctgttatgatccacataaagaatcaacacaacaacaccatgtttcgaaattgcaggctacgagaatatgaagttgctatcgacaaacacacaagcaagggcccagatatggagaggatctactttgttatcctggaaatgtctcgtaagtccaatgtttcttctattcacagttcgaaacttacagaggtgattaatctaatcgacaatgggtgggatgtaacgcagctgtcacatacatcgactcgagcgctgtagaagctttaaaagatttgtacgaggagtataaaacaaggggcattcaggtgcaaacctgatatcatcatcattatttagtacttgtttctaagttgtcaataccttgatgattagttggttttctatggatcagctagcgatttcgaacccaaacaaagaggttctcttgactctagcaagagcaggcattgtggaacttattggcaaagaatggttcttcgtgagagtacatgacgcagtccaagtttgtgttcattacgtcaatagacccacagatgtagaagaaagcagcaaaccaagcttatggagaagaagcggcctgaaaaactcatcgacctacactgaagttgaatcgaacatagttttagagggaaccattgttgtcaagagagaaatagagacattgaacacttcgattctttttacaataatgtaatgtatgtatcaaataaagcattcactttggttgagaaaaatatgattcccatttctctgtttcaaccttaaaaaactatttcttatgtaatgtatagaaaagcacaataaaaattggaagtcataagatttattgatgttaagaatagaataatagtttggcaaccaacagagataatccataagacgatcaaatcaaccaatcctgggacatctggggcaatatcatagaaatagaaatcaaaacgattaaactaaaagatagaacatgaaaatgcatgagagcgcctttaggttttggggtcaaaagctttgtcgttgtgaggatccttttatttccagaagctca

SEQ ID NO: 149695 - DNA, 705 bp, Arabidopsis thaliana landsberg
atgaggtgggagagggtccaacaagtgggtctcggtgattcttcttctttcggccccggaaagagatggggacacacttgtaacgccattaaaggcggcagatttctctacgtatttggtggctttggcagagacaattgcttaacaaatcaagttcatgtcttcgacgctggttagtatcttttctacaaaatgtcagttcttgtccgtcgattctcttagtgggttttgcttaaagtcttaatctttgatgcatctctgtatgtatgtatcgatgattttgttcaatttgttcgtgcggtagaccccactctcacaaacttatcttattttgttgcaaatcttgatctttttcctttgtcctttagtaacctactcaatgtttctttctttgttataccttacttgaatgatttggactttatgatcctttttcaagatttaatatatactatttgttgggatgctattttgtggtttactcgtagtcatgttttcaaaattttcattgttgaaacaagtctcatttgtggcaattttgttgcagagacgcagatatggattcgacctgaaatcaatggcgtaccgccctgcccgagggacagtcatagctgtacaacagttggtgataacctttttgtgtttggtggtactgatgggaccaaatatctcaacgatgtgcacatccttgatactagtaagctt

SEQ ID NO: 149696 - DNA, 667 bp, Arabidopsis thaliana landsberg
ttgaagcttgacacatcaatgttgaataatatcaaaaatgattttgatttctgcacgaagctagttagtgaggagagtcttatccttataccaggtattgatctctttaacaatatacaacatcttaagaacttggggctcccataatcatcttcttacatatgattttaatttataaatttgcatcgttaattatgatcaatctttttttatttacttatttatatttattttgtgttgaaatttttaggagtggctctaggggcagagaattgggtgaggatatcgataggaaccgacgaatcagtggtacaagaaatatttgacagactaaaaggtttctatgatcgtcatgccatctccaaggaagctatcaaactcagtggccatgccattaaccagatcgtcgtctctgtcaactgattgtagtagtcctatgccacaagtccacattataatttgtgcgtaattccttaattatcaggaacacaatcaagaaaaatagcattggataatgaaataaagatgtgtgaaaaataaaaggatatttgttttcattattatactcattttcaacatagtttttgatacattgtctatataaaattgaacaagtgaacaaaaagaaagttcaattaagagtgttcttcaaaagctctctaattct

SEQ ID NO: 149697 - DNA, 939 bp, Arabidopsis thaliana landsberg
atggtaagcaaatttgcactgccttcctatcaaaaccaccatttgatcactgtggtttcaatactcaaaattgttttcttcgtctgtgtctcttaggcttcggtagcagaaatgggtagtgcggagaagagaacaaggagaggagatgcaggggaagaggatgttgacattggagaggacataccaatcgaagattatccatctgtagagatcgaaagagatggtactgcagttgcagctgctgctagtagtggttctagttcttcaggcagttccagttctagtggtggtagttcctcgtctagtggtatgttttcataaacccttttcctcttgctagaggtttcccctattcttgtgtcgactctaacattgtaatgatctgcagattcagggtcaggtgggagttcatcaggtagtgattctgatgcagatagtgttcaatcgccatttgtggaagcaaaagaagcccaatgttaaaatcatttgggaatttaaccgttgattctgtcctgaagtactaggaacgtttagctgagggtgtaaagggaggaatgaaggggaaaactgaaggaaaggatttgttttttctttcgatgataaacttaggaagcagatgtagttagaaagaaaaaatgtaataggtagatagaaagagaatgctagtttaagcaagaagaagagttcgttatttaataccttttacatttaggagttgtttagtgtatttgtgagatgctgaacagagggtgagagtgagtgggtaggtactgtttgagaagaagaataagataagagtctttttaggttctatgactttatttatttatctttgttagtaggggtaaagagtctggttgtggtaggaaaaatggtgattgaagagaaaaagaaatcaatgcaatgtattaaatgaaaatggttggcatattaaaaaag

SEQ ID NO: 149698 - DNA, 1019 bp, Arabidopsis thaliana landsberg
tacagattgatgcccatgctggtaatgtcagcgatcttgctttctcccaaccaaaccagcaattatgtgttgtgacttgtggagaagacaagtcaatcaaggtttgcatcttgacgtatgtttttacatttgtataatgagaccatcctgcttatataaataatttctatacaggtctgggatgctgttaccggaaataaattgcacacttttgaaggtcatgaggcacctgtttattccgtgtgcccacaccagaaagagaatattcaggtagagtagaatgcataaagtgtctcttgctctttattttaaggcatccaattagatgcaatctcgtttaccaattgtctatttggtgttctctgctcaagcagaatgcctaatttctcgcatttccatcttttgtcaaatttatgttatgataattacaagtgtattgctatacaatgatgtgagcagttttatgtttctcaatctacatttatagtctgtgcaagatttttcacttttgctctctttggccattgagatagttataatggggattttttctttctgtcagttcatattctcaactgctgttgatgggaaaataaaggcttggttatatgacaacatgggttctagagtggattatgatgcccccggtcgatcttgcacgtcgatggcatattgtgctgatgggactaggtaaatgattcccatgctgtaatattataatcttattatgctgtacttatctatccttttgttcatatcttgtttatcttctcgtttgttgtagattattttcttgtggtactagtaaggagggggagtcattcattgttgaatggaatgaaagtgaaggagctgtgaagcggacttatcttggactggggaaacggtctgtgggggttgtccagttcgacaccatgaagaataaatttttggtagctggtgatgaattccaagtcaaattttgggatatggatagtgttgatctcttgagttcaacggctgcagaagggggtttaccg

SEQ ID NO: 149699 - DNA, 3197 bp, Arabidopsis thaliana landsberg
atgcggtgggatttgatcacggcgattgtggctgcgctggtggtctcggttttggctgatgaatcgggtcaaatggcaccgtatcggatccacacgctcttctcggtggagtgccagaactacttcgattggcagactgttggtttgatgcacagcttcttgaaatccggccaacccggtccgattacccggttattgagctgtaccgatgatcagaagaagacttacagaggcatgaatctcgctcccactttcgaagttccctcttggagcagacatcctaagaccggtgactggtaaactcccaacaccattactgactctcttttctttctacttttctgctcggaaacttcttgttgttgttgtggaacattagtgctagacagaaccacgttgttctgtctcttgcaccagtttgccattgctaacttgtgaaattgagttggatcaattagggccaatttggtttaatccttagtactggtcgctagctttggaatcttggtgatgggttagatggatctttgatgtatttattgaatgaactctataggtacccagcaattaacaaaccagttggagttctttactggcttcaacacagtgaagaggccaagcatgtggattgggtcgttattcttgatgctgacatgatcattcgaggtcctatcatcccttgggaactcggtgctgaaaggggaagaccctttgccgcccattacgggtattcctacctcctcttcagtcataacataaatcttaatcctttcttttatttgttgctcactccttttttctatatgatttagctacttggtgggctgcgataacctccttgtgcggttgcacacaaagcatcctgaactctgtgacaaagttggcggtcttctcgctatgcatatcgacgatcttcgggtcctggcccctctctggctgtcaaagaccgaagacgttcgccaagatacagctcactggaccaccaatcttaccggagatatttacggcaaaggttggatcagtgagatgtatggttactccttcggtgctgcagaggtaaagtcaccactttcctaatttctcttgctcatgctctgactattacagtcctcagtacgtctggtttcgattataaaactttgtgattttgtttttgatccacaggcaggacttaagcacaagattaatgacgacttgatgatatatcccgggtatgttccacgagaaggtgttgagcctgttcttatgcattatggtttacctttttccattgggaactggtctttcactaaactggaccaccacgaagacaatatagtctacgactgcaatcgcctcttccccgagcctccatatccaagagaggttagcttaacaagttctaaactcaatttcatatatctctaatgggtgcaattactgacgaaacacttttcgttgattaggttaaaataatggaacctgatccgtctaaacgaagaggtctaattttgagtttggaatgcatgaatacattgaacgagggactcatactgcgtcacgcagaaaatgggtgtccaaaaccaaagtggaccaaatacttgagctttctgaagagcaaaactttcatggagttaacaaggcctaaactgcttgcaccaggaagtgtacatatcctgccagaccaacacgagccgccacccattgatgaattcaaaggaacttatccaaagattcacacactgttttctactgagtgcacgacttatttcgattggcaaacagtgggcttcatgcacagtttccgccagagcggccaacctggaaatatcactcggcttctcagttgcacagatgaagctcttaaaaactataaaggtcatgacttggccccgacgcattatgttccttcgatgagcagacatcctctaacaggcgattggtaagtttagcagttaaacctcaggtctccaagttataacttgatcttcgtctgattttgctatgctcttaactgaatcaggtacccggcaattaacaaaccagcagcagttgtccattggcttcaccacacgaacattgatgcagagtacgtagtaattcttgatgctgacatgatccttcgtggacccatcacaccttgggagtttaaggcagctcgaggccgaccagtttcaactccttacgagtaagaatcttgagaaacaacaaaattctttttctctcttttccaatttatagatgatgcagaagtccccttaaaccgtctctctttcttttgtttagctatcttattggatgtgataatgaccttgcaagacttcacacgcgtaatccccaggcttgtgataaagttggtggagtcattataatgcacatagaggatctccggaaatttgcaatgtactggttgcttaaaacccaggaggttcgagcagacaaagaacactacgggaaggagttaactggggatatatatgaatccggttggatcagcgaaatgtatggttattcatttggtgctgcagaggtaaaacttattctgaactttcagctcaatgataatgattggtttcgactagtgtctaaatacaacatttgtgcagctgaatttgcggcatagcataaacaaagaaattatgatttatcccgggtatgttcctgaacctggtgctgactatcgagttttccactacggtcttgagttcaaagtcggaaattggagctttgacaaggcgaactggaggaacactgatttgatcaacaaatgctgggcaaagtttccagacccgcctaatccttcaacagtccatcaaacagacaatgatctacggcaaagagaccttctcagcattgaatgtggacagaagctaaacgaagctctgtttctgcatcacaagagaagaaattgccctgaacctggatcagaatcgactgagaagatctcggtttcaagaaaagttggtaacattgaaacgaaacaaacccaaggaagcgatgaaacaaaagagtcaagtggttcgtccgagtcggaagggagattcagcacgttgaaattatgggtgattgcgctgtggttgatatctggagtagggttcttggtagtgatgctattggtgttctcaactcgtagaggcagaggaacaacaagagggaaaggttacagaaacaagagacgaacttcgtactcgaacacaggtttcttggacactaaatga

SEQ ID NO: 149700 - DNA, 345 bp, Arabidopsis thaliana landsberg
tctgcagatgctgattctgtcgaagctatgataataaaacttaccgaaagggtaataattttctaatgataatttttggatcatagcttcataactgtaaatagacatgtgttagtaaatcaattttctttttgtttcctatatcatttgcaggagggcacacagcttaaatccaagggaaaggccggtgctgctacacgtgttgcagtgctcacatggcgatcacttttagttatgtcaagagaatggaaatactattggctccgacttatcctctacatgattcttacacttagtattggcacattatattctggcttaggtcactctttgtcttctgttgca

SEQ ID NO: 149701 - DNA, 477 bp, Arabidopsis thaliana landsberg
ctctctctttcccagcatcaccatctcttgtaccagtttctgattagattcaacaatgaacggcgcattaggtaactcctccgtctccgttagcggcggagaaggagccggaggaccagcgcctttcttggtgaaaacctacgagatggtcgacgattcatcaacggaccagatcgtatcgtggagcgctaacaacaacagcttcatcgtttggaatcatgccgaattttcacgcctccttcttccaacctacttcaaacacaataacttctcttccttcattcgtcagctcaatacctatgtgagtcagattctatccaaactcttctatattccaagttttgaattgacctaattttgatcaagttttcgaatgtaaaaggggttttggaaatgttagaacgcatctaggtctctgtgtgatttatagactgaattatggaaatgagtttatggattgtggattgattgattcaa

SEQ ID NO: 149702 - DNA, 1600 bp, Arabidopsis thaliana landsberg
atgtcgagcgatagcaatgatcttgacgaagatgagcttcttcaaatggcgttgaaagagcaggctaagagagatctcacctatcagaaacctccttcatcttctgctcgtaagcctgttgccaatttagtgcagcagcctcgacagcagaagcctgtggctgcggctgccgctccgccgaagaagtctgctgcggcggttaggaagccttccatggatgaggatgaggagtcggaggtggaattgcttagcatttcgagcggggatgatgatttggagagggaaagggaaataggtggttctagtggtggtgcggggagaggaagaggtagcgatgtacgagagaagggaagagcgaggaaggaagatgatggtgcttgggatggaggagagcctgattgttggaaacgggttaatgaagctgaggtatgtatttgtggcgagattcatcagtgaatgcttatggctttgcttgttcgatcaagttcaagagtttgaattcgatatattgatctatttgttgaattgtacgacactgaacaataccattcgtgggatacggtgaatgctatccatagtttctggtgttgagttgatatagagagcttgataattagcatgccattagtgattttagaaccatagcatcatatggatgtataagtggaaagatgaccattttcactgaaattccggtggcattttggcagcttgctcgtagggttcgtgatatgagggaatcgagaacagcacccgtggttcagaaagtagaaggtaaagcacctgcacctgggaagaaagtggctctgactagtttgcagtcacttcctcgtggaatggaatgtattgatccactaaaattagggtaattgctctcgtttcgttttgcttaccaaggaagccagtcagatgctttgtactctgtctttgatatggtagaacatatctaaacctgaatttgtctacttcataggatcatagacaataagacattgagattaatcactgagtcgtcaggcagcccatcaaaagctgagaaagtggataatactcttcgcggtatgtctttctttaccatatctacaactcgagtgaacagtagcacttacaattttttggagggctaattcgatgtacaatttccagttgtctaattgttatgtatctttttctgagtatttgcagaaaaattggtttacttctctgatcatttcgatccgaagctgtttctttcccgtattcaccaagacacgactgcagcagatttggaggctggtgcccttggcttgaaaagtgacttaaagggtcggaatctgcaaaggaaacaattggtgaaggacaattttgactgtttcgtctcatgtaaaacaacaattgatggtatgtattattacttccaactgaataatttatgtttttttcttctttcattttcatgttgaccactgattttcttaatagatattgagtcaaaactgaagcggattgaagaagaccccgaaggttcaggaactactcatttgtttaattgtatgaaaagtgtgacatcgagggccaatcttgcatttgagccactttttgagagacaggttggtgtgat

SEQ ID NO: 149703 - DNA, 1045 bp, Arabidopsis thaliana landsberg
gaaagacactagagttggccaaagtaataccagggttaaggccatgggaagtgataagtatcgagcaagctatggatcagatcagctatggtggagagtggtaccgtgagccgcttggtacctacaccactggtcctccttatatcagagagtggaataggagtgtcatggtaagtttcctctcctttcttctgatttcacaaacaacaaacttttaaacactcactgtatctttgtgataaattgattcatcttttctcttccgtttcttgctttctgtttgcagaggctattccggattttctacaacctgagtgttcgagtaggccagaagctggagaggacagtcccgggttttgacactataatggacaaagttcagaaagattatgacaaaaggattgctcggaggatgaagcggagagaggaggagctgagagaagaggacctgaagcattattccggccgtaccgatgaagatgaggaggaggaagaggaggaggacgacgatagcaactccaaaaaagattgaagcaaagtcttcaccaggtggatgacaacaagcaaaacatcctgttgtttatgaattcttcgccagcaatgtcggtgtgtggttgatctggttatcgcatttaggtacacaccacatggttttgggcgtctcctgtaacatggtttgtttgttttctacctgttttaaaccaacgttcgacattgagagtttatcagaaaaagaggaactgtttcattaaatattctatgggcttacatgggcttatgaatttatctcgacagacattaaatattctataaatgggcctcagtttgtaaggcctaactatagcttttgcgtaacaacatacccgacccggtttgtagtgtaccgaaatgttaagtggcgatactcgattggtgcccttcgctacaaaattgggatttgtttttgtccactttcggtttcggttccctgagagtcccggaagctcagtggtcggagtgtcggcgttcaatttctcgatgactaataaccctcaaattgtggata

SEQ ID NO: 149704 - DNA, 816 bp, Arabidopsis thaliana landsberg
ctgctgcagctattcacttcgtccatagcacgtagatggcagaaaaggcctgtataaaacgtcttcaaaaggaatatagagcactttgcaaggtacactctctttacttgtttttctacctctctcgagctggaaccaggattccatatttttattgctcaaccagttttctctgtactttcaaatgatgctgtatctatatgtgaatgttttcttggttttggtttagagtaagtttcatattttcttttgtttctttgggggttatttaatatgttctgtttttggcctttaggaaccagtctcccatgttgttgctcgtccttccccaaatgacattctcgagtggcgtaagccttccctatctttttttcttaatctttattcctgctggcttcctgtaatcctgttgcaagcgtttctataaagatgttatgataagtatatatgatggacatatttgctacacttgtgagtatacgttaaactaagaaaaaatgggatactacgatctaagtagacagaagaggtctcacattactttgatggaatagtgaagacttatttatcaaaggtttatatgtacttacaatgcatagatttgatagttttcttctcaattgtgaaaggctgtcagtgttactgttagcctgactagcggtagggagtttcagtctttctattattactgcatttagtatgttaaaaagggtagcttgatctcttactaaaatagagttaaactattggattaatcttacagattatgtgctggcaggcagtgagggaacaccttctgcaggtgaaaatcttctt

SEQ ID NO: 149705 - DNA, 2647 bp, Arabidopsis thaliana landsberg
taaacgaatttctgctaattttgtcatttcgagaagaattgaaacaaccgttggattccctttcaatcaaagcttaataattgaaaaatctagcagattacactccacgtggtccagtccaccatcttcttcgtttactccttcctacatcgatattatacacacatgcgtgtgtattggatctcacgatttcttatcaatggaactcgcttctctttctcagatccccatccaaatcgttttataggtagattagatagataaactacggatatactcgaactctatccatttacggtattgatttggaaaaatggacaagtatgacgttgtcaaggatctgggagctggaaatttcggtgtggctcgccttctcaggcacaaggacaccaaagagcttgttgccatgaaatacatcgagagaggtcgcaaggtttgtttttttcctttttgttcttactatttttgggatctttctgttttgaattggggtttaaagtttttacttttagctcagtgtgtatgttcaaattcattatttcaagtctccttgctatacatttgtaggaaaatttgagaaatttggggttttgataacaacagatcaaaatgatgatgataatttagttttggattgtttggtatatattgatcatggattgcagatagatgagaacgtggcgagagagattattaatcacagatcacttaaacatcctaatatcatccggttcaaggaggcaagtcacttttttgtgtggctctttatagtttatctaagagctgtcttgggatctgattttgattcggttctaggtgatcctgacacctactcatcttgctattgtgatggagtatgcttctggaggagagctctttgatcgaatctgtactgccggtagatttagtgaagctgaggttgctttctctttgtaaagtcatacactttgatccatatattttcttcaacattttctgtgatcttatttatgtgtgtgtataagtttttgcttttgatcttattcatttcaggctaggtacttctttcaacagctgatttgtggtgttgattactgccattccttggtatgtatatagtagttcttagaatatacattaagctgaaaaggaaagttatgtgctgcctaatgaggcattcgtggagtactattgatgtttttgttcccagagtctttgtttgagatttggaatttaatgcctctgtccttgtgtaaccttcccctctcttttgcttctgtgcagcaaatatgtcatagagacctgaagcttgagaacacactgctcgatgggagccctgctccgcttttgaaaatctgtgattttggttactctaaggtctgcacttatccatttcccttttcttttctttgctcagtttttctcaatcttcaatccaaaacagattagcatgttctttaatcaaaagtattatctattcactcctctcttgattcttatatctttgtcatgttttcaattttatttctatggtgtagtcatctatactacattctaggcctaaatcaactgttggaactccagcttacatagcacctgaagttctttcacggagagaatatgatggcaaggtacagtatttttgtcttgttatacatacatatcagtttgtcattaacgcttgattggttgtcaaagtaagcaaataatgtcatcaagggaaaatatgaggatagaaagttatagactgctcaaagatccaggctatagagttcttctagtatatcttttttagtggcatggtctgtgtgaaacttttcaggttattgtacttctaataagatttaagtggggtcttaattaaaaaatttgacggggtgctaatcgatattttttccatgattgtcataagagcacatacactggttttggctctcatatatatgactgcgtttttgtagcacgcggatgtgtggtcatgtggagtaaccctttatgtgatgctggtgggagcttacccgtttgaggaccctaatgatccaaaaaacttcaggaaaacaatccaggtatgaaccaaatcctcaaatttctcacagcgtctttttcacttcaattcttctactatagggccttatggtgctgagaaaatgttctgcagcgtataatggctgtccagtacaagatcccggattacgttcatatatcgcaggagtgcagacaccttctctctggcatatttgtcactaattcagctaaggtactactttctcatttatctgagttgaagctgtcttttctatatttcaatcttttgatgacatgtcataaatttatgcagagaatcccccttaaggggatcaagaagcttccatggttcttatagaacttgccaaaggagcttacagagcctgctcaagcggcgtactacaagagagaaaccccaagcttttccctccaaagcgtagaggacataatgaagatcgttggagaagccaggaatccagctccgtcttctaatgccgtcaagggctttgatgatgatgaggaagatgtggaggacgaggttgaagaagaagaagaagaagaagaagaagaggaagaggaagaagatgaatacgagaagcatgttaaagaggcccattcttgtcaagagccttccaaagcttaa

SEQ ID NO: 149706 - DNA, 343 bp, Arabidopsis thaliana landsberg
gggttagaagtgtggaaagacaaagagcgtttcaagaagtttgcaagagcatcattggaactttgtagagtgtacatagagatctcagcgtctgtagaaagcaaacgagaactgtttagtgctgagatgcatttgaagaacacaatcaaacaagtaataaactgaacttgtggtcaattacttccaacattactaagatttttgagcagaatgaataaatggcgatatattttcttgtgtttgtgtctaggctagaaagagcttccgtgagcctgtagaattgaaggagcttgaaagtaaccttgagaaggtcagaaatgtcacgcagaagtttgaagggact

SEQ ID NO: 149707 - DNA, 2131 bp, Arabidopsis thaliana landsberg
  unsure (1)..(2131): unsure at all n locations
gcagatgccattgtctgtaacaacatattggcttgctgtctccagacacggatccatcgaagaccaagacaattttagtatcggtatgtgcggcaacccattccaaccaaagatttagatgaatcctggcccctgactacagagaacccttttgattaagcatcgtatctttatacatagctacatggattatgttatcatcatacagtatgtgattcatactctgcattttgaattttgttactttataaatgtttatggagcattgttcataataatttaagtatcatctaacttttcaagatggcggctgagttccaacaatctcggaacatgtttattgtatccaatttctaaaaacagtaagtaaattgatatggtgataatgatgttgacccaaatataagccttactgccttagagcttgacacagaaagtgttatgccggaagcaagtcatcaccataaaccataatcaagttcctctcaagaaatattttaatttacgattagttcatacattattctagtgcattacgtcaactcttaatttccaataattccatgacctatgtgaacaagaaaatgctgacttcaatatccgcttattataatgagtttgacgtatcttatgatgttaatcaataattgctaaccgaattttagattaataattttataaaatagctttttgttttgcttgtttaggacaatcaatttaaggtttggtttgtacgtgacacaaggcaacataaagggtttaggggcggcttttctagaacacaagtcaagcaacaggcctctcataaagtcaatgacagaaaattttcttcttgataattatttacaaggaagatcgtcttcttaatataatgattggatgaagaaaataacacctttttgattattgtttgacagaaaataaaacaggaatttgaagttacactttcttgcactcttccttttcgatttttgcctcattgttgtcttcttctccactctttgcctttcttaagtcttgctgtctcttatacacacaaatagatgcaacatatatatataatcatgatgccttttctcatttgtatccatcatcaacgaaatcctaattaataacgaaaaggagaattctcgtaaggtataatgtattgcgagaatattggagaagatgatcggagcatccatttgcaggttttgtttcttcttgaaactacgcatataatacgttcaattnnnnnnnnnnnnnnnnnnnnnnnnnnnnnnnnttcgatcattgtatatatgatatgacatgcctcgataggtttgctctaatagtagtcgttctacttggaatgacgtttccatttgtaattggaagcaactcttcagcttaatttgaaatgtcgatattgaactctctataccttcaatccttcataaatttcttataagtagtaactaccttataataattttaaaaaattctgcaaatattaagattgttttataacaaatcttcattttatgtcatacaacagccaaacgtgtggtatgaaactaaattattatccatttatttgcataaaaagaaaagaaaacttcgaatataaaaactttctaaaattagtaataaattttcatttaggtgttggagctccaaaaattggaagaagcacgaggctcaagcgagaccgttttggattatagaaacagcgtcgagaaaggagacagcggcgaaaccgcagacgcagcgtctgtatcttccgcgatcgcgtttcacagatcaacatcacccgcgccggagcagaaactcacactcttcgctctccgccttgcaatcatcgagaaaatcgccactaatctcggaaccctaggtttcatttgggccacggtggttcttctcggtggattcgctatcacgctcgaaaaatccgatttttggttcatcaccatcattctcctcatcgaaggcactcgaatcttcagcagaagccacgagctcgagtggcagcaccaggccacgtggactgtatccggcgtcggaatcagtagttccgcgtgctccaatcaagctcaatttcacttctcagaaatttaaaacgaatcaggtttcgataatctcttctctctttgcttaatcgaattggaat

SEQ ID NO: 149708 - DNA, 2475 bp, Arabidopsis thaliana landsberg
atggtgggtgatagagagcaacgtagaacaataattctatagtaattcattgatatctttttaattctaggaaaatactgcaaaataaattgttagaattgaaaagaaagatttgaaaatcttttacaatacttgaaaatctataatttatgtcttcaattctattctattaaattctctcatccaatacctccccctaaaacaccacaacgcgtaataatacccacacacgatatcattaaatttgaccaataagaatctagctcttggcgaccacgcaagtatcttccatcttgctctccaagaaaaatctacaccggctttaaatttacataaacaccctcagtcaaagaaaagtcgtaaacatagtctctctcatgaccacaagggtaacacagtcatcctaaatataaaccacacaagaaaactgttatactttatacacgtgtcatagtctcattacatctacgtgaagagtttcgatcatcaaccgttcgttttcttactatataaaccttgctcgagacctgcgtgtgaagcgtataaagacgacaaagtaaaccaaaaaaaaaaagagttctcctacaattttcctaaattcttggatttgagatttcactttttccgatttgaaacaatgatgataactcgcggtggagccaaggcggcgaaatcgctgttaatggcggctggaccacgtttgttctcgacggtccgacggttcgttacgaggctttatcagcagccatattttgaagcctggtgttcatctgcttggatatggactagagctccgacgattggaggttttagatttgctagcacgatcactctgggagagaaaacttcgatgaaggaggaggacgcgaatcagaagaaaacagagaacgaatccaccggtggagacgccgccggaggtaataacaagggagataaaggaatcgcgagctattggggtgttgaacctaataagattactaaagaagatggttctgaatggaagtggaactgtttcagggtacgttatagctagattcgtatacagtgttgttcttcgttgatctgtgtaaatttgttgaaatttctttggatttttgcagccatgggagacgtataaagctgatataacgatagatctgaagaagcatcatgttccaacgacgtttcttgatagaatagcttattggactgttaaatctcttcgctggcctaccgatttgttcttccaggtactgatcttcttcttcttctcccatggaaaatttctttacattttttgccaattttatgatatggaaatgatccaaatctgatatcgtcattgattacgtgtaaccttaaatattttatttcattcttattatagcaactagtcaatattttgtttgattattttggaatatatgtgtttattatattaatcacttcgttagtgctttggattcttggttaattgatggttaattatcattatgtaatgaattattggttaattgttggtctgattgtgatattgtgaattaaaacagaggagatatggatgtcgagctatgatgcttgaaactgtagcagcagtacctgtaatggttggaggaatgttactacactgcaaatcgcttcgacgttttgagcaaagtggaggatggattaaggctcttcttgaggaagcagagaatgagagaatgcatcttatgacattcatggaagtcgcgaaaccgaaatggtacgagagagcgctcgtgatcactgtgcaaggagtcttcttcaacgcttatttccttggttacttaatctctcccaagtttgctcatcgtatggttgggtaccttgaagaagaagcgatccattcttatactgagtttctcaaggaacttgacaaaggtaacattgagaatgttcctgctccggctattgctattgattactggaggcttcctgctgatgcgacacttcgtgatgttgtgatggttgttcgtgctgacgaggctcatcaccgtgatgtaaaccattttgcatctgtaagtatattatttgcttgagactaaattctaaagcttaaaatcgtgtgttactgatcaattatggttttactttgcaggatattcattaccaaggtcgtgagctaaaagaagctccagcccccattggatatcattgaatctgaagagcttctagctttgttttgtcgttttgatacggtccagttttgttttccttgttcctaaatgggctttaatgggtatttgttaaaatttagtgggccttagagtaagcttatttgtgcttgctttctttttgcttcataaaagagtgttttgtttgttttcattctcctaataaatcagtgcttacatgatatgtttacatatacacttaggctagatgtaaaactttacaaacccaaggctttgaagtttgaatataaccatagatatgtccattaaaccccactaaaatgaagtaggcttgaatcca

SEQ ID NO: 149709 - DNA, 649 bp, Arabidopsis thaliana landsberg
gtggggattaggtgcaattatgtacgaaatgctcgttgggtatcctcctttttatgctgatgaccctatatcaacttgcagaaaggtataaaatcttgcttttatgttcactatcctagtgagtttactgtgtagtataaaacagtgtgagcaatttgactggcgtcctatggaactgaatatgactgtttgtatacaaaagtgttagtcacatggtaggaccataggagagtgttcaattctgtgaccaaattttggattataagggtgtcaagttatgtagaaaggccacaattttgccagtttatgcgcgtccaagttaggaaaatgttataatattatgtcagtcttttcatataaatttgacaactatgctttgatatgtgggtaaaatttccattgtcaattccttttgtttgttctttgtggatgcataaaagaaaaacaagagattttgtttataagattcactgatcatgttcatgaagtcttaattccttctgctagatcgtccattggagaaaccatttgaaatttcctgaggatgcgaagttttcatctgaggcaaaagatcttatctacaggttgctgtgcaacgttgaccataggcttggtactggaggaggagcccagcaaatcaaggtaagga

SEQ ID NO: 149710 - DNA, 1496 bp, Arabidopsis thaliana landsberg
ctaccactgatgatttatttcagcagcatcagaatttcctgttggatccaaaaattggttatcaattgtttggagccgatcagctcggattgctgcatttaccttcttgtacatctcttccatgttgtctagctcaagacccttcttaaggtagtcacttaaatgagttgtcttcagaaattgagatcatttattcatctcaagagatcattctcattcaagaaaatgtgcttatatgatttaggattgacattaccctcatgtataatccacaatccacaatccacaatccacaccacttgctaaagttacggtacggtgacacaacttcggcataaatctcaaaaattgaataatttgaaggattagaaaataaaataaaaataataataaacaaatgcgaaaagaaaaaaaaatcatagcaagcaaaatttctgcttcagcgctctcgttctgttttggtatttggattttcaatcatggattgagcgattgttctctttttacttgattgatttcttcgataaactctggatcttttgtgtgggttttcataatttctttttttccgatcaatctaatccaatccagagattctgagtctcaaagttttgcttttttgagtctgttttccaaagacatgtagggctggattctaagcttgcaacgtatccatttccctggtctttcttggtgatccggaactgaagtgaaggctctctggattgcttcatttagatcaatatagaggtttatctgacttaagttcttgatgagtttatgttctgtatcacagtagatatatgtggaggagataggtttagttttaaagattagattttgctgtccattttatacaggaattgaagtgaggcatggaagatgtgtccgagtctgataataatgttgagacctccattatccaccttccagatgattgcctttcctttatctttcaacgacttgatagtgttgctgaccatgattcatttggtttgacttgtcatcgctggctcaacatccaaaacattagccgtcgctctttacagttccagtgttctttctctgtcctgaacccttcaagtctgtctcagacaaatcctgatgtgagctctcatcatctccacaggcttcttactcggtttcagtggttggagcatctttcgctttctggctgcactgtgctgaatgattcgagtctcgactccctcaggtatcccggtgcaagagctgcatactctttacttagattgttgctttgggatttctgatgatgggatctccactattgctagcttttgtcccaatctaagtgtggttagtctttaccgctgcaatatcagtgacattgggttaaaaacgttggccagggcttccttgtctctaaaatgcgtgaatctctcgtactgcccgctggtatctgattttgggataaaagcgttgtcacaagcatgcttgcagcttgagtcagtgaaaatctcaacctgcgagggcat

SEQ ID NO: 149711 - DNA, 1057 bp, Arabidopsis thaliana landsberg
cccaaccgatccagtctctttagattccctttctcctagatcagaccacaaccatttggccacttctgtcctaatttattctctcatcaaaacctctattttgcttctccctttccttacaagctgttcactatatcccctgcgatttgtgtttcccacaaaccctaattttgcaagaagaggggtttcttctaatttatataaatctcggttctttttgccatttcgttttctctgatcatggattctgaagaagacatgctcgatgcgcacgatatggagtctggagaggatgacttctacagcggtggaactgatgattgtaatgatagtgatgatggtgaacctgattatgggtttgttgaggaagatgctgatgattctgctatgatcgcctctcatcgctctcaggtgggtttttgtttttgtttcttaattcattttggtgttggttgttgaagctaattgcttttagaactcgtgcatgttttttttacttatctgatggcgaaatgttgaaactttggggcttttcatgataaagtggtttttatttgggaggtagagtctaattgaggctacaaagtttagcatggaatttctctctactcatttagttccatgtctactgtatctgtgaatattgactcattataactataatgttacttctttccagaaaaacttttgtgttctgagggaagaagatattcgcaggcatcagatggataatattgaacgagtttccgttgttctctcgataactgaggttgaagcgagtattctacttcgtcactttcactggtaaacgctatgtgtttcacattagtttcatttgcatatatataattccttgtttacctctctttagtttttctagaatgtatatccatggccatacttgtgtggttattatagcttcctgatgcaatgataaacatctcatttcaggagtgtcggtagagttcatgatgagtggtttgctgatgaagagagagttcggaagactgttggcatattggagagtcatgttgttccaccatctgatgacagtgaa

SEQ ID NO: 149712 - DNA, 2133 bp, Arabidopsis thaliana landsberg
tttctttgacatcaaaacacaaacccggaaagcttcgtctgccatttttcattcttctaagccctagctcaaagctttctctctcaaatccgccatgactaaacagcacgcgaactggtctccttacgataacaatggagggtacggatcgtgtgacctttaatcaacctgctgggtttcttcgcttagtgtctttcttctttattctgatttgctatctgggcgattgtgttacgattcacttactgtgaatttaatcgttgtgtgtttttcagaacatgtgtggccatcgctggatcggattactgtgttatcgccgccgatactcggatgtctactggttacagtattcttagtcgcgattactccaaaatccataaactgtaagtaccccttctctttcttctctcactgttgattctttgggagagtgattccatgctggcaatcgaactattattgctgtagattattagggtttttttgcaatcgtaattcgtagatctgggtgaaaccagttatatatgggtggagataaaataggtttcttaattattattagacatggcttttgatagtggtcacaattatctctatataaactttgtgattacattgatcattctataatccggtttattgcttagcttattcgttttcttataacgtttattgacaatgtgtgtagttctttgagtttgttcaaccttacgtaaagagtgtttgttactgtgttgttgatcttatataccacaagtattcattcgtatggaaatagatagaattctcgtgtttttcatcttatgtaacttgtaagactcttgttaagctgttgtcttcttttaacttttccagagcggacagagctgttttgtcttcctctggcttccaggctgatgtgaaagctttgcagaaggttctcaaatccagacacttggtgagttaaactttggtcgtttgatcaattatctttcatccttcgcagtattagaaaatgatgaaagacttgtgtaagagtgttttctctgtgtttggtttccttcagatctatcaacatcagcataacaagcagatgagctgtcctgcaatggcccagcttctctccaacacgctttatttcaagcggtttttcccctactatgcctttaatgttctaggagggcttgacgaggaaggtaaaatgctcctctttttttctccgttatgatgtgactttagaagagggtactttgtgtgatctttagtcttgaatatatccaggaaaagggtgtgtctttacttacgacgctgttggctcatacgagagagttggatacggtgctcaaggttctggttccacactcatcatgcctttccttgacaatcagctcaagtctccaagtcctcttttgctacctaaacaggtttgttgatattcttcattcgtgcttttggcgtttcgcattgtaaagataaaatgaatcgttctgttgcttatttgttcgtcttctgccaccatgtaggattcaaacacgccccctttccgaagctgaagcagttgacttggttaaaactgttttcgcatctgccacagagagggatatctacactgtaagttgtcctatttgtgtcttcttttgtcaccacgccacctaaagcttgcctttgtgctcatatcatttgcatttggttcaagtcttcaaaatattaccaaaacatttacttaatctatatcccttacgttgcacaactacttcatcttcctcaagtttttttctctaactaatgctttgtggattgtttactgtaatagggagacaagcttgagattatgatacttaaggccgacggtatcaagaccgaactcatggacctgaggaaagactaagctcctttagtgcatttagccaaccttatcggtttgttatttcacttcaacatcgagcttcctgagttgtagaactcgtatgaaatgctactgggtttgatattttacagttaaaatcatgactcgtgtttgaagtttctccaaaactgtttccttatgtatgagaatcactcgaatccttgtcttaaatcaatgtttctctcactatttatggcaatgtttttacatagatcacattaagatatttaatagacaagaatagaatc

SEQ ID NO: 149713 - DNA, 285 bp, Arabidopsis thaliana landsberg
agattcataccccttcttcatcgtcctcgtcctcgtcgtcgtcatcatcatcatcatcatcatcgtcttcattttctgcttcgtcgtcttcctcttctacattagcctctccttcaccgtcgccgccggtaacttcttcacctcctccgtctttggcttccttcacttcactgtcgtcgtcgctcagaacctgaaccaaatgtttctccttgaattccttatcatcttcaacatgcgtcatcttcttcaaacaaaaagactttcagagattttcgtgtttcttag

SEQ ID NO: 149714 - DNA, 996 bp, Arabidopsis thaliana landsberg
gataaaaacccgcctggcgttagaggctactgcattgatgtctttgaagccgctattgaattgcttccatatcctgttccacgtacttatatactatatggagacgggaagagaaatccttcttatgataacctcgtcaatgaagttgttgcggatgtgagtagctacattactcaatcaagttcacaactttcagaagatgctaacctgtcttttctcatgtttcctcttcagaattttgatgtagctgtaggagatatcacaatcgtcacaaacagaacaagatatgtagatttcacacaaccgtttatagaatcagggcttgtggtggtggctccggttaaggaggccaagtctagtccttggtcattcctgaaaccattcactatagagatgtgggctgtcactggaggcttctttctctttgtgggagccatggtctggattctcgaacaccgcttcaaccaagaattccgtggccctcctaggcgtcaactcattaccatcttctggttagtttcccagttcttaacactagagcccgagtttaccttttaaactttattttccttctcctcttcactgttacaggtttagcttctcaacaatgttcttctctcatagtaagtacgctataattcgagtaacctggtagattttcacaccagggcttacagaatgttggagggaagtaaagtgtttttactttataacttttgaatctttcaggggagaacacggtgagttcactggggaggtttgtgctgatcatttggttattcgtggttctgatcatcaactcgagctacacggccagtctcacttcgatcctaaccattcgacagctgacatctcggattgaaggaatagatagcttggtaacgagcaatgaaccaattggagttcaagacggtacctttgctcggaactatctaatcaacgagcttaacatactaccttcaaggattgttcctctgaaagacgaagaacagtacc

SEQ ID NO: 149715 - DNA, 1290 bp, Arabidopsis thaliana landsberg
agtggagccacttgtctgcaaagagtaccttcccgaacgacccgttattattccctaccacagaggaggcaagcggttgcatattggattacaggtacttgtaattttgtggtttggtgtttcgttttacttcctcttctaatttgtttgctctatgtaatgttctataggatttcagagaagattttgctgcacgttcacagagaataatgaatcattttgattcagtaagggtgtgtgttttcagacttctaattacttttatctatgttgtagtgtgaccccaagttgttatcttttgtgtttcaatgtacaaaatacttacctttaaattctcatgcagacaagagttctcactatttgtcaatccaaaagtgcagataacctagacggtaaaaaagttgttacttcgcaaggtttttttctattacctctgatgtacttctaagtatacttgcatgtgtgatggaacagagatggaagaaactgatgacgaaaaggatgataggtcctatggttccttaatgatagagagattaactggaactcgagacggtcggatagatcacatgctccaggtgaagttttgatgcatttccacctaatttataacttttatgattttgttgcattcaccttttcgtttggttcttagataaaagaatcagtatgtactagatttggctaaagctctctagtttgcatataatgattgctgaaatatttgggtgatgcaggagaaaacctttgagcatccgtatctacaagcaataggagctcatacgtaagtgaaacttttcattgcttacacattacatgtaacgtttagagccaaaaactcaagactgctatatactgtgcaggaactattggagagatcaagatactgctcttttcataattaaacacttgtatcgcgagttaccagacggaccaaactcgcccacggaatccaccgaaggagatgatagtccaaaagactcaagtagacctcatagctggatagacagaagagaggctgattatgatgatgaagagcttcctttaacattctccgacaaacaaatcgctagaagcttctctgcagaagccaagaaatatttgaagaagccttaagactttgaccataggtttatatcgtatatccggtgaaagctccctgattttgtttttgtttcctgtgcagaagtaacatctagtgtagaaaatgtgaaaagtaaaaactccgacatggttttgccacattgtaaccataatcttacatataataaagcaaaacaatgaaagctt

SEQ ID NO: 149716 - DNA, 913 bp, Arabidopsis thaliana landsberg
cccctgcaaagttttagacttttaacaatggctttctcttctctatctcctctacctatgaagtcacttgacatttcgagatcctcatcttctgtctcaagatctccttaccattttcagagatacccattgagacgtctacagctaagttcccgttcgtaacttagaaatcaaagattcatggaacactaggtgagtgagactcgaatactttcactagcaaaacatagaatctcaatgtttttcttgttatttgcaaatcttagtgtcttagaaacttaggggattgaattgtttttcgaaaagggaaggttgttgttccagcgctgagtcaaatacatggaagaggattttgtctgcagcaatggcggcggctgttatagcctcgagctccggcgttccgcgccatggcagagcttaacaggttcgaggccgatacacgtggcgagtttgggattggctcggctgctcagtacggttctgctgatctcaggtatcatttagagttcttgtcttaaagttctttaaagaatttcatttgtttttgatggtgatagactgatagttcgttgagatgaactctgtttcttttgcagcaaaacagttcactccaatgaaaatttcaggtaaaaatttgactgtagtttgtcatgatagagtttaaagctttaatctttaggaagcaagagttttgtggtttgctcaatttttaatgaatggaatattgaattagcaaaccccaataaagatcaaagcaagatttgtgttctaattgtgtgaactgaagtagcttactgatattgcagaagagccaactttacttctgccgacatgagagagtctgatttcagcggttcgaccttcaatggcgcatatcttgagaaagcagttgcatacaaagctaacttctcag

SEQ ID NO: 149717 - DNA, 1069 bp, Arabidopsis thaliana landsberg
aatgttactctcagcatggagggtccaggaaggatcttgagcattcggattacccagttaggcatcgtgagtttcgatataaaacagaattgcacagtcatgaaccagaggtacatcaaaacttatcaccagatttcacttacgagtaattgtgttccttgagctactcaataagcttgcttttcaatctgtttcagtttgactatctcaagagtttggagatagaggagaaaatcaacaaaatcagatggtgtcagccagctaatggtgcattgtttctgctttctacaaacgataaaaccatcaaatattggaaggtgtgacatctgaatggatttttatatcacatgtctgcaaaatataggccacttatagcaaattcctttctgtgtaactcggttccataatcttgtttcatatgctttatagtgtagaaatattaggtgtcacgtgtgaaaactgtctagaaactggtttcttttgcttccaagactcaattcaaaataagagaaatagtttgtttctttactcttataatttgactcctcctcttatttggaatcaaacaggtacaagagaagaagatcaagaaaattagtgaaatgaatattgatccgtcagaaagttcaagtatccctcctgaattagttactaatggattacctgctgataaagggcatgactacctgagcaaggacttttctttcccgccaggaggcattccatctctgcgtttgcctgtggtagttgtactcgacgcaacttttttttactttttgtttgggtgtcaaatgaagtgagttttaatttcaggattctgaaaagtaaatgcgtatagatattaagcctgttttttactggaagttgtggatattttcttcatgttgatgatccagctacttgagttatgaaatgtagggaatttactattggccttgtttccttttgtcgtaactaaagctcagtaccaaattagtctaatgcactagtcaatttgtgttctacttgaacttatgggtgtttctgcatatataggttaccagccaggagactaaccttgtggctagat

SEQ ID NO: 149718 - DNA, 205 bp, Arabidopsis thaliana landsberg
gtctaccatgaacactccacgtgcaatgcatcacttcgacccaaatgtggcattctcaaccatatccccagtgggaaaacaaggaacctgcaccccctagagtcgttcagcatcatgatttctcttcacagccaaatcgcttcccgcgccaaaatactcaagcagtatccgaggttcataaaccactgcatcaagatattccgcc

SEQ ID NO: 149719 - DNA, 2505 bp, Arabidopsis thaliana landsberg
caagacacacagtgcaaaatgacaaagagcccttcatcgatttcgaatcttctctctgagtaaatcaatttcacaaattcgaggtttttggtttttagcttactatactactccaagaagaaaatctcaagttagagtcacttcctatcaaatctctttcatggcggctgctattctcgattctgctgctcgctaaattgcgttttccttccgccattttcatgtaagcttctttcattttgcttcccaaagctcgttttcactatgctttagcaacaacattattgtagaggttaaaggcagcaaaatctatagattaaggatttcttgtggttaatttctgaactcatgtttctgtgtgttttcttagtgaagctgattataaaagcggcgtagatctgtgaagtgtgaacctattcattgcatttccgcgtttgtgaggagaaagaggagaagatgttgtgtgcttgttcaggcgaacaattccggttcgaggatcagcccggttcgccggaatccctagctacaagagatttctcagctagtggactttcttctcgaaacggaggaggcgattgggattccaaattggaagatattcaagtcgatgaagctgaatcgactttaaaggaagctctctcactcaactatgaggttggttttagttactctgatgcatcaattttttggttttaactggaatcatcctgatgctgagtttttcttttcttccttatgtgtgttaggaagctagggctttgttggggagacttgaatatcagagaggtaattttgatgcagcgcttcaggtgtttaaagggattgacattaaggtcttaactccaaggataatcaaagccattgttgagaaaactcgtccttgcaaaccacgctctaaagctgttattgtgcctcccagcacaatgtcaatgcattcagtcagtttacttcttgaagcaatcttacttaaagctagatcacttgaagaacttggctcttacaaaggtaagtattcatgaatttgaatactacttgtgatgctctccagatttttgcattggaatctagtcacattgtcctgctgttttattgttttaccagaggctgcagaagaatgcaaaataatcttggacgtggttgaatctgcactgccaagtggcatgcctgatggaatcagcggattcactaaactgcaggacatttttcagaaggccctggaattgcttcctttactatggacaaaagcggggaatcatcatgaaactattgcttcatatcgccgtgctttatccagaccatggaatttggatccccagaggttagctgttacgcagaaatccttagctttggttttactttacgggagtgttgaggcatgtccaaaagacaacatcgaggaagcaattgtgttgctaatgttacttgtaaagaagatggtggttggggacatacagtgggatccagaactcatggatcatctcacttacgccctttccgtgactggacaatttgaagtgttagcaaactacctagagcagactcttccgggtgtttacacccgtggggagagatggtaccttctctccctttgttacagtgctgctgggatcgataaagcggctattaatctgttaaagatggccctaggcccgtctgaatcaagacaaataccacacattcctttgttattgtttggagcaaagttgtgctctaaagatccaaaacatgcaagggacggcataaattttgctcataggctgctcgacttgggaaacagtcagagtgaacatcttttgagccaagcacacaagttccttggtgtgtgctatggaaacgctgcaagaagttctaaattagactctgaacgggttttccttcagaaaaaatctcttttctctttaaatgaagcagcaaagaggggcaaggctgatccggaacgagacgttatatttaacctaagcgttgagaatgcagttcaaagaaatgttcaggcggctttggatggtgcggttgagtattctagtatggtgggaggagtttcaactaaaggatggaaacatttagctattgtcctttcagcggagaagcggctcaaggatgctgaatcaattctggacttcaccatggaagaggctggtgacattgaaaagttagagcttctgaagttaaaagctgtgcttcagatggctcaagaacaacctaaacaggcaatgaaaacatgcagcagcttgctgggactaattcgagcgcaagaaaaatctgaacaatccgaggtacatagtttggatgtcacaatatgaaagaaacatattctgtgaaatttttgatatctctgaataatcttattcttttgttcccagagtctgctacagaaatttgaaacggaagcttggcacgacctggcctctgtctatggaaagctaggttcatggtcagatgcagaaacatgtctcgagaaggcaagatccatgtgctataattctcccagaggctggaatgaaacag

SEQ ID NO: 149720 - DNA, 1697 bp, Arabidopsis thaliana landsberg
ggactggtaacattgataaacagctccaattgcaacctagttatgctcaatctcagccatcatcagtctctcttcgtgttgataaattccctatagagcctcatgcagctccatcgaaaccacctcccaaagagcctttagttactatcgataagccaatactccctcctgcaccagtagccaattctagttccacctttaagccacctagaattgttgagagcgggaagaaacaggagttttcgtttataagagccttgaagacagtagacaacaagagtgacccttgtggagggaagtacatttatgttcacaatctaccctcaaagttcaatgaggatatgcttagagactgtaagaagcttagtctctggactaacatgtgtaagttcacaaccaatgctggccttgggccgccgcttgagaatgttgaaggtgtcttctctgatgaaggttggtatgcgactaatcagtttgctgttgatgtgatattcagcaaccggatgaagcagtacaaatgtttgacaaatgattcttcccttgctgctgccatctttgtgccgttctatgctggattcgacattgctaggtacctgtggggatacaatatctcgagaagggatgctgcttcgcttgagttggtcgattggctcatgaagcggcctgagtgggatataatgagaggaaaagatcatttccttgtggcgggtaggataacgtgggattttaggagattgtctgaagaagaaactgattggggcaacaagcttctcttcttaccggctgccaagaacatgtctatgcttgtggttgagtcgagcccatggaatgctaatgattttgggatcccgtacccaacctacttccacccagcaaaggactcagaggtttttgaatggcaagaccggatgagaaacctggaaaggaagtggcttttctcgtttgcaggagccccacgacctgacaatccgaaatctatcagagggcagatcattgatcaatgtcgaaactcaaatgttggcaaattattagaatgcgattttggggagagcaaatgccatgcaccaagcagcattatgcaaatgtttcaaagctctctcttctgcctgcagccacagggagactcttacacccgaagatcggcatttgactcaatgcttgccggttgtataccggtgttcttccatccgggttcagcttacactcaatacacgtggcatctacccaagaactacacaacctactcggtattcatccccgaggatgatgttcggaagagaaacataagcatcgaggagcgactcctccagattccagccgagcaggtcaagataatgagagagaatgtcatcaacctcatcccaaggctgatctacgcagacccgagatcagaactggagacgcagaaagatgcatttgatgtctcggtacaggctgtgatagacaaggtgactcggttaaggaagaacatgatcgagggccgaaccgagtatgactacttcgtggaggagaacagctggaagtatgcgttgctggaggaaggccaacgggaagcagggggccatgtgtgggacccgttcttctccaaaccaaagcccggagaagatggcagcagcgatggtaatggaggcacgactatttcagcagatgcagctaagaattcatggaagagtgagcagagagataagacacagtga

SEQ ID NO: 149721 - DNA, 549 bp, Arabidopsis thaliana landsberg
cgagcctgaggatttgattgatgatcaacttgaggctgctggtttcaaaggtaaatggggacttttatatccagtcctgcaatgatttgtctccagttgtcttattttagtttatttaagaacatcaatctcttataaatttatttggccttggttgagccagctgctccgaaatctgctgcgaaacaggtgaactttcagttgccaaatgaagatgtcaaagccaagcaagatgatgacgctgacggtagtgaagaagattcttcagatgatgatgatagtgaaaactctggagacgaggaggtacttttatctatatatactagctcaatttgttatagaattttacttaggctcagtgacatgttgattacacctatagacagtggtactagagttatcgtgagtatgtttgtaacctatacatttgcatcttcacatgatcccttgattacctattgtgttttatgcccattctcgcatgtctctgatccctatacatgggtgctatgctgcagaaagcataggttgctggtgttctgacagtga

SEQ ID NO: 149722 - DNA, 640 bp, Arabidopsis thaliana landsberg
tagagagtcaagctcaagcacctgcaatccataaggtatatttaaattataaaatatcaaatactgaataataaataataaatatattacaacaagaatatcaatgttatttttcaaactacataattttaaaatattttattgataacacaaatgtatattattatcgtctccattgatttgcattctaaatttgtttttgttatccaaccaatttcagaatggaggagaaggctcacttaaaccagaaggtaaattgtttaaaagatattatttttatttatatagtaaatgattgatcaaatcacaacttaaataatttaattgctgatttatattttttctgaagaatgtccaaaggcatgtgaatatcgatgttcggcgacatctcacaggaaaccatgtttgtttttttgcaacaaatgttgtaacaaatgtttgtgtgtaccatcgggaacatatggacacaaagaagaatgtccttgctacaataattggacgaccaaagaaggtggaccaaaatgtccatgaaaacaaaaaattgtaaaagcaaaataaaatctatcgttgttatctctcaataaaatctatgtttgtaatccttgtttttcaatatagaatataatatggagttttcata

SEQ ID NO: 149723 - DNA, 505 bp, Arabidopsis thaliana landsberg
  unsure (1)..(505): unsure at all n locations
ttccagtcgtctttgttcccttattgatagaataatcaaaaatccgagtcggagacgacgaagacccgagttccagctattaactatgcagataccatcaagagagcatagtttcattctatttctcttcatatctggtaaaaatcctcgtcgcacgaatttgccctctctcgaatttttgagcttttgaaattttatcttttgggaaatgctgcagcttttgtaattggtgctgcgtctgtacctgtacctgattctaattgctacgctctcgacaattcaagtcgtcttgtcgattttgtatcctctttctattttattaaagcttaggatcaattcttagtaaaaaagtttgctttttgttgcattggtttgatttcgtgtcttgtaaagctgcttcctttaacttggtttgatcagagcagctggatcggtcatccatttgaatatgatggcaagggtgngtatatgtttctcattttttagtgttgagagttagttttaa

SEQ ID NO: 149724 - DNA, 1050 bp, Arabidopsis thaliana landsberg; identical to SEQ ID NO: 55700

SEQ ID NO: 149725 - DNA, 573 bp, Arabidopsis thaliana landsberg
gtcattgtttcaggaattgagaagccttctgttgtgacaaaaatgaatgtaacgttatccgctgatcatcggatctttgatggacaagttggaggtaatggaacattcataaatcccttcgtttcgagttttatgttatgctgctgccatatttcactgtgtttctcctttgttactcattgctttttctatgaaaccggctttgtttcagcttcgtttatgtctgaattgcgttcaaactttgaggatgttcgaagacttcttctgtgagaaagatccaactgtttaccaaatgaatcttggattactacataataaacctcggaccaacccacgtgcacatccagaaccagaactgctggtctacattgttaactctgatcacatgtttcatttttttccatttggttcatatacttaccaaaatttgttttggtctttaacaattcgtcttatagattggtaacttcctgaggtattttttgtctggtctgtcctctgcaaaataaataatttcagctgtcaatccgcaactggtgaaataatttaaaaagtattttaccctcatcaaaa

SEQ ID NO: 149726 - DNA, 246 bp, Arabidopsis thaliana landsberg
aatcggagatgttacctcaagaggaagagacataaaatcatcagacggattagcttgcatctccttaacctcctgcaaaatcctcttcaccgccggattcttccgattatacctctcatccgccatcttatttatccccacgagatcttgccggaaatgcaatccgccgccggagttctctctgtccgattcgtcttaacagaaaataataaatacacaaaattagaattaccacatggcttcggg

SEQ ID NO: 149727 - DNA, 1135 bp, Arabidopsis thaliana landsberg
ctccccctctaccacccctccgtcaagtactcatctttacacaaaaacccacttcatatttcagatcaagtctctatttttttaatactgattctctgtttattgcagctgcttcaagctgtttaactggttcaaggtatgtttttgattcttgtttcattctttgtttagatgagtttagtaatgtttgattctttagtctccataaagttggctttctaggttagatttgatttttaccaccgactaacttttttttttggttgaattttgttattaatttgtctttgaggagacacaatgatagtgatttaagacctaatgaatagacaaaggaatcttgattaaatgtttttatttggtaccattcatcatttctgttcatttcacctttactaaaaagagaactcacatcaaagaaacagtccatcattcacatgatctagatgagcatcattactaattatcttgtaacgaatgatcactaatgtttttgactattctatgcagctctagtggcactcctaccacagggacaccaactagtgggacaccaaccagtgggaccccgactaccggaactccgaccaccggaacccccaccactggaactccaaccagtgggactccaactagtggcttcccaaataccgggactccgaacacagggactaacactgggatgccaaattccaacgggatgccaacttcatcgtcatcttcggtgttcccggggactactcttggaccgactggtagcgggggactaggcgatccaaatgctggagagaagctgtctgttcgaactaacacattggtcttcttattaaccggtgtagcagcaatgcttgtcatatgagggcttagatgtcacacgcggttatggttgtaattgggtttgctgagagatcagatcttgcctacggctcatggttgatagagccatctttttttcactcgtctttctaggatttggacttaggttggccgagagacataatgctggtagtagctagtattctgggttatgtacaactttaactaagagctttactattgtaaatccggaggatgagatgctcttttgtttcttatattctttttaatccttttactctgatctttcatcttttaa

SEQ ID NO: 149728 - DNA, 1388 bp, Arabidopsis thaliana landsberg
aacttgcgaggaagaagaaagtgaagaggagcaatacagaaatagaagctgatgcttcttcctccgacaactcttgttttgtggcccttgtcacggcttcgaatctacgcaaagatgctctggtgcttatactctttattgcatactgtggtttaatcactcactataccaatatatatgctaccaattgtggttctaatcactaactcaatgaaatgctgtttctaaagttgcgtacttggtttagatcctattgtggttcagtttgggagagaacttgttgaaataaaatcaaaaggttaactacaatatggttttggttcactttgatcaaacatctacttaggtaactgtatgtattttctcaaatttatactctaactttagtttggttttcatttcgattctgtttggtggtttggacttccttatttcatgtatccttttggtgtggttaccattggtgttgtgagactaaagaaagtgaattctcacgtctgctacacttatgtttagtattgtgttgaaaaggcctgaatcctttggttacagtatcttccacaagatttaacaagttcagttggtcatgaaagcaaataccgggagattgttgtatcagatgaaagggaaagaagatcatgggcgttggatctgaggttcaacaaatcatttgatactttctacataagccgaggttggaggagtttctgtgatgaaaacggtaaaaagccaggaggtgtctttgttttcaaactagttggaaacagggaaactccggtgcttagtttctgttccactgaatctatcaacgatggaacacaaggacataagatcaacaaatacaattgtatggagctgaagagcaagaagaagcgtatgagatgtagagattcaacttcaccaagccaaaaccggtttatgacattaacacttactcatgacaacctcataaaaagtagacgggtgagttcaaacaactcttgttctgagggttagttagttttatcgcttgcactctaatttgttatattctcctttaaaatattttccagcaacttcctttgccatttatgagagaaaatggcttggtcaaacctgggattataaatttgttgggtaaagatggtacaaagtgggaggtaaatcttcgacgggaagccaacggaaccatgtatttgggaaaaggctggaaagatttcactatagctaacggcttaaagaccggcgaatctttcacgtgggaggcagttttggagaatggaactcgtatgctcagtttggtcagtacacagtccacaagtgatagaaaccagaaagaagtggtttgcatatctactgtcaaaaagtggatttgtggcactgggatctggttggaaaggtttctgtga

SEQ ID NO: 149729 - DNA, 2385 bp, Arabidopsis thaliana landsberg
atgattaggcctaaaagactaaaagtaaagataaaaagatgccattttagagtacgttttggtaaattggcgccttcgtgttatacgtttaagcagtataacatgaatcatgcggtacgtgtacggctcacatttggcccaagcttcattaacaaacaataacgtcatttccgtatttcaacaattttgatcgctcaatcctttcgacctaatttccatattaagtaatttattagtttaaaatttaaaacaacggactttaaccaaattacatcttaagaaaatatttgaatattgtctatgtagatgttaaaatgtacatgcatttgaaaattgcttaatcacactctttctctcttctttctttgaataaagatgacattattttttctttccaaacacaaaactgcatattgatagtgttattgagtactcaacgtctcttcttccagcttacgtatgtggaacttactttatgccccgtgatccaacagaaaatgacgaatgctcccacaaaatcatttcgtttcaacaaaaatatgtattttatccatagagaaacaacaaaccttacactataaaccctctttttacgtgcccacttttcattatttgcaaaatccccccaacaaatttaaaacaatttataaaaagcactcaactttcctaaagtagattcctttagtccaatggaattcttacaacatcttcttcttcgccacctttttctctccactttaagctttttcactctctcaacgccacgacgactgtgaagcgagaaatggctacttccgatacagatcgccgtcacagagccactcgcaaccgtccaccaatacctcgaccctctaattcatcatctcgtcccgttgtacctcctcctcgatcaaaagtttcgaagcgtgtgcttctccgtgtagcttccgtcgcatgcgggattcaattcggatgggcgcttcactttcgcttctcacaccttacgttcaagagctagggatcccacacgcttgggctagtgtgatttggcttggggatcctctctctggtttgttcgtgcaaccgctcgttgggcatagtagcgataggtgtactagtaagtacggtcgtcggagaccgtttattgtcgccggagctgtggcgatttctatctctgttatggttattggtcatgcggcggatattggatgggcatttggggatagagaagggaagattaagccgagggcgattgttgcttttgttttagggttttggattcttgatgttgctaataatatgactcaaggtccttgtagagctctcctcgctgatcttactggtaaagttcctgactttattgttgattgggtcaaaggtagtgaatttgggattctcgtgattatacactcacatgcaaaacatggaaatgctcaaatttgtgattttggatacaatttggggtattggtccatagcaatcaaaaggtcccttctttgtttctggtcggtggcttatcgttgagtcacagaaacttcgttttttctatttcccttcttgtgaatcaaattgtggattttggtgaagttaatcgtagcctacgattgtgtgataacctcatggagtgaaaacaaagatatgttgtgttttaattcttgtcctattgctttattttcagagaatgataatcgcagaacccgggtggcaaatggctacttctctctctttatggctgttggcaatgttcttggctatgctcctggatcatactatggttggcccaagatcttcacttttacgaagacagttgcatgtaatgtggaatgtgccaatctcaagtctgccttctacatagatgttgtctttattgcaataactacgatcctaagcgtttcagcggctcatgaggtgcctcttgcttcattgacttctgaagcacatgggcaaaccagtggaacagacgaagcttttctttctgagatatttggaactttcagatattttccaggaaatgtttggataatcttgcttgttacagcattgacatggattggttggtttccatttattctgtttgatactgattggatgggtcgagagatctatggcggtgaaccgaacataggtacttcatatagtgctggggtcagtatgggtgcacttggtttgatgttgaattctgtttttcttggaatcacttcggtgctcatggagaaactttgcagaaagtggggggctggttttgtttggggaatatcaaatatcttaatggctatttgctttcttggaatgataatcacctcatttgttgcgtctcaccttggctacattggccatgaacaacctcctgccagcatcgtgtttgctgctgtgttaaactttacaattctgggcattccattggcg

SEQ ID NO: 149730 - DNA, 578 bp, Arabidopsis thaliana landsberg; identical to SEQ ID NO: 3326

SEQ ID NO: 149731 - DNA, 995 bp, Arabidopsis thaliana landsberg
ccgctttgtttccccaatctctctcttctctctctctgaagaaaaaaaaataaaagatctaactttgacggctctcttaatcttactcactccgtaagttccaaatctctctcctttactctcatatctctatcgtccgaacaaaacccaggagaattgcttcaccccctttttgggtttttaatcattttctcagattctcagtttctgtttccgtcttctagattctgggttcagtttctgttttgctcttattgaattttcttattcattttgtgtttcggagttattcatggtagctgaatttgttaattctgatgttgttttgcgttttcttcttttctagtttggctatgtcgtctttgatctgatgctgggttattctctttccctctgttttggtttcttttagggttttaagtcggaatagactgatgggagcttgatggttattgttagatcagatgtggatttaaagccttcgctgaactaacaagtctatggaagaagcaaagacccttgttttacactgtatgttgtgaggaatttgtctgattttgggtgataaaggtgaagtctttgagtttgtaattttgagataagattggatggtgggaagagaggatgcgatggggaatgatgaagctcctcctggttctaagaaaatgttttggcggtctgcctcttggtctgcttcacggactgcatcacaagttcctgagggtgatgagcaaagcctgaacattccgtgtgctattagttctgggccgagtcgaagatgtccagctgctcctttgacacctcgttcacatcataacagcaaggctagagcttgtttgccaccattgcagcctcttgccatttctaggaggagcttagacgagtggcctaaggcgggttcggatgatgtcggtgagtggcctcatccaccaacacctagcgggaacaaaaccggggagagattgaagctcgatttatcatcaacgcagcagcgg

SEQ ID NO: 149732 - DNA, 1657 bp, Arabidopsis thaliana landsberg
taaatgatgtgaccaaactcgttgaagattttcattgaaagttcctcttgaaggctcttatgagtgtccttctctgggcaaagacaagatgaagaaatcggagaatactatcaacactttattgagtgtagtcaaaaatgtttggtccattctaccagcaaagaggcctgttcaatcacaaagctctactgaattagacacttgtctcagcagaactctgggttcaccgcctagctctatctctgctacactaccaaatagtgaaaacatcgataaagtaaatgccctggatggagatctatcgtcatcgtccaaggtagatttcttaatctaacatttagaagtttcatatatatatattctgatttgacctgtaagcaagtatacatgactttaaataggtttgttgctttaactgaaaattgatacactcattgacttctcaggatcattgcatcaactctgaaattccttccactccacttagttttccattatgcgacgctggtgatgtattgaaaagattaggccttcctccgtcgaaagatttagactctctgctccaagatgcatcaaaaccttctcataactctaagaacaatttggaccagcagcgttcagctaaacctcctcatagtggattgcctcatttcccttggtcgcagccctttaatgggagctctagaaccaactcagaagcagcaaagcttgtgacctgcaagacactttgtcaaggacgatggctaagaatagccgacacttctatgagttctccagagggtataaccgataatttcgcaaatctggaatcactcactttcaaccaaaacttagtccctccactactgaaacagactattactggagttaagacctctcaaacaaaattcgctaacaccatttcatgccagtgcgcagaagcatctgtttctacccttcaaaattctttctttgttcccaaaggtaaggatctgttaccctctttatactactcctaacgaaaactatataacagcaatttatctctcatcaaatgcagaaccagagggatccccagatgttgaagatgatggtatgttttcacaaatactattactgaatatctctttgcctcaaattttattgaaaatcctcttctgatgatgatgatatgttgtgtacagctctttcatgtccacagcttttagaagctgctcgaacgctctgtgacattgcagtccagtccgcaaaccacgacaacccaaacggaatcctcagatggccaaagaagctctctcagaaatccatgaaagcccgcaaatccaaactaatcgaaaagcctctggaaaggcacaggacaacggtttcatccatagatcttaactcaagcaacaacaacaataacaagaaccacgtgagaaaagattcagcagcagagcataatcaccaccatcatcatcatcatcctaagccttcaaagagactgaaactatcaacaatggagaacaagaagagatcattcccaagctcatcatcatccccaatagaatcagatagaaaacattcatcttcaagcaagttcaagaatcactcccgtatgatgttgccgcctccaccaccaacgagaacactccaaaagtcatccacatatcctcagaaagctcggaaatttccatga

SEQ ID NO: 149733 - DNA, 584 bp, Arabidopsis thaliana landsberg
gtctgggatgctgcaacgggtgtaaaacggtatacttttgaaggccatgaagctcctgtttactctatctgccctcactacaaggaaaacattcaggtaaagtagcaatatttatacggtttcatttttgctaagtacaagttgaaattcgtttctatttggttttgacttgtttatttcttcttctgcttaagtttatcttttcaactgctcttgacggaaaaataaaagcatggttatatgataatatgggttctcgggttgactacgaagctcctggtcgctggtgtacaacgatggcctacagtgctgatggaactaggttataacatgattctcatcatctttatgttgtggttctgttctgtatcgtcatgaagtgataataaatttaaaatctattttttattatattcacatggataggctattttcttgtgggacgagtaaagatggggaatcgttcatagttgagtggaatgaaagcgaaggagctgtgaagagaccttatcaaggatcccacaagcgttcccttgatgttgtccagtatatactactaaaaaccgttatctcgctgcgggtgc

SEQ ID NO: 149734 - DNA, 1945 bp, Arabidopsis thaliana landsberg
ctctccgtctcgtctttctccctctcttcactcccttgttttccccactagattacgctctctttcctattcttctcaaacgtcgatcctccccgatgccggcgatgatttcattgtcggagactgtctcgtctacgaggacggcgtcttcgaagacccttaccttgagaaggaggtcactcaggttgcgaagcaggagcgcaagaagaatcggcgtggcggggccaagagattagatgaatccgagattgagcccgagaacctcgtgccggaggaatggagggatattcaggcggaggtgaatctgacgaagaaggacaagcgcaaaatagcgcaggagatggagttcggggttcgggtagagaagaagagacaagggctaattccgctgaggaaagttgacttgaatgactttctcacgtacaaggaagccaagttggctcagttgaggcctgtcattctcgataaaccgggcaatttctccgacgactttggagcgtcaagcgatggagagaccgctgtatcatctcccagcgagcgagtggctcctaagaaccctagatgggcagtttacggaaagggattcgaccacgttgccaagttcttcaatagcgacaagtacgatcccagcgacaagaaatccgacggtatacgtttaccactcttgtttccttctcttgcttgaattgcaaaaagagcttatatttggctgatccctcgttaggccctcgaaagctgctttcaaaagaagaaaagtttatgctcaatagccggaatcctgacctagccgttgccacatcagtaagtccccttacgatgctcttcgtcaaagtgaatgttttcagtctctgatgaaaatgtatttatgtgtgtgtacctctggtgaatcagaaaaaatggcttcctcttcacacactggcagcatgtggagagttttatctggttgattccttgctaaagcacaatcttgatatcaatgcaaccgatgtggtatgtctgacttttttgaagctgttgcttttgtgcacagtgtttatgtttgttggcgtctctttctagtgttgtttccattcttgtcgtttctagggcggcttgacagcacttcaccgagcaatcattggtaagaagcaggctattactaactaccttctgagggaatcggcaaatccatttgttcttgatgacgtaagtggtcaactaatgatatttatatcttgttatgatctcccctgcgcttcagatgctggatctgatccgtttggtttatgataggaaggtgcgaccttgatgcactatgctgtgcaaacagcatcagctcccacaataaaacttctcctactgtataacgatgatataaacgctcaggacagggtaggatgatgtcaagcattcattgtaagacaacatcattgttgatcaggtggttgacaatttggcactgggttttcaggacgggtggactccactgcacgttgcagtacaggccagaagaagcgacattgtaaagcttcttttgataaaaggggcggacatagaagtgaagaacaaggcaagttcccgcgtatattcccatatctggttttgaaagcattaactgatgataccgtttttgactataccaggatgggttaactccgcttgggctttgcctctaccttggaagagagacaaggacgtatgaggtgatgaagctgttgaaagagtttccacttagcagacacaagaagagattggtaacaacagatgaagatattgaatagtcctttcaattgcagcttgaagtacattcccttacgagaacctgagaaaaggagatggaggtaaaggtgatgattaggacattagaacctcggagtcggagtgggtccactgcctcaattccttaaatttggtttgctgttactattatccatcgatgttgggccttaatcactcatccagtagt

SEQ ID NO: 149735 - DNA, 442 bp, Arabidopsis thaliana landsberg
gtaacaccggatgcagtgtttagcacagcggtgacatcattgaaaccagaagacgggcttgatcctaaccgagttaaatgtgtggtgcacaatcgtggctatgctatctatttctcaaggggtttgattccttataacaagtaatttctcttttctttttcttgtgtgtattggttatatgaatatcttattcatcctcatatgttcatattgatctttttgcaatgttccttattgatatgcttttgcggtttaggagtggtaaagtcaatccagattttccatacatgcttcatcttggaattcaggtaatgagcaaccaatttctgtttgcttttctttttttgttgtcatgatctaatctcggtttatctcatctttctcctcagagctttgattcgaagaatataaaggtatattcagagcttcaaccaacgccatt

SEQ ID NO: 149736 - DNA, 976 bp, Arabidopsis thaliana landsberg
aatttctgggttttttctttcctccaaaatttttaaacaatttctgtgtctgtggatttctacttggacggcgatggcgagaattggggctaaacccagaaattgaggatttgaattctgctgctgcggcgtctctgtggtggtttggtttctcgtttctgaaaatctacggtgtagtaagtcggagatgcagttgagatttagcaatggacagggaggataaccttccggttcaaccggataaacctccgaagagtctggttcgtcccattttaaacctggaaacaacttcgtcttcttcatcctcttcctcctcctcaccggaacttctacggcatttgcaagccgctttcaaacgccatcgcccactcagtcagtactttctctttctgggtcgaaatctcttatttctggaagtttaatttcactaatttaggtttctttggggtttatctcttttgacgatttagggctttttttgggaaagttaagttcttcttagaatggtttacaatcgctaggtttctctgatggtttgtggtgtgggtgatatgataagctagttaaaccttttgattatggagacgaactcaccattttagagaatgtccactgtttcttattttagttgtttttttggtatattgaactctttgcaatggatgatctctcatagagttcttttttttgttttcaggtaaaatgcagacgaccagtatcgggcctcgacgaagtgttgctccacaaagacaagcttcaagaaatacacgattggttacagctgaagggcagagatctcaggatgttgttacgctgagtcagagtcttgctgccaatactttgacacaggatactactaacaacttagccatcacttctgttgctggagaatctgcgtccattacgcaacctacagtttcagagcatttcaatccatcagatagacaaatggattttggaaaatctgctgttacta

SEQ ID NO: 149737 - DNA, 1498 bp, Arabidopsis thaliana landsberg
tcttcatttagtaatctttcgccggatcggatcatcgtttctcagattcctctttttaagtttcttctttcaggttcgcaatccgaatcttccataaccattgttcgtttcttttgtgattccggtttctgaaatttctgccttgtcgtggtttccttgaaatctgattacttggattctccgattctcttaggtcttaccaggttttgttttcttttgctgtggttccggtaaatttcatcagtttcttcgccgtcattttgtgtgtgttttagttttagttttttgttttactccttttgatttgttctgattctggataacagattcttatgttagtggaagaaaattcataacaatgactcatgtgtgatttaacttattattatttttatttttttggttgcaattttctttagtgtttgacttatatagaacagtgacatgtgatctatgatatcagtttcaaactttaatgtcttgatccttgttgatgttttgtttgtagatgggtaagtatcaggtcatgaaacgtgcaagtgaggttgatgtttctactgtcatatataaagctggaaccatgaaaggtttggttatacaaatgcatgtgggtttgcttaatttcattcatacacatgagaatgtgccttttacatggttttctatacttttacagcccctcatttgactggcttttcgttcaagttgttcgttaatttgcttgaagcaccacttattggctctttgattgttgattctttgaagaaagacaatggcatgacaaaggtctgtttttatcagactgacttcatcatcatttgcctttgacctttgttaaggtcctcaaggttgttgatggtcaatgttcttacatgtatgtgctcttccctgtcgtgactggcagatttttcgcaacacagttataccagaagagcccatgtttagaccggagttcccatctcaaggtatattcttcttctcgtcatctattctccaacaatgatatgttgtatgcttacatgaaatattgtgtaagattactccaatgagtaatcaatatatacaccttaaaaagatgattgtgtgtatgattttttactagaaccggagcatgatgttgttatagttggcgaagatgaaagtcctatagacagattggaaacagccttgaaatgtcttcctcagtatgatccttctcgtagcttgaatgcagatccagtgtcatctttccggtactacaagattcgtgattatgcatatgcctatagatctaagctgacaactccattgcaggtttttcatctgacttttttagttttattactctcttttttggcactaacagagagccttgttgcttattgctaggtagcaaaaagaataatctcaatcatagaggagtttggctatgacaagcctccaacaccatttttgattagatttgatgctaaagaagtcataaagcaagctgaagcttctacgcagaggtttgaacaag

SEQ ID NO: 149738 - DNA, 590 bp, Arabidopsis thaliana landsberg
aaggacacacaagctttgaaatcgaaccttctttcggggtagaagcttctgagctttaccctgatgtcaaatacactactgttgatgaaatcctcaaccaatatgtctaaagctgagtgcttaacgagaatgactctccacaatttgtattttgggttttaaataagtggctattaacctgtctgtttctccggctaatcaaaccgaagtggtggtttattttgaatgtaaggctttagatccggttaatattggtccacaattagtgtcatgtatcatcgtttactacacggtccagtattcacgggtttagaagcggcagccggtatagtcgaagtagtagtctgctttcgggtctaattagtaaagcaacagattatagatcatattgcaaatcatggataaacaactaaagggaacaattttcttccgagctaaatcaagtttagtttccatccttttttatcctgcctataattcttccttatagctctgcatagttttgtcaatgtaaaaatggtccaaaatgatattcttaacaattttttctttctcttttgcaaagacaaaaaaagtagctaatggtcagc

SEQ ID NO: 149739 - DNA, 620 bp, Arabidopsis thaliana landsberg
atccggttctagaatcccggtttaaccgccataccggtggaagattacctttactacgctctccgcttcttcttctcctcgattcgattctcctcatgggtttatcatgaatttttaggtgagaatttcgatttttgtaatttgatagtcttctctaggttggagcataattggcgttaggtttggtgattggtggattcagtttccattggtttttgataatttgtgctggcttttggccattgattctgctttttcagttttcttaatttgtgtgtggattatttgctatctgacagtattatcctctgctctcgcaatttggacttgaggaattttacattgatgaatttgattttcttaggttttgagtaattcagaaactcgagtgatgatcccgaatgatgatgatgatgcaaattctatgaagaattatccgttaaatgatgatgatgcaaattctatggagaattatccgttaaggtcaatttcgacggaactttcacacacttgttcattgataccaccttctttaccaaacccttcagaagcagcagcagacatgtccttcaattaaaactcaatcaaatcatggcaaggccttgtgatttgctccctgc

SEQ ID NO: 149740 - DNA, 430 bp, Arabidopsis thaliana landsberg
atcgaccgtatatccgcaatcgcagctaaatacgtaggcaagccagtctcaaactatccacttatgtctcctcctcctcttcctccacgtccactagaactcgccatgggaaatattggaggagaagcttatggaaacaatccaaacgatctccttaagtccatcactgcaccaacagaatctgacaaacctgtcatcatcgacttatccgtggctgcaatggaagagctcatgaggatggttcaagtagacgagcctctgtggaagagtttggttttagacgaagaagaatatgcaaggacctttcctagagggatcggacctagaccggctggatatagatcagaagcttcgcgagaaagcgcggatgtgatcatgaatcatgttagcatcgttgagattctcatggatgtggtaattaacattttca

SEQ ID NO: 149741 - DNA, 375 bp, Arabidopsis thaliana landsberg
gatcaccatttgaaacttatctgattcaattttggttttgatgatcgaatctatgcagctggagcaacagattgtagcttctggtggaatgatcccggccgtcgaactcggattttgagtgaatttcataaacatctctgtccattgttgtttcattttggactctctcttcttcctctctttatgtgactatcaaaaaaaggttcttatgtgaacttctttctttgtgccattggaagagtgagacatgctaaaacgtttcttaatccacatctaaatcccacatatgtaaaataagatctcaagcaaacatatagtcatgagtcatgactacaattatatagagtttgatcaagataatgtacgcatcaaggt

SEQ ID NO: 149742 - DNA, 326 bp, Arabidopsis thaliana landsberg; identical to SEQ ID NO: 38919

SEQ ID NO: 149743 - DNA, 671 bp, Arabidopsis thaliana landsberg
tgcatttctatccacagaaaggttatttatctatatcttccttactacctttttaagtattctaattctcgaaaagttgtaacataatctcttattcttagcagtagaagtatacgaaatgccatcagagattatctcccaaaacgcgacatggcaattctggtacccgtgttggatagatttgtggtacgttcctctaaacccttcatatttcagtcttagtagtcgatgtggtatgcgcactgaaaccttttgatgcgaccatgtacttgttcttactgtgttaggcgtttcatacaacactggacatgattcctccagaaacacataaagtggttatggaagttatcgagtcgtgcaaattgccatagaacggagggaaaaaaacaggcgacatcttcgttctcctctcactgtacagcttctgccacactttgggtttgctccacacttatagttagtggtctcacacaatggaacatgttacacgtataatatagacacaaatagagtatcttttagttctttcttttgaggttttgtttttttggttcagcttagtttagtaattcacatcccccattcttttgtacttttgtcatacaaagaaagaacaaacagatatatagaaatagattgcttaatgagagttaatcatatcgtatcttagt

SEQ ID NO: 149744 - DNA, 1076 bp, Arabidopsis thaliana landsberg
ggagctagaataacatttgcagggcaagtagctaatcatgtaaacactgtgtcacaagttgtgaacatactcggagacgagaatgaagctgctaattacctaagtaaatgcatctactcaatcgggttaggcagtaacgactatctcaataactattttatgcctgtttattactccaccgggagccagtactccccggatgcctacgccaacgacctcataagccgctacaccgagcaactccgggtccgttcatttatttgctaatattctctgtttctttaaactctgtttcctctgtccgctgttcatatatactctgttttctctgtgtttgataagaatatttgtatttttgtatggagtagataatgtataacaacggagcgaggaagtttgcgctagttggtatcggggcaataggatgcagtccaaatgagctggctcaaaacagcagagacggggtaacttgtgacgaaaggatcaattctgctaacagaatcttcaacagtaagcttgtgtctctggttgatcacttcaaccaaaacacaccaggggccaagttcacttacattaatgcttatggtatattccaagacatggtagctaatccttctcgctatggtaagagtcacctcttaaacaaactctatcaaatgttgcctgaaaactttgttgatggtttcatcaacgtcttgttaatggttcagggtttagggtgacaaacgcgggatgttgtggagttgggaggaacaatggacagataacttgtcttccgggtcaagctccatgtcttaacagggacgagtatgtgttctgggacgcgtttcatccaggagaagctgcgaatgttgtcatcggtagtcgatcttttcagagagaatctgcttctgatgctcatccttatgatatccagcagcttgctcggctctagttcatgaaatttcctccaagcaaacacagagtgaaaaagagagggagacagatttaatctttttcttatttaagtgtttggtgattgtttctttttgctgcagaagaattgtttgttttgttgagtttatgtatcatggttc

SEQ ID NO: 149745 - DNA, 383 bp, Arabidopsis thaliana landsberg
gaagattcaattcagaaaggaagaggcagatctgttattctctgttgaagtctgattgatctgatcggagctattgcggaggaggggtttactgcaattgcacggtggtaatggctgcggttccgcctgaaaacggcgtggacggagatgacgaaagagaggaagaagaagaggacgaggaggaggaagaagaagaagaagaagaagagaacggagatgaggctgaggaggagccacgtctcaaatatcagaggatgggtggcaacgttcctgcgttgctatctaaggatgatgcttcctgcatcgttgaagctgacaggatcctcgcgcttggtacgcacgacggtaaaagtgcgaatcctcgatttattggggaatcaggc

SEQ ID NO: 149746 - DNA, 1328 bp, Arabidopsis thaliana landsberg; identical to SEQ ID NO: 57464

SEQ ID NO: 149747 - DNA, 1563 bp, Arabidopsis thaliana landsberg
tacaaatcccatcgatcttttcggaatcttccctcattatgctcagccaccattaccagagctccattgtttcagttctccgttcaacgattatcggaattattcacaacactattagtatcaccgtcgccaaccgattttgattaccagctttggtgacgacagtcgtgattaaggaggttttggtaaatttcttcgttcctgtttgtttacaaatatggctgctttgaaaggttatggcttgtgttctatggactctgctcttcaattccccttgtctaagctattcaatagctacaagaggttatttctcttctccctcatattttgcagacatataacgttttgctcaagcttttgtgtgttttgcttattccaagctaggcataataatatctggaattggcttgaatagtcagtcactgtctagttgaaattgaatgctagtgttctagggattgaaagctattagttcaatggtgattctgtcgtaaacctgtctaattgaaatttgcaattgaatgtttctggtttggatttgaaaaactattacttcctttgtctaatcatatagaaagacttcagttttataaataaagttgctttttttttcttacattgagacgtatggactcaagctcatgtgtgttgttaacacagaaggagctcgaaatgggtctctcccaaagcagctgttgtacccaatttccatctcccaatgcgcagcttgcaggttaaaaacaggtctgtcagatagagtttagctggaccaacgttatatgattgtacaatctcatagtatatactctctgttctggaagtttatgccatacctgggacttgttttgtttttgtgcttgtcaggacaaacacagacgacattaaagctctacgtgtgatcacagctatcaaaacaccgtatctacctgatggaagattcgaccttgaagcctacgatgacttagtcaacattcagatacaaaacggtgctgaaggtgtcattgttggtggtacaactggtgaaggacaactgatgagctgggacgaacacattatgcttataggccataccgttaactgttttggcggaagcatcaaagtcattggaaacactggaagcaattcgactagagaagcaatccacgcgactgaacaaggattcgcggttggaatgcatgctgctcttcatataaacccttactatggcaagacttctattgagggactgattgcacatttccagtctgttcttcatatgggaccgacgattatatacaatgtgcctggtcgaacagggcaagatataccgcctcgtgccatcttcaaactttctcagaatccgaatttagctggtgtgaaggaatgtgttgggaacaagcgagtcgaagagtacactgagaatggggttgttgtgtggagtgggaatgatgatgagtgtcatgattccagatgggattatggagcaacaggagttatatcagttactagtaatttagttcaaggtttaatgaggaagttgatgtttgaaggtaggaattcatcttgaactaaagcttcaccttt

SEQ ID NO: 149748 - DNA, 775 bp, Arabidopsis thaliana landsberg
gcatctctctctctgttggatgggcagattacgagttccctgattcgcggattcttctgaagttttctcatgtcaggctgtcttgatcgatttgtgaggccgtgtaagtaaattttaatcatcccctgtctcaggattctcgcgagtccgaaagcacgcaattctggtttgttagattgagtttgagagctagacgtagacgatgctctgagttttagattttagggatttgttgttgttgttgttgatgttgaatgagattttgtttggtttaaggttttgaaggagtttcaagcaatgatgagagaagagaaaggagatcagatttcaaagtttcagaggatgagaagaagacaagaatcgggaatttcaatttgaagaagaaagctgcgaaagcttcgagcaaactcagacattcgttgaagaagaaaggtagcagtaggagaagaagcagtgatcgtactttctctcttaccattgaagatattcatgatgttgaggaattgcgagctgttgatgaattccgtaatttactcgtctctgagaatttgcttcctcctacacttgatgattatcacatcatgctgaggtgagactttatttctgtcgattcatttttcatgatgatgatgatggtgatgatgatgattttgatgttctatgttctctgttagattcttgaaagctaggaaatttgatattgggaaaaccaagttaatgtggagtaatatgatcaaatggagaaaagattttggttctgacaccatttttgatg

SEQ ID NO: 149749 - DNA, 342 bp, Arabidopsis thaliana landsberg
gccgcaacgggagttgctaaagactttcaaaggtttagtgtcaagccactagacagctttggtgtcaaagaaccggtggataagaatgaaatgacccaggtatatacttgcatattatttttgtgcatcatttataaagtcttgcctactgaatcttaactttgcagagtattaagaacatacttgcttccaactttcctgatggtgaagaaaaccacccacaaactctcttgtacaagaatctctggctcgaaactgaagctgccttatgttccacaacttgcatggctcggtatcatcggatcaagaacgagattggtaatctcaaattgaacaataaag

SEQ ID NO: 149750 - DNA, 1345 bp, Arabidopsis thaliana landsberg
cacattctctctaaactctcttcactgttactcgacaatggctactacttctaactcggtacttttcctaagttctgactcactgattcatcatcatcatcatcaacctctccatctatcttcctccagatctcactctgtttctctcccacccaacaagcgatccaattctctcacgcttcgttattcaacaaatggcgatagcacctcaaccgaaaaggaaacaccaatcgaactcagtaagatttttctctcgatttctaatgtttccgacattcgtcattctcttactcaatctgtttctcttaatccccagaattcccagcatttccaacggtaatggacattaaccaaatcagagagatattgcctcacaggtataaaatattcataagacttcaactttcggtgatttgatgagttttcgttgaaacccatgtttgaagttttgatctttctggaatttgacattatggttcttggattttaggtttccgtttctgctggtagatagagtgatagagtatacgcctggtgtttcagctgtagctattaagaatgtcaccatcaatgacaatttcttccctggccatttccctgaacgaccaatcatgcctggtgttctcatgattgaggtaataataatcgtttaaagttgcaaacttttgtcttcaagaagatcaaagatcttgtaattgaaatgttagctgttgtatacctttcaaaatgctttaatgttggctactgttttaatggaagatggatgttaactatgataagatgttaatgatctgctagtttgatggtggttttggattctgaatcctgatagattagcgcgagatcttcacctggttggtaattgaattttccttttgtggtctgatagagtgatgagtatattatagttgagggacttcaacttcgctttgctaaaaactcagagtctgcgtagtagaaatatacaactttaagcttgaaagaggttaatgatctcgctaatttggtagaggttttggattctgaatcccgatagaggagctgtgatgctctataaaatagatcaccgcccatatggttgagtataatgtcttgaagatcatttcactgaaaattcagagtttctgcattgcaggcaatggcgcaagtgggaggtatagtaatgctgcagccggaagtaggagataaacaagataacttcttctttgctggtattgataaagtgagatttcgcaaaccagttattgcaggagacacgctggtcatgaggatgactcttctcaagttccagaaacggttcgggcttgctaaaatggaaggtaaagcttatgtgggtggtgctctg

SEQ ID NO: 149751 - DNA, 756 bp, Arabidopsis thaliana landsberg
gctttggtccgttttgatgtgtgtaacagctgagtcaagaaaccaaagatggcgatgttactcaaaaaatagtagtttatcagaaagcaaataaggaggtaaaagatttgttcatcctcctggtgatttcttgtttggtacataaccatgtggcagattcatgaaatactggttcacactctttcaggttgccataatctgcaatcatcagcgtactgtatcaaagacacatggtgcgcaaattgaaaaattgactgcgagaatagaagaactcaaggtacaaatcctgtataaactcttgaaaacttttttgaagttctctgcttttcatctggattcatttaaaatgcccttccgtttgtttgttttttctaaatctgtaggaggttcttaaagagctcaaaactaatcttgaccgggctaaaaagggaaaaccaccattggaaggttctgatggaaagaagattagaagcttagaaccaaacgcgtaaaataactttccctcttacttctcaaaagacttctctagatatctatctcgttttgaagatctacgtcctttgaatgcaggtgggagaagaagattgctcaacagagtgctaagatcgagaaaatggaacgagacatgcatacaaaagaggacttgaaaacagtggcactgggcacgtctaagatcaactacctggatcctagaatcacagttgcatggtgcatacgtcaagaagtcccaatcgaaaaggtaaaactctcaggatg

SEQ ID NO: 149752 - DNA, 1381 bp, Arabidopsis thaliana landsberg
agggttcagtacaaagttcggaatcgtaggtttaagaattttagatcattgaaacagccatgtctaggcaggtcacgagacttctcggatctcttcgccgttccggcggcggctgcagcggcagctcagaggtctgctctctcacttcattgctacagtctcgttccttcgggacgactcctccgccttctgcggcggtctttgtcgacaaaaatacacgtgtcatctgtcaaggtattatccgtaagaacgggacccttcacactgaacaagccattgaatacggcaccaaaatggtattgtattcgagaattcacatagatgcaaatgtacttcttcaacgtttttgtgcaattcggattcaatacttatttatgactaccaattttgatttgcaaaatcgaaattcttagttgagatcatagaagacgattatttactatttcatcttccaaattcacttggaattggttcgtttatgctgatgaaatggtgtttgttttgtgtttgctttaaagcttgtgatgatctaattttaggtttgtggttgtttggttaataggtagcaggagtgacaccaaagaagggtggaacagaacatttgggtctacctgtttttaatactgttgctgaagctaaggctgagactaaagccaatgcctctgtgatttacgtacctgcgcctttcgctgctgctgctatcatggaaggtttagctgctgagttagatcttattgtttgcattactgaaggaattcctcaacatgacatggtaatacttgtttacggttttggttttcaatctcattgtgcacctttcctcttgccatatctgctcggatacttttgataagttgtacactaaatataaggcgactctactgatttctctggcttttgtaatgtaggtttgcgtaaaggctgctcttaacagtcaatcaaaaacaaggctgattggccctaattgtcctggtattatcaaacctggtgaatgcaagattgggatcatgccgggatacatacacaagccagggaagatagggattgtttctcgatctggaacattgacatatgaagctgtaagggtctttgtgttgccttcatgtttgtctctgtctttctcaacttattgtctccatagcctttagcatgattagttgtcttacttaagaacctctactccgtcgattgttagattaagctttcactgatgtcagttccttactggaagacctgcttattaagtacttcttctaatggttgcattttggttaatctttcatgcaggttttccaaactactgcagtaggtttggggcaatctacttgtgtaggaattggtggggatccgtttaatgggacaaattttgttgactgcttgg

SEQ ID NO: 149753 - DNA, 1115 bp, Arabidopsis thaliana landsberg
gtttttgttggtttgatttcctctgttacttatgcagcaaaagaagaaattgagtttaaaggagaagtgtgagaaggaagtttcaggaagatgggtgaagaaaagaggagaatttcaggaagatcagtttcacttccatcgatagacatattactagacgagaaaccaggttggccatttcttaaaagagcaagtttagggacaccacaacaagttcacaaatggcacacacgaaaagtctcagtggtcaattgggtcatgagcttacctgaacggtttccaaatcatcaacagactctaaactatgagacaagcttgataaagaaacaaatcaaggacatattgagagacaataacaaatggttcaactacaatgttcttaggaaagcaacatcagatttctctcaaggtactctgttttttttttctctgcttctcctgatgagtttgtattgatatttgcttttacatgacagagaatgtgattgggaaaggaggatgcaacgaagtgtaccgagggattcttgaagatggaaaaggcattgcagtgaaaatcttgaagtcatcatctaaagaagcaatgacaaatttcgttcatgaaatcaacattatctcttctttgagtcaccaaaacatctcaccgttacttggtgtttgtgtccaagacaatgaactaatctccgtttacaatctttcaaacacaggaagtttagaagaaacccttcacggtaaacacaacactctcaacttatgtttaagattctgattgatttggtataaagtgtgaaatgtgttatgattgattctgcaggtaagcaaaagggaaagtatgtattatcatgggaagagagattcaagatagctatcgggttggcggaagcattagactatcttcataaccgatgttctaagccagtgattcatagagatgtcaaaacttctaacgtccttctatcacttgagctccaacctcaggtaatgtaagcttctagctttgatttatatgttaattttcataagagaccgagtgtatttcttatgattatgagaatagctgtcagattttggtctgtcgatgtggggaccgacaacatcttctcgatattcgatacaag

SEQ ID NO: 149754 - DNA, 970 bp, Arabidopsis thaliana landsberg
ctccaaatctcttaactacgaggacccattcaacaacccttttgtgaaacttgataaaggaagctcaacggtagagatgtgcgggaaagtttatcggctagctccagtcacacttacagagaaagaacaaactattcatcagaaaagaaggtcaagagcttaccaatggaagcgaccaacgatttttctcaaagaaggggactcgataccacctgatgttgatcccgatacagtcagatggatcccggccaatcatccgtttgccaccacagttagcgatatcgatcaagaccttgcccagaataatgtctaccagaagcaaggtgttcttttccggattcgagctgagcatgaagctatgcagaaaaagcttgaagctttacaaaatgtaagtttttttttatctctgagaactaatatttgtatttcgcgggaatcaaccgaataccgagaaattatgattgatgagtttgtttctaacaggaggagaaattgaacaatctgagtattgacagtcaaaatgccagagatttccagaggccatacaagttctcagcgaagctcgaaggcgagaatatccagaagaattctcaggagaatcatacaggcaattcatcctctgaggaaacgcacaagtcctgagacgtactaatctaattgtaaatacagttttccctcgagagtcatacttgcgttccaagaaactggagattttctttgtagtagatcacacttacctaaatctatgtttttctctatttgctttaccatcagaaccaagtcataaagacaagagaaagctttatccttaaaccttcgtaactatcggtgttggtcaaggaaagagagaaaattgagtacttattagattgattttgacaacgaaacaaaggaaaaaaaaaaaaaaaaaaagaaacaaaaacgatatgaaggtatctgaaaaacaaaacaaaaaggggatgaagagaat

SEQ ID NO: 149755 - DNA, 352 bp, Arabidopsis thaliana landsberg
cagtttaacatacaaaggctagcatttgaggaaggtcatggtgttgagacactacaagaagctaagtctgcattatggaaagtgttggagaaggtcaagctgaatttgcagaaatgacaagccccttttgctactttatacgggtccttttaaaatagtaggaccaataaaatggtggttggttcctcttttcttcttcttgactagctgaaattttgtagtttctttcttttatcttttgacctcccttttgtagagtatcaaaattggaggtttaaaaaacgtcaatctggaaatatggggttgatatctgagtttctaatcaacaatattagagcgttaatgatatatt

SEQ ID NO: 149756 - DNA, 856 bp, Arabidopsis thaliana landsberg
agagaaaggtaagcaagaactggcatattccattgactttccctagtgaggctgttatatcagcctacttaaatccgcaagtggatctgtcgactgagaaattctcatggggcaaacctgatctttcagtacttagaaagtaagttgttcctttacttaacatttcatctaaacagtatggcatagcttgacctttttttttggagccacttacagcggcagaaaggtttcaatgaatctgaagtatatgaaaaatatatatatcatgacttgtccgatggacccggtttctgtaataatctacttatcaatttatgaaacaatgtcctgagttctgattctgtagtatcactttttgtgaaggctatgctgggaaaagtttaattggaacggcaagaaaacagatgaactactactaccagtcttgaaggagtatgaaaagcgcgaggtcttcatctaacatttgatctcttatcgctgatatgcttatgaataaataatatgaacagaatctgacaatttgttttctttccacgaagacgcaacttcggattgaagctttctattcctttaatgaaagatttgcaaagatccgtagtaaaagaattaacaaagctgtcaaaggaattggtggaggtctgtcgtcagatgtggccgatcatactctccaggaaggtccaagaaaacgaaataagaaaaaagttgctcctcatgaaactgaagataacaacacttcagacaaagattcacctattgccaatgagaaagtgaaaaacaaaaggaagcgcttagaaaaaccatctagtagtagaggtagaggcagagcccataaaagaggacgaggaagaggaagagt

SEQ ID NO: 149757 - DNA, 306 bp, Arabidopsis thaliana landsberg
aattcgaactcttaccagggagaaaagtaaggatcccaagaacaagtaacgcataaccttgagagctatctccttccatgtgaccaatgaagataaaaaacgacaaaagaagaagcaagcaaccaagaaacaaaagaaacacagctaatgctatagatttccatggaactctatcaaatgctttcggtgaataatcgaagcgaggatcgaaatctctcctttcaccaacaccatttccatagccttcatcatcttcatctcctggaagctgtgcataccgtacacttctccttgacgccatttact

SEQ ID NO: 149758 - DNA, 345 bp, Arabidopsis thaliana landsberg
cactaccttctcttccaaaagtcgtcgccgggaaaacacaaaaagacgaaaatgaccctattcaagaggccatgtctttactcaaagatggacaaggaagatccagaagaggtacttagccgacgagccaagttcttgatttacaaaacacttcaagaagccgacttgatttctcggcgtgatcctcattcgtcgtttatacggctgaagctttatctgttgaaggtcaagatcggaaagaggttggctaagctacgccggagtgtagtatccgccgttagatttggcggaattcgaaagcattctcataatggcgtgagagcgttgaagaagatgttccaaggt

SEQ ID NO: 149759 - DNA, 818 bp, Arabidopsis thaliana landsberg
cactctcaggcaaagccacaaagccatcttaaaaaagaaaacagatatgtttttcctgtgtgtcttaagtccgcgctcttccgatattagtgaacaaaaatctgagatcttgcaagctaaggtaaacctttctaactttcagtgttgatgagccaagaaaatgttaaaagttactgacatatatttcaaatttaaccaaactggtatattgtattacagtggatgccgatccaagagtatgtagaccaaccatggaacaagaagaacgagatgttcaagttcatggctaacatttgccaaaagaagtgtgaggaagaatacttgggattcgccattgtgccaactaccacatcatctggtaaagagagctttatctactgcaatgcggatcatgccaagcgccttaaagtatcgcgtgaccaagcctctgcttctctctgaaaacattctcatctgattctgtttgatctcggcatgtgtgtgtccagtgtgtacaaaacaggaaactttcttctatattattccgattctacaaaattgcgtctaaatatttaagtttataccatctctatgagccactgtaaaacttgccatcgacttctagtctatttccagtgatggtttgattctcccaacgcttacgtgctttttaaagatatgaggcttaagagtgttaccatacacttggtttattcttccaaaatatcttctcgtaaccggttttaagttctcagctgtatcgtctcttgaccatttactacactggtaaatggtgtgaatccaagaaagtgttaatgccattaaaaaggttcacatta

SEQ ID NO: 149760 - DNA, 795 bp, Arabidopsis thaliana landsberg
ttggctggagaattcaagaggatgaaacatagaaatcctctttgactaaaatattttaaaccacacaagagaaggaggaggcaatggcggtgttatccaccatctactccatcaccagagcttcaacgcctactatggcgtctctaactaatgactcaccgtctccacttccttcttcttcaccgtcgaagcttccctctcctacttctccgtcaaagaaaccgttaaaactaagacaagtgagcaaacaaatgggaagtcaaaaccagcaacgacgaggcaacaagccttcgatagcacagattgagagagcttttggctctggatcatatcgtgattccgaagggtaattaaagacactaattacattttcaaaatgtgtacttatatacagtatcgtatatgcgcggttttgatatttgttttttttgtctcgtgaaagggaaatggatatgaatacggtattcgatgagcttctattaggccatgctaataaattcgaaagtaagatcgagaagaagctacgggagattggcgaaatctttgtagctcgaacagagcctaagcttcgttcctcgggttagtttagtgattataatctcatactaatcatattccatagttgcgttggcttagacacatctacttcattgatattgcagggaaaccagttttgatgtttacaattcaatggattcttccaatatggattatgtcactgctcgtagcttgtggaagtatcaaactcccctttagcatcccttttcctgatgacttgatcatgtgattcttcta

SEQ ID NO: 149761 - DNA, 912 bp, Arabidopsis thaliana landsberg
aaaaatcccgttccattttttgggtgtggttgggaatgtttaaagctccctgcagggttagtaacaattatcatgtggacaaatactgtatatagatagagccttgtgtatgctgcaggtgtttctgctctatttccattttagatctgagacatattcgagagttttgattagattgcgtatttatttacttaaggatcatacttggtggttgtaactgagagtgaacgtgttggatcgtttctggggcatcctatattcaaagttacaacgcttaaggttcttccttgtgatcattcacttaaaaactcgcctgaagaacaggtaaattctgtggtgtccagttttctgtggaatatattggtagtaatgatggatctcaaaatctcaaagaattgtgtattatttccggcagaaaaagatggagaccgagttctccaagctcttaagtgtagcagaaaagacaactggtctctatttctcatatgaagttaacttaacattgaggtaaaatggtttatttctttccttgtgatgttttatgtttactcattgatgttgaaaattatgttgtattactgtactaaggcatgtacaaaccaatttagctataatagctgacattagtctgaatttcagtagttatttccttttagtttgatctttatttttgcgatttcagctcacaacgcttgcatgaaatgggtgatgagtctaagtcacttcctctgtggagacaggtgaccatataactacttctgggaagtttattaaacttccttggaagcgttcattagtttttccttgttgcaaactgaaaataacttctgctggtggttcgttctttttttacaggctgaaccgaggtttctttggaacaattacatgttggaagttctcatcgataataag

SEQ ID NO: 149762 - DNA, 2995 bp, Arabidopsis thaliana landsberg
gcgagtacgcgcgggacagtagactcgccgtcgtaagactgtagacacaccggacactccggttcctccatcacctccgatgattcgatgcgacgaacaactgagttaatccgacgacgttttagactttaactaaaacaacatttagtcccgagggtagttctgtatacctagtgtgtatatacatgaaaactatttgtgttataagtcatcaattttctaaaatgtctctttagtctggtggtaaagtcttccatatgagctcacaatttatgggccggctctgatttctgatgaagtgaagtgcatttgcatggtatattgtcatcttacctctgccaatatattgcggatcctaagacatatgaagtattttcatagtacaagctcagacccgtaaaagctaaagatcaaatgtatatagaattcgtcgaagtcttggaaaagaatgatgttacaaatccaagactttatcaatgccctagcaacatgcattaataaagtcttgcattaggaagattctctcttgtccatctatgatatccacaagccctggctcactagaatagggtggatgtgtgcgataacttaaagtatatgctcacttaaaaaatttacatgagaaaaaagcttttatttttttggtaaaaaaaaaagtccaaatataattgataacaatcctaaatttcttttaaagatatattagaataacccagttcttttatatacaaaaatgccatatttttaaaaatgttaaaacactatttttttatattttttttaacactcaaaatttacttcaaaaaagttctaaaaattgcctttttttttttcaaataacaaaaggtccaaacaaaaacaaattcccgtaatacacaaatttatgttgggtcggggctggacactcactgtcaactgaaagtttaagcatatttttataacttaatactggagttccataagtttattgatgaatgtgataagtttgtctcaatgtagaagctatgtcctagagattcactcaatgtaacagctcgagatccactcaatgtagcagctatgttctccagattcattcgtatttgtaaaaaaatgaaaactagaggtggcttgattgttggaactcgacgagtattgttccaggaagcagccgtcttacttcttttcaataacatatgttaaataaatcgacattgtttgttcaatcatagagagaacttattattattattattttttttttattgtagtagtaatcatgttcattcaaattgagcaattatttgctttctatctacgcccaaaaaccaacttctcaaatgcatcgacatgtaagaaaaattgcttttatgttttaaagttgtgtaacatttctcttggaactattgattgtctcaacgttgcaaataaagtaataaaatcctacaagatactaataatatccaaactgggcttataatcctaaaaatgacttccataattaaaacgaatttagtttattaattagtgtaatggaatattttgtcaataaaataaataatcacgaaggattatataaaggaagaaaaaaaaaggaaggtgggaattttaaaagggaaagacacctgtctctctgacccacccacccattcatttctgtggctactctatcgtcgtcgtctccacacgcgtcggtgccctcacggatcaatttctagagagagagagagcgagagagacgatacccttgtctagattctccggcaagttttgttccctccttcgatctctccttttttcttattcagcatttccccattttttcacgcaagatccgtgattttccagggattgatctgattgggggatcgagaaattcgtttgtgttttctgctcgattaaccggagaaatgcacgagtttggtgttctaacggagcgttatgggattaagccacaaggtaaatctgctccgatggctgcttctaagcgtaaccctaacaacaatggtcagagctggaatttcggtacaggctcctctggtttaaatgcaaagtcgacgtctttttcttccaatagctcttggaataaggattctactaatgggtctttgtttgatggtgacgatattttctttccggctaactctactaataggaaggtttcgaatgattttgatgtttttgctgggttgaacaaatcttcatcttccggtgataatagcaagtcttcattgaacgatgatttgttcttctccaattttgggaatccggggaagacaactccttcttcagctgatgacttgtttggtggtgttattcctgggtctaaaagctctgatagtgttaagaatgatgatttgtttgggtcattctcttcatcggagaagcaatatgctgctgcggttgatgatttgttgggtttggggaagaatgaagctggttatgatggattgatacctggttttggtggaagtactcagacgactagcaggtttgtgatcggtttatgaaacatttgttgccaatttctgttatattgtatgagatgctaatgtttgtcatgtatggaatatgttactgtctcgtggatggtatttgaaatctcagataacctttgtacaggaaaatgttttactgttatggttttgaatttttttgttgttgagatattttgtttttgttatgtttttcagcaagactacaccgtcgaactttgatgctactgatccttttgtggtcctagaatcaaccacttctactggtctgttcgtggatcctcttgaagaatttgctgctacagtcagctctcaggggataaaaccatcaaatacttcacatacttctacaaaactcaagcctccgcctaaaccaacacaaaaagtgaacagaggttaatttctttgatgacctgaaagtgtgtcggattagagcttttgtttactgttttcattgtgctctaactagtcatgcgattatttccacaggtaagagtgtaggaatgtcttcaatagacgaa

SEQ ID NO: 149763 - DNA, 844 bp, Arabidopsis thaliana landsberg
atgttaaatacatatcggaacactgcaaccgagtcagaacgggaatgcatagctagaaatcttcaggaaacagaggaatggctatatgaagatggtgatgatgaatctgaaaatgcgtacatcgagaagttgaatgatgtcaaaaaggttactctctcaaagtttgcaatataaaggttaagtctatgtggataacattgtcctaattgatggcttatgtttctgagcagctcatcgatcctattgaaaaccggttcaaagatggagaagagcgagttcaagcatcaaaagatcttctgaaaactattgcagataaccgaatggctgcagagtctcttcctcctccaagaaagaatgcggtttggttctaaactactaacataagtctcactctgttggcaataatatatcttataagatggacaaagtttgttgtctagttggctatatgattgagattatataaccatgatgtttttttcgttttcaggttctcgatgaatgccataaagctgagaggtggctccacgagaaaaccacagaacaggaatctttacccaaagacgctaatccagagctgcaatctgctgaaatcaggagaaaagctgatgctctaaacgcgtaaatctaatctttccctctctttctactcttcaagccatcttcattcttcacatttctactgcaaaaactttggtcataattgatgaaacctatccggatataaactgatgaaaggattgtgaatgtgtttcaggacatgcaagtacattgggaaatcaaactctccccccgcgaaaccggaacataacggatcatacggaagtagaaaatcagatgatat

SEQ ID NO: 149764 - DNA, 694 bp, Arabidopsis thaliana landsberg
tcgtcgtctctcgaacgcgtcactcttatagtcggttttgtcgtcgtcagtaatttgcgatttttgaaggttaacgagaaaaatgtcagactctgataatctacagcttccaccatcatcgacaggtgagaccttcttcttcttcttcttctttcgcttattcaaatttccgagctacgttcttctttagtgttttcgcgagacgtttttttttgtaaaagtcggtctcgtacaagtttcgataggatttttgttgggagggatttcgaattttttttattggtagagagttcttagggtttagaggagattgatcagatcatgaaaatttgggatgctcatctttatcatctgtattttgttaattctaggggcaacagttgcagctactgatgttggttggtacattcttggtgaaaatcagcagaacctgggcccttatactttctctgagctatgtggtaagtgttcatgttaacagattccttgttctagtaaggtttataagaaatacgagctattaagcgctgtactttacttgtttgctttgattgggcagaccatttcaggaatggttacctactagaaactactctagtctgggctgacggaagaagcgaatggcagccactttctgccatccccgagttaatgtcaaggatatccggagctgagattgcctatccagctgtag

SEQ ID NO: 149765 - DNA, 380 bp, Arabidopsis thaliana landsberg; identical to SEQ ID NO: 15131

SEQ ID NO: 149766 - DNA, 632 bp, Arabidopsis thaliana landsberg
tcttaagaatttcattgaatttatctctctcgctctctctctctttatttctcacccaaagatcaaagctcttcatggccgttcgtctaattccgaccatctggctcttcatagtctttgccgtcatcgtgtcagccttgccttcgctggtatcttaaagaaaactgttggaggtgaagaacaagaaacttgacggtgagagaggaagagaagagtcacatgcctcatgtgaccaaaactagtacgttaagtgctctaccaaaggggaaaattcccaactcgacaccgagcaaaaagggtcacgcggccgtcttcgccggaaagctccgatcacgacatctctccaccgttgatcggtatctccgatccgttcctagtcccggtgttggccattgatagtctcggctagattcatatatatatttttttcttccatttagtacattctttattctaactatataatacgaaatttcctacaaggtatacctttgtttttagaattctttttttttttcaggttactacaacttttgcatatgtaaattagtcaaaagtttattttcttccatatcacacgaggtttaatatcctatcttgtaattagttaatgttacttctcattttataac

SEQ ID NO: 149767 - DNA, 874 bp, Arabidopsis thaliana landsberg
  unsure (1)..(874): unsure at all n locations
cttggagttgtagaaacatacagaaaacgtggaatcggtattgattctgaccccatgtagtaaaccaatgatatggatattttgttgatggcttgatgcttctcttctattgcttggttttgttaatattaagttctgcaacttttttgtgcagctaaggcacttattaacgaggtcgtcaaatactcttctggtatccctgtgtgccgtggtgtttaccttcacgtgattgcacacaacaatcccgcaatccggttgtacaaaagaatgtctttcagatgtgtaaggaggttacacggattctacttaatcaacggccagcatttcgattcttacttgttcgtctactttatcaatggttctcgctctccttgctcacccttgtatgtacaaaacacaagtattttttgcattctaaattctgtttgctgtgatgtttctttgcggtttcttcatagatggggtnnnnnnnnnnnnnnnnnnnnnnnnnnnagatcttgcggtgttggttctgaattatatgaggagcggaatcaaatctttcgnnnnnnnnnnnnnnnnnnnncacgacgagaaaggctcgaaatggcttaaaagcaaagacaacacgcggtgtctcttgcccactcagactaaacgaaaccttgcatcggaaagagtatcatccgggtatgattacgtatagtgtccgtctcccattcatagactttgtaaaatcattcattttaatgtcttccattaagctctggttgtgatcctattgtgtgtgttcgtgtagaataataatgtgataaaaatgtaaatattgtgatgtgatagttgaagacaactctttgggacggagggttcaatccactgttagtcttattgtctt

SEQ ID NO: 149768 - DNA, 2208 bp, Arabidopsis thaliana landsberg
aataaggaagacgcagacgaagaaggtgacaatggcgtacgttagtatgggtgaagctcaccggagaatcactgaatacctaaaccgattctgcgacgccgtttcgtaccaagactcttctacactttgccgtctcctctctttctcttccaattctccacctcttctctcactcgccgacgcactcaacgtctttcaggtacatatattctctgttaaatcgagacccatgattcaaattagcagcttggagtatgttcctgtgattagtggcatgatccttgtattggtaaagttaggttcgatttcaaatccaggatgcttctgatatgttccgattgggttctcgtatgaattgtgaacactaggagcatggtttttatgttagcaaagtttgtaacttttaggttaaatcgattcaatgtaagatccttaagagtatgattttctaattgggtcctcctacttcaccaatgagtatgaatttctgaatttagggctcaaaacactaggaacattatctttatgttagcaaagtgtgtatcttttaggttcaatcaatgtcaatctaggatcctcctacttcactaatgagtatgattttccaattgggtcctcctgcttcaccaatgagtatgaatttaggccgtgaaagtgtctcctattgagttgttgtagtgaacactctatgtctatgtttgagtttatgagtatggattttagatttagggtttttatttatatgtagagagctgtgaaagtgctgaatcctttgagttttcttttctttgactgatacaggattctagcagtttgattagacagtctgatagattctctgaatatggcgagattctggctcatgtgtttcgttctctacaaagttaccgagttgggaatctagtcgaagcataccttgctttcgagaagtttgccaagtaaagtcttcttgttcctctctgctcctctattgatgtctaatatgattcaggggtgataagcttttttttttgtctgttcacaatgtctgatatctgatggattctatatgtgcagtgcatttgttcaggagtttcgtaattgggaatctgcttgggcattggaagctctgtatgtagtttgttatgaaattcgagttcttgcggaaaaggtagtatctcatttgtatatccctttttcaaaatcttaaccttgtctggtttcattgtgtcgaggagtcagttctgaaagcatgatttttccacatggaattgcaggctgataaagatttaacttctaatggaaagtctccagagaaattaaaagcagctgggtctcttctcatgaaagtttttggagttcttgctgtaagttttccctttgatctatctatatatcttcaggaatattagtttatatttgtgttcaatattttttccggctccttatgtagttttaaactataggggaaaggtccaaaacgagtaggagcattatatgtgacttgccaattgttcaagaccaactttagggtgatatgctgtctggcaacagttagatatttatgatttaaccattaaatggagtactaaacaggtatccccaattttgtattttagcttggaaccgtcaatctttgtcgaagtgtaataagaagtatcgaaactgctcggatatttgactttgaggagtttccaagaagagataaggtctggcgcagttctctgcaaacagttttagtttttggcctccttattcagttacttattatcttctgtttattcttcgcaaacaccaggttacatacatgtattataccggccgattagaagtcttcaacgaaaattttcctgctgtgagtcactaagagattttttcttaccatcacagttcatttcgtagtgtcaatccaaatattgatagtaacatttaatctctttttttggatcttgcaggctgatacaaagctatcatatgccttgcaaaattgcaaccccaaaagagaacgaaatataaggtctgattctggttttactctgtgattaccttactcttgcattgcgttgcttaatcagctaatgtggccttatgtgaatcaggatgatattaaagtatttggtaccggtgaagctttctttaggaattataccaaaagatgagctcctgcgaaattataatctgcatgaggtaacgacttttctgttgttctataaaaatttcaaacgaatc

SEQ ID NO: 149769 - DNA, 257 bp, Arabidopsis thaliana landsberg; identical to SEQ ID NO: 79532

SEQ ID NO: 149770 - DNA, 2275 bp, Arabidopsis thaliana landsberg
gtaactaggttgataccggatgctaaaggaactacgtgtaaccagcggttagagagagtcagcggaacagagcatactcatattctccgggttccttttaggtctgagaaaggaatcctccgtaagtggatttcaagattcgacgtatggccttatctagagaactatgctcaggatgcagcaagcgagattgtcggtgaattgcaaggcgtaccggactttatcatcggtaactatagtgacggaaaccttgttgcatcgttaatggcacatagaatgggtgttacacaagtaagagtttcatgtttttcagatgttgttgtatgttgtgtttgcttatggaacatctcatatttggattttttgaatctttgatatgaacagtgtactattgcacatgctttggagaaaaccaagtatccagattcagacatttactggaaagacttcgacaacaagtatcatttctcttgtcaattcacagctgatcttatcgcaatgaacaacgcagatttcatcatcacaagcacttaccaagaaatcgcaggaacgtacgtgacttgttatatcaaaattttcaggttcttatacgcaatactaatattatttgctcaggaagaacaccgtcggtcaatatgaaagccacggggcttttacgctcccgggactatatagagtagtacacggcatcgatgtgtttgatccgaagttcaacatagtctcgcccggtgcagacatgaccatatatttcccgtattccgaagaaactaggagacttacagctttacatggttcaatagaggaaatgctctatagccctgaccagactgatgagcatgtgtaagttattggcattctgttattcaatatggttcacttcggttcttaattggttttgggaattcataaccaggaaaccaaatactttccggtttggtttggcaacatttcagtttattttttgggttgggttatattttgcagcggtacactgagtgatcgatcaaagccaatactcttctctatggcgaggctcgacaaagtgaagaacatctccggtttagttgagatgtatagtaagaacacaaagttgagggagctggttaatctggttgtaatagctggtaacattgatgtgaacaagtccaaagatagagaagaaatcgtagagattgagaaaatgcataaccttatgaagaattacaagcttgatggacagtttcgttggataactgctcagactaaccgagctcgaaatggtgagctttaccgctacatcgcggatacaagaagtgcttcaggtcaggtaattggaattcaatttttaggtatggttatttcgagttgttgagtcggctcgattcggtttggataactgacgaacttaatctaagacattgatttgttcatataaaattaagctaatataatgtcattatgtagttaaaagatatgagtgttttatattttagtctgttaggctatatatatagctatgaaaagaatgattaatatttaaagtgacatttcttgtatgatatatttagcctgcgttctacgaggcttttggacttacggtagtggaagcgatgacttgcgggctcccgacttttgccacttgtcacggtggtccagcagagatcatcgagcacgggctctcgggtttccacatcgatccataccatcctgagcaagcgggtaacataatggctgatttctttgaacgttgtaaggaagatccaaaccattggaagaaagtatcagacgctggtctccaaaggatatacgaaaggtaacaaaaaaaacctaagacaaaacggttgattgtttcttagttaatcatgtttaatttaaacttgctatggtttgtgtaggtacacatggaagatatactcggagagattgatgacactagctggtgtgtatggtttctggaaatacgtatcgaaattggagcgtcgtgagactcggcgatatcttgaaatgttctacattctcaaattccgcgacttggtcacaattcacaaacactttcttcttcttccatataagatctcaaggatctcatttaacttatgatttgttctatttgtttcaggtgaaaactgttccttcaaccgccgatgactgacccggttcagcgttggatgaagtgttggactgtaaaaaagaataaatgatgagtaactttggctatgtaccctatgttgtgtgtatgtatgaaaggaagaatttgttccatcttccatggagtaattacgaatttggtggtact

SEQ ID NO: 149771 - DNA, 1221 bp, Arabidopsis thaliana landsberg
acggattgtctgtaacgaaaccaaatgggttaaaagatggatcctcatcacgatcgtttttactaccaccgctgtttccattctccgacgtggcgtttatgacagagaagcggattttcgacggcgtggcagtgattctagaggcggtggattttgtggcgacggtggaggagaatgagtggagcagaggaagaggagagagcaaagacatttttgattggtaagtaaaaaagcgtatttcctgtatttatatatgcgcctcgaaagagagagaaaatattgaaaaattagtggttaatgatgacataaattaagattgtgggtaaaatctagaaattgatatattttttttttttatatatgctgttttataagctcataaatatcacattcacaagtttgtgcgttttactaatgtcatagactcatagatttcatttcagggaatctatgtaatgcaattttggatttcatttcatagcattccctccgtttcagtgtaattgtcgtttaagtgtcttaagtgaaggaaaaacaaaaatgatatgtttaagtgcgaaacgacgacgtttgcagcacgtgctttgaacctgtgtgtgaaaaccctaagcctaaggtgtctctatgttggtgaaaatgctagagtcaccagttcgagccccaaaagaccaccttaccgtcagaagaagaagttaaactacctaactgctttcaaaggtcaatacccgcgcaagatcactctcgggtcggatctttccgtgtaagacccgtccggatctatcccggaccgatcaatttcacgagtgttctccttcaatcgaataaagtcaagtgctttcatcaaaatttacccgcgaattgaagaaggaagaggaaccaaacctccaatggagagaagtgagtccgttgatgaagatgtatgtgtttaactctaaaactcctcttttcaattctggattttgtgaagattatgaatcgattcgctcaagggttgtgatgatgttacatttgatttcattgggttgattatcatttttgttcagctccttcacaagtttgatgcctcaattgagtaaatagggtttgctagaatcaaagtttatagctttttgttattacaggtccaagcatctgcatatttagagaacgacgaggttcgtgaaagagatgatccaatgtcagatactttacggataggagaagaagctctagtttgtagta

SEQ ID NO: 149772 - DNA, 955 bp, Arabidopsis thaliana landsberg
gtgaatttttcttatcatgaagctggagaagataaacaagctcttgtaaaactcgtagcttgtgagaggtaggcactcattgtacaccttgcttatctctatgcttgtatcctggattgtttctatgcttttgtttaaaactttcttggtctaatatcaaacatttttggcattagatgtgctgagaagttatactacaaaaaaagaaaggagggtgaaagatcagagagtaaagaaaagaaaaaacagaaacgaaaacgggatggagaaagagatcgttatttgataactaagggtcacagttttgttttggattacattaagctaaacacacattaattttcaaattcaggagtaaatcacacagtgaagatgacacagacgaagaggagaaaagaaaagagggtgaaagatcagagagtaatgaaaagaaaaaacagaaacgaaatcggtatggagaaagagattcactcattttacaactaagggtcagagttttgttttggattacattaagctaaacacattaattttgaaattcaggagtcaatctcacagtgaatatgacactgacgaagaggataggagaaaaggtatgatatttgcaaacttcaatatattggtgtctattctatatagaaaaggttatggattattataattctgggaaggagttaatacagtcattcatattgcagggaaaacaagaaagttcaagttggaaggtgctgatagagaaggcaaggatgatgaaaacttcgatgaatacatggaggggatgttcccgggtaatgggtgatattcgagactttcaagtttcaaaaggtgaccatctacatcgcaagaatatcttttatatcataggctagattgagtttgaaccctgaaatgtaaacacttacatagccccttattcactgaaagaaattgaattttaatatcgagaccataacat

SEQ ID NO: 149773 - DNA, 1121 bp, Arabidopsis thaliana landsberg
atgccgatctcggatgtcgcttctttggttggaggtgctgctttgggagctccactttctgagatatttaaactggtaattgaagaggccaagaaagtgaaggactttaaaccattatcccaggatctcgcttcgacgatggagagattggttccgattttcaacgagatcgacatgatgcaacaaggatcgaaccgaggtacgagtgagctaaaggttctgaccgaaacgatggaacgagctggggaaatggttcataagtgttcacgcatccagtggtacagtatcgccaagaaagctttatataccagagaaataaaagcaatcaatcaggattttctcaagttctgtcagattgagttacagcttattcagcataggaaccagttgcaatatatgcgttccatgggcatggcaagcgtgagtacgaaagccgacctactgagtgatattgggaatgaattttccaagctttgtctagtggctcagcccgaagtagttactaaattttggttgaagaggccattaatggagttaaagaagatgctttttgaagacggagtggttaccgtcgtggtctctgctccttatgccctcgggaagaccacgttggttacaaagctttgccatgatgcagatgttaagggtattaccgtatacccaaaatcttggtttcccctttttttattggaataagagcatgtttctcatgtcgtctacttttggcagaaaaattcaagcagatcttctttatctctgtgtcaaaattccctaacgtgaggctcatcggacacaagttactcgagcacattggttgtaaagcaaatgaatatgagaatgacttagatgcaatgctctacattcaacaactgctgaagcaacttggacgaaatgggtctatattgttggttttagatgatgtttgggctgaggaagagtccttgctacaaaagtttctgattcagctacctgattacaagattttggtgacttctcggtttgagttcacaagttttggtcccacttttcatttgaaacccttgatagatgacgaggtcgagtgcagagataatattgcagaccaatgccccagcattccagtaggtgaatcctcctcttag

SEQ ID NO: 149774 - DNA, 862 bp, Arabidopsis thaliana landsberg
atgattgctgctattacagatgttcaaattcactggcgcaaaaatgattacttatcgatgagcttgtgggaagattttgatagtgcagagtctaaggtgagtgaattccttacttgaaaagttgaaaccttgcttgtgaagtagttaaggtaacgcatatatatatataccgttgtttatgaccaggttaaggaacatagcgtaaacgatcaaataattgtcacactctcagcagatcatcgcgtaagaatgattatccgttatgaaatggatgaatcgcatataccaatgatcaaaaacttggtgatccgcgctttcttcattggcatcccaatgatcatcaatataataatgtctgttataattattaaagccgctgatagggctaatataaaggaaaaagacacgaccaattcagatgagtatcactccattgacttgaaaacgagtatctgtgccattaaaaaattgacatttgaattagaaaaaataatagacgaatcaagtgtaagggactaaggatggtcgcatcattgttacttgttagcagcatagtaataaatttttttataaaaaagatagttttgttaattaatttccattttgactatccatggaacttttactaattatatatagcagatcatgaatatcttcaccaggaaaaaaaattaaaaattaaaaaaagactcggatcttgtacattttttttttggtaagctttgaaaagagtaaatcgaaagactttttagactagtaaatcagtaataacaaacagctttatcattattcgaattcaacatcaacagataattaaggcgagaagttgtcatcacaacctccattgcaatcgactttaccc

SEQ ID NO: 149775 - DNA, 671 bp, Arabidopsis thaliana landsberg
aaatcttagcttaacaccatcgcgaccggattccaaattccggcccatcgtctcaccgggaaagaccccgcctattgccgccgatttcggttccggtctgctcagatctaatcgagtggcttccttcttcctccagatctcttcactttgaatcggttactcgatctcgattcgcggagggcttttgctagtcgcgatggaggcgatcgatgagttgtctcagctctcagattcgatgaagcaggcggcgtctctcctcgccgacgaagatcccgacgaaacctcttcttccaagcgccctgccactttcctcaacgtcgttgccttgggaaatgtggtgagttcctcgctctcactccacgctcctcgattttcctctctttaggctcgtgctggttttattctgtgttcgagtgtatgttggattgccatatcgtggatcttctggatctagattaggtttttatcgaattttgctaggacacactcatcgtttatagctagttttgttgggattctctttattagtggatatatggttacatgaggagcgactcgtgccggagaaggctgatgtattttgttatttgttacttatctctttttgcatactgaaccagggagctggaaagtctgcagttctaaacagtctaattgggcatccagtgctg

SEQ ID NO: 149776 - DNA, 1595 bp, Arabidopsis thaliana landsberg
atgctacgtgatagtaccacaatcccccaacgatcatatttaaaaacagcgacagggatgtgaggaacaccacactgcaggatggtcccaaaaacttttcagggacttgatggctctctcgatccgctaatgggttgattgacactcaactccacttttgtaatctttatttttggcctttcttttttgggcaaagtttacagacttaggttcaacattttgcaaaaccccaacacttcattctaatgaaattcacattcttatcagaaaaaaaaaaagagctttgatttttttccatatcaaattagaaggcccgtactcaaaaagccttctaaggtccaacctcaatgtttgaggactcatgacttttggttcatgagattgactgtatatgaaggggaaattacctaatttttttatataaatttataatttttcaaaaatacaaaaatgaatttaatatagaaatatataaaaagacaaaaacctagtcttcataaattgattctaatataaaaagttgaaagaaaaaaaaaaccaaagatagtacaatcatatagtcagagtcaataatagattgagttttcaaaaagaaaaaaaaaactgaaaacgtatgacgacgaccgagtgtactacatctccggcgattccgcctccgcaggtggagcattcaccaccacaggagaagccaggcaacgctgaactcttttcccccgctcctccctctccgccgccgccaaaaattacggtactctctccgctctctctgctctttcactgagtaatttacacgatctataaaactccgattgtgttgcagatgatggatattgtgaatagcaacggaattttaacagatcaattggttgatgaagacccatctttttacaagtaattttgctttcatgaattttgaaattttttaggctttgtggtgcagttgaagaacctaaatttgaatgttcacaaataccaatttcattgttagatatctggatagcgaagagtatgctgagaagtatcgaagctacgaagctgattttagaaagtatctcatggataagcacttctctgaaggttactttcaatttgtctcgaattgttgttcttgaggttgaattttcataaaaaattaatctttttggctgtggttttgttgtttgtttcagtggatgaatatgaggagacaacaacaattgatggtgaaaccattttttcaagcgtgtaagtaatcagataggtgttagaaacagaggttttgtcataagtttttgtatttttgataatactgtttatcttggtttttggatattgcttttaggttgccttgtgcacgttggtatgcagacccggatgcttcgtttgtagacccgccacaatgcattgttgaagaagaagaagtaggagaagtagaagaaatggaagaggtagaagaggttgaagaagaagtagatgaagtaggagaagtagaagaagaacaagaagaggtcatagattcagcttctgcagaaataccaaatggtgaaatctccaatggaggtactgtcttagaggatacttgtgatgttggcgagaaaccagattttcccatttag

SEQ ID NO: 149777 - DNA, 1746 bp, Arabidopsis thaliana landsberg
cacttggaagagaacaacaacgacaagatcaagaaaagacaaagatttgtaagaaaatgggaagagctccatgctgcgacaaggcaaacgtgaagaaaggaccatggtcaccggaagaagatgtgaagctcaaggattacatcgacaaatatggcactggtggcaactggatcgcactgcctcagaaaattggtaagaattctgaaatgtttaaattctaatcccaaaagtaatcgcttataattttcaatttcgattgattagatcaagttttgttctgactttgagatttgtgtaaattatagggctgaagagatgtggtaagagttgcagactgagatggcttaattacttaagaccaaacatcaaacatggtggtttttctgaggaagaagatagtatcatcttgagtctctacattagcattggaagccggtcggtgatctatctctcttgatttctattaataataagttaattaacacctcttcattaaatatataattttttttgttatgaattagaggtaatttctgttgaaatttcgacttgagattcttgtctttttaccttttgtctatgaatcttatgctgaaacacatgcaagcccatgtttcttcaagctatggtatctcacatagaatttagggtttatattgtctctttcttcttgttttggtgtctttgtaagaacctttatacatttatatctattaaacgtgaacttggttcgtgattcttaaaaaatttctattagttttaacctgaatgtgatatatttatgcaggtggtccataattgcagctcagcttcctggaaggactgacaatgatatcaagaattactggaacacaaaattgaagaagaaacttctggaagacagaaacaaatgaatcgtcaagactccatagccgattctactgaaaacaatatcagcaacaacaacaataagagtcctcagaatctgagcaattcagcactagagaggctccagcttcacatgcagcttcagaatctacagagccctttctctagtttctacaacaaccctatcttgtggcccaagcttcatccattgctccagagtactacaactaatcaaaacactaagcttgcatctcaagaaagcttccaccctttaggagttaacgttgatcatcagcacaacaataccaagctagctcagataaacaatggagtctcttctctctactcggagaacgtagagcaatcccaaaatcccgctcatgaatttcaacctaatttcggtttttcacaggaccttcgattagataatcataacatggtccttatgaacagaggtgtttctaaagaattgtttcaagtgggcaacgagtttgagctaacgaacggttcgagttggtggtcagaggaagtggaactagagaggaaaacgacgtcctcgagttcttgggggtcagcttctgttcttgatcagacaactgagggaatggttatgcttcaagattacgctcagatgagctaccacagtgtttaataagttatatcatgcatatatataaatgcgtaactatagggatggataatggattattaatggaatatgtattttattacggtcataagcttatagcatgttgagggtgaaaggggctttttcataatttcttctaaaatgtaacgagttgtggataataatgtaaatcgttaattctacttgcttctattttattttggaaaaaataggagacgtaaataaattct

SEQ ID NO: 149778 - DNA, 518 bp, Arabidopsis thaliana landsberg
atctcaaagctttcctcgatcttgtgatgtatgaagccggagactgagagagatgttgtgcttcaaaggctcggttaagcggaagaagcaatccggttctgttccggtttatctgaatgtctacgatctaactcctatgaatgcttatggttattggcttggacttggtgtttttcattctggtgttgaaggtgaatttgatgattccctcttttttgattcttaattttgttttctgggttttgattatttgtttgtttggttgctaaaggaagtggcttttgggttttttgaaacttgatttgttgagaattattgggttaatagagaattgacttgagaattgaccagagaataccaaaatctcaaattttgattttgatgatgaaagaatatgattatattgttcatgggttctttgttctgtttaccaaaatccaatttcacctgacccttatgaattgtgatactgagtttaaagttaaagtgtttagaatgcctttgtgtcatgtgttaat

SEQ ID NO: 149779 - DNA, 981 bp, Arabidopsis thaliana landsberg
  unsure (1)..(981): unsure at all n locations
atgatctcacttcaagaagaagtctctggcctcaaagaagctctcggaactctcgaggtaagtcactgaccaaacatacttgaaaacaagaatctaccatcactattctaatatcactgtgtctttgtttatgtcaggtggcttgcaagaaacttagaaacagcagactgtttttaaaactactagaggcagttctcaagacagggaatcgaatgaatgttggaactttccgcggtgatgcgcaggctttcaagctcgatactcttttgaagctctctgacgtgaaaggaactgatggcaaaactacacttttacattttgttgttcttgagatcattcgttccgaaggcgttcgtgctcttcgccttcagagccgaagcttctcaagcgttaaaaccgatgattcaaacgcggattctagtccacaatctgtggagcgttaccgcagcacaggtcttcaagtggttacggggttaacgacagagcttgaagatgtcaagagagcagccatcatagacgctgatggtttggctgcaacattggcgaatataagcggttcacttacgaatgcgagggagtttttgaaaacaatggatgaagagagcgatttcgaacgagcattagctggatttatagaacgtgcagatgctgatattaaatggttaagcacgccagnnnagaatcatggtgttggtgaaaagctctgctgattatttccatgggaagtctgcgaaaaacgaaggattacgtttgttcgctatagtgcgcgatttcttgataatgttggagaaagtttgcagagaagttaaggaaactacaaagacgacgaaccattccggtaagaaggaaagcgaaatgacgacttcggacagtaatcaaccgtctccggacatccgacaacgtttgtttccagcgattgctgaacgaagaatggatagttcggatgattcagacgatgaagaggatagttcaccttcgtag

SEQ ID NO: 149780 - DNA, 1464 bp, Arabidopsis thaliana landsberg
caacccatgacttgtcacgtgcggactcgtgtgtgtttgtgtgtaaatcgacaggtagccgttagggttgggtctggggttaaccttacaagcgcgctagaatctggccatggcgaagattcgagtctttcgtggtctatttcccgctcacgctcccgctccagttcaagatcatcgtcgtcctcttcttattcttctccaatttgattaattagagattggatttggtaatttggttatcttatacgaagtggactcattacaattacacatttaaattgtcaaatcaatgctcgaatgttgttacatcgcttaaatccaatttcagtgatgttccttttttccttttgtgcaggcgattttggtgaaatcattcatgttcaacttgcgatagatcgagctgtaagtttcttatcaattgctcttggctggtttgcagatttgtttcctaagtactttactcataatttcgattgacattaacaggctaatctttcaagaggagatgcatatgttgaattcaaggcaaaaatagctgatgctgagaaaccacagctgtacatggatggtgtatgtttcaagtgatccaaagggagatgctttaaaatctgataatgttggtgctgacattgaaaaatatgataatcacctctgcctatgagtggtggatcacccatacgcaggccagtgtcctcttctagcggccgttctcctccaaaacggtttcagtttcctcgtctgaggttcaataccatttcagttcactgtctcaccttttatctgtcagctggagggttaccctcgaaggatccgtggcagtcctgctctaagacgttctcctctaaggtgacgataaatttgtgtttaaagagctgcattgtagtaattagaggatgagatcaatttatttatagtgtatgcaactcaatgcattagtgtttcaattttatagatgttctgcctacattgtattagttttcatttgatggattatttcttgaatgcacacatgcaggtcccttccaagaagaaggtatccgatccgcagaccgcagacgtggccgataaccaatttgtaggcaatagcatgctcgttcgcgttcaaggtcgatatcaccccgcaggtaatggttaaacctttgtatatttgtcagtgttagatttgattatctgttgtgattgcacagctactacggtacatattagactcctagttcataagtatgatccaagatcctgctttgtgtgattttgatttagaaacgtatggtctaccagctccaataaactttagtcaactatgacttaatggcctttggtatcgaattgccaagatctagtatgtaaattctgctattgtagctccttaccgagtagtgtttgtccattgtaatcatactcagttatagttaaaacttaaaactgtaatctcctctttggttctgaacaggggaagatgtttaa

SEQ ID NO: 149781 - DNA, 1221 bp, Arabidopsis thaliana landsberg
cccatttgattataaacaaaatgtatttattacctatattccaaaagtacccttatgttccatgttctcttcttataaagcaacacacaagatgcacgaaatctccataactagagagagaaaccaatctttttagtgagagagaaatcttagagctgagctaagaaagatgtcgaaagaagtgagcgaagaaggcaaaacccaccatggaaaagactacgtggatcctccaccagctcctcttctcgacatgggtgagctcaaatcctggtctttctacagagctctcatcgctgagttcatcgctacactcctcttcctctacgtcaccgtcgctactgtcatcggccacaagaagcaaaccggtccttgtgacggcgttggtttacttggtatcgcttgggctttcggtggtatgatcttcgtcctcgtctactgcaccgccggtatctctggtaagtttgaatcccaccaaaaaccctaacttttacttgtttggttcgttggttttattgttaatctcgttcttgttctcgtcttctcgtaggtggtcacattaacccagctgtgactttcggtctgttcttggcccgtaaggtctctttggtgcgagctcttggttacatgatagctcagtgtcttggagccatttgtggtgtgggtttcgtgaaagctttcatgaaaactccttacaacactcttggtggaggagctaacaccgtagctgacggttacagcaaaggaactgctctcggagctgagattattggaactttcgttcttgtttacaccgttttctctgcaactgaccctaagagaagcgctcgtgactctcacatccccgtaagtctcaaaaagcttgaatctttaattgagttttttgacaaagttactatgaatctaattgggtctttgtagattatgataaaggttgaatctttttaggatttaatgataaagttagtatgaatataaaatgggtctttgtagattctgatgaagtttgaatctttttatggtgtaatgacaaagtatgtatgaatctctaaggatctttactttgtagattctgataaagtgttgtgggttttcttgtgattaggttttggctccacttccaattgggtttgctgtgtcatggtccatttggctactatccccataactggaactggaattaatccagctaaaagctttggtactgctgttataaaataaaag

SEQ ID NO: 149782 - DNA, 733 bp, Arabidopsis thaliana landsberg
atttcgctctgatttatttgcatttacatagttagattcaaaggatacacagatttgttaagccattgaatcgaatcgtgtttgttatcaaatctcgaatcattatagagaagctcttatgttttttagcttttggtttgggtaatcatctgtttgttatgcgatttactttctggcattgcagcttcagagggaaagagtcaggtggcaaatgaagctgatacattgttcttctccaatttgaacaacatccaaaagactactggcgggaaggcatcatcgcagccaaagcgcacgccagtttcaaacgaagaaatggaagccattttggtatgtaacttcattttgacatgtataacaacacttagatgaacatgtatctaacagtataatgtgtgaccaactactaagttataattatgtgaccaattacaagttgagagaacccttttcatgatttaataatattgttctgtttctaacttccttatccttttctgaattttttttacagttgggaggctgcatctgatcatttcaacatgatctgttgacaagaatggtggatcacttctcatctttaccatttacagaatatactcgatagtcaagaagaaactgatatggttgatgtttacaacaaccaatgataacaataaaactactccattgcagtttttaacttctatactgattcatcattgattgagtgcatttgaatctctattattaa

SEQ ID NO: 149783 - DNA, 735 bp, Arabidopsis thaliana landsberg
gtaataaagatcatggtcttgagaatttagatgattccttttacggaagttcagatgaagattatagtgaagctcgcgtgttggacaatgagaatgagcagagacgtgtgaaattccactcggtattcttttttgctttatcattctctcagtgtaaaatgtttgttcaattttctccatgtctggtttttttttaatggtaaatcgaaatcgtaggctggatatcgtgatgggattgttgccgggaaagacgctattgcgcaggaaggttataactttggctataaggaatcagttcttgatggttacaagtttggtattgttagaggtgtttccaggtaattacaagtctgttgcgatgtgttacatatccgacgaagcttatcgagaagtaagttatacattttctgttttgactctttttgaagtgcgctggctttcctcccggttgagtttagagaaaagcttatcgatgaacaagaaactagagagaagtttcagaaattacacagttctgtgcatgctctttcgacggaagtcgcaatgaagcggttctatgaaactttgactacgaaacaaggggaagagaagagtggagaagaagggcccgactcttgttctgtttcaggttcttgttcaggtgttaatgtcacagccgacttaggaagctatgttactgagctaagttctcttcttgacaaatctccaacgattgaagtgaaatttgatacatag

SEQ ID NO: 149784 - DNA, 537 bp, Arabidopsis thaliana landsberg
gtgttgtttgtcatctcgaagccggatgtgttcaagagtccgaactctgagacctatgtgatattcggtgaggctaagattgatgacatgagctctcagctacaagcacaagctgctcagaggttcaagatgcctgacgttgcgtctatgatccccaacactgatggttctgaagcagccacggttgcacaagaggaggaagacgatgaagatgttgatgagactggtgttgaagccaaggacattgatcttgtgatgactcaagccggtgtctcgaggcccaaggctgttaaggctcttaaagagagtaacggagatattgtttccgccattatggaactcactacataggttttagtgagttgcaaaagacttgtgatggttcgtctttgttgcttcatttctgattcggttagcaattttctcgaacatatctgtttctccactttttgaaggatatttatttttacctttttttaagccataaacaatgttgcttcacatatataatttgagacgtttatgtcaagtgttgtt

SEQ ID NO: 149785 - DNA, 1159 bp, Arabidopsis thaliana landsberg
caaatctttgatcactatataggttatactctcataagccgatgtggatccaatgctcatgatggaagatgagagcctcgtgtgggcgagcagtgatgttgtcattgtgcttcagcatctaaacgagaaaatacctttgaggtgagcaaaacacaacaacaatagaagttaaaagcaatgataaacctgctatcctgttatcatatcgattttaatcacttgtttttgcagttatgtttctgaaacagagagacagcatgctgtcccatcacaggtacagcgacatatacttgcaggtatagcttctgctttaggcggtgtaagtgcaccatatgaaaagacctctcatgcgcatgaaagacctatcaccaattggctttgggcagccggttgtcacccgtttggaccgttctcaaacgtctccctgatcagtcaaatgcttcaagatgttgcactggtgagtccaatcataatgatttctgaatataaactagctttgaaatccttctgaatcttgtgagatatggtattttatatttgcagaggaatactatttatgctcgggttgattctgctctacgcaaaatccgtgaaacatcggaggtacgccagctgcaactagtaaaaattttagtttcctctgcagcgtattaatcaattgtggttgttgctattaatgtgcaggcagtacaaaactttgcatctgaatacctcaagactccacttggcgagccagttaaagataaaaagaacaaaaccaaaacggagctatgggtcgagaagttctacaaaaagacaacaacattgccggagcctttcccacacgagctagtcgaaagattagagaaatatctagacgtaagtgataatcaaactctctatgatttcagttatctaccatatggattttttgcttacacaatctgtttttgtgtctgttattacttataattataagaacagactgtagaagaacaactggtggatctatcttctttgctatacgaccacaagctatacgatgctcacctcaacagctcagagattcttcaaaccaccatgtttacacaacagtaagttttaaaacattatgttttcgttcctcttcttctgtagaatcgtcaaaatgtaacatcgccaaatgaaaaaatgagtgcag

SEQ ID NO: 149786 - DNA, 934 bp, Arabidopsis thaliana landsberg
gcttcttcaagctgcgatttccgggttttcgacgttcttccctgattatcaagaacgaattgctgcacatgaagcagcccacttcttaggtacccttgaaaagtttaaatctttcgattccaaaggtgcaatgtcttaattgtgtttaaaacctgcaactttccagtggcttacttaatcgggcttccaatcctcgggtactcgttagacatcggtaaagaacatgtcaatctcattgacgagagactagctaaactaatatacagcggcaagcttgactcaaaggagctcgataggtagagtttagttaaagagaaagaagaatcagagatctcaagattctcaacccattgaatcttctttggtttttcaggttggctgctgttgcaatggctggacttgccgccgagggtctgaagtatgacaaagtaattggccaatctgcagatctcttctctcttcaggtcctctagttcattttatctcatcactcacatgttcacttggtagctcaggttttggttattacagcttcttctttttttgtctcctgcagagattcataaacagaagccaacccaaaatcagcaacgagcagcagcaaaatctaacaagatgggctgtaagtttctcttgtcatctctcatacatgtttttttctaaagtattcatgaacctacatgttatgttatgcaggttctttactctgcttctcttctcaaaaacaacaagaccatccatgaagctctaatggctgcaatgtccaaaaatgcatctgttcttgaatgcattcaaaccattgagacagcttcctagatgaacaatctctgttatctctttaatcgatacaactacgtcccataacaacactcaattgtttcacatgaacttccatatcttttatatatatagagacacaaaagttacagacttt

SEQ ID NO: 149787 - DNA, 1983 bp, Arabidopsis thaliana landsberg
atgtgtacttcaatttccttcaaagtttggatctttgaagattttagtttagcatttactaaagatgtcatttttgtaaggattgagtttgattggtatggtactttgcaggctgatattgttgtttccgaagattgatgtttctcctgctgatgggtttgtgacggagagtgaattgactgagtggactatgcagtcttctgccaaggaagttgtgcacagaactcaacgagacctggatgttcatgatagaaacaaagatggttttatttctttctctgaatatgaaccaccgtcttgggtccgtaagtcgggtgagctgctgtttcctgttcgtctttgagtttcattgactaaaatgtttgctacttaatatgaccatgtagaaatatttgatgacagtcttgtaagtagatttgctttaatctgtgtttcacttctagctcttctgcctatgacctatataataatcctttccttattctggaccacagtttgattgcgattttaagcaaatgatctcacttttgtctcttaggactgctagctgacttggttataaatttaacagataataattcgtttggctatgatatgggctggtggaaggaggagcattttaatgcatcagatgcaaatggtgatggtcttctgaatttaacagagtttaacgagtaagcgttttcttctagtgtagatagaaatcaaccgagctatttcaggttttcagtaccatcagttattttttctttctatttaacacaaagtttttgctggttaattcccttagctttctgcatcctgctgacaccaagaacccaaagttactgttatggttatgcaaggaggaagtaaggtaatgtacggttgtcatatgattgtttccgaggaacctttcttttagcttaatgtttatcaacggattcccctccttccctctcccagagaaagggattcagataaagatgggaagatcagtttcgaagagtttttccacggcctctttgacactgtaaggaactacgaagaagacaatcacaattctacgcatccttaccatgacttgcctgaaggcccagcaaagcagttgttttctcagcttgacaaaaatgatgacgggttcgtaatatacgagtacacaccatgattagcatttccattaataccatacatcccttaacataattgccacttatctacaggtacttatcagacgttgaattgcttcccattatcagtaaaatccatcctactgagcattattatgcaaagcaacaagctgattatataatatcacaggtacataactttccaaataaatggtgtatttagctgctgaattgttccatgttacatttatgatttatctcttctttttctaatcgtccaggcggattcagacaaagatagacgtttgactttggcagagatgattgagcatccatacgtcttctacagtgccattttcgatgaagatgacactgatgatgattatggtttccacgatgaattccgctagttttataatttgtaagcatctgccacaaactattcgtattcagtttgtcgaaatatgtcccaacttaacttataacactaatcgttattcttcaatacacaacacagaggaataaacaacatcaggctcagttcaatatatcctcaaggaacattcctcacaaaacaggtgatctcgagaatatctggcaccattgttaatcttctataccttcgttattgacttgcggcttttcttacactgcagagtccagcacgaatctctctcacgtagatcatctggtgatttagaagttagaagagtatttatgattctgaacagctaaaagaaacatacttttctttggatcttgttcaatcaattatagatggctttctccatttctgaatgtttaatttaacacctttgaagcttaatcttttataagcaaagcttatgaagtaaacagtgttatgcatgcaaag

SEQ ID NO: 149788 - DNA, 2231 bp, Arabidopsis thaliana landsberg
gaggacccatagtttaagcgacactctttggttaaagaataaagattagatcggtccaatttatatatttacatgttccgccattatcatcttctaatttgaaaactcttcatcattccctaccaccggattcaatggcggcgaaaattcccggagtgatcgctttgttcgacgtcgacggtactctcacagctccaaggaaggaagctactccagaattgctcgattttatccgagaattgcgaaaggtatctcattgatccatcgttgctaagttccgtttctgttggttgtgtttatgcctacttagtgtttgatataatgtatgtgagagtttcaggtcgtcactattggagtcgtcggtggatctgatctaagtaagatatctgagcagcttggcaaaacaggtacgactgtgatcggatcggaaaaactataacctgctgtagaattttcgatttggtattcaaagaaaggatattttcctacttctattagaatggtctcttttgctcttttctactatatatggatggatcctttaaaagtggagacaaactatatagattttctctgcttcaaatctttgactagatccattagtagcatgcatacagaagatccttgaagtctgtagatttggaatttgggatagctgctgatcattaagttggttgagttcaaattgtggaatgagtttgatttacctaagtcttagttcaagaaggagttttagatctggctctaattttcttgccttgtgagattctcttggcttaaacttttgaatttgtaaattttgcagtcacaaacgactatgattattgtttctctgagaatggtcttgtcgcccataaagatgggaaatccattggaattcaggtgcatatgaacctatagctttacttacttacatccacattgttgttttatcgtttcttaatagtttgtatcttttttctcagagcctgaagctgcaccttggagacgataaactcaaggtaaactcatatcactgtccttcatgtgtcgtagcagcagttgctttagtggttttattgatgttgaagtgtatgcaagtatatatgtatatagatagtttctgatagcgtaaattgatgatgcaggagttgataaatttcacgctgcactacattgcagacctggatattccaattaagaggtataacgtggatccaactgctagtctctaatcatgtttgcaaagtgataagatgatttattttcttgaaatttgtatacataggggaacatttattgaattccgaaatggaatgctcaatgtatcacccattggtcgcaactgcagccaagaagaaagagatgaatttgagagatatgataaggtagaagaaactatatttagtttgttcaatttcttatagaatatattttgagcattgtcattcaacactttttttaaaaggttcaaaacatccgaccaaagatggtagctgaacttcgtgagcggtttgcacatcttaaccttactttctcaattgggggacagataagcttcgatgtgagtagaatcaaaatgtggattataacaatttcttaaatccattttttgagtcactgagtctaatcaaattgttatgacttaggtcttccctaaaggttgggataagacttactgcttgcaatacctcgaggacttcagtgaaatccatttcttcggtgacaagacctatgaggtataagactcatctcaactctgcaaatctattcattagagttgttgtatggtttccgttgagcttgatgggtaaaaatatgacttttacttctgcagggtggaaatgactatgaaatctatgaatcaccaaaaacaattggccattcaggtcagctacttggatatattatcgtttaatctctgtatgtttgtgttgcgaggtattttcatgacaaataggattgtttctgttgttgcagttacgagtccagatgacacagtggcaaaatgcaaggctctgttcatgtcttgaaacactactcatctcaagaacacagtgtcaagagtttgattcttctttggcgaaatctcacaactcttgattacaagaaatggagagaagtgtgtttgaatgctatctataccgtatgttttgaattttgattcatcaaataaaatatcttgttataaccttttgtttcagaacatggtcctcaaagttttaaaactaaaggttaaaaatatcctcttc

SEQ ID NO: 149789 - DNA, 414 bp, Arabidopsis thaliana landsberg
gtagcttaggagctcctaaagttagaatttttgcaacaaatttcagtagattaagatgtggaaacttgctgataccgaacaatcaaagactatttgttgaccaaagccctatgaagtatctgagtctgagaacgactctgcgatctgtgaaagctatccaattgtctactgtcccacctgcagaaacagaaggtatatagtaatctgtctgtgtatttctgtttcacttgattgtgttttactgtttgtcataaaatcctttagacaatgttcagatttgtggcttatgaagtggtatcgtttgcttgttttcttctttaacattcttcactacagctattgcagacgtaaaagattctgacgagaccaaatcaactgttgtgaatactcacctcatgcccaagtcctccgagg

SEQ ID NO: 149790 - DNA, 966 bp, Arabidopsis thaliana landsberg
ttttgttgcagagaaaacaagagtctcagatacttgttcaaccttaaaactatatacgactatgtaagattcttgcatcccttctctccttcattgaacgtttttgtatattgttctttgattattcatactcaaatataaagtttgatgtttgaaattatgctctatctcctttgtaaatgtgttgcagaagacatcttacagagtcaatggaaacaaaccagtggcggtcgaggaaaaagatagaatcagctgcagaaacactccaagtttcttctagaagaggcagaggacaggtaaagaaaattttgcagaaattgtcaaagtttgctttaattgttccatgttttcttgagcaagacttgatcattcattatcatcttctgttgtgtctatgtattgcttgtgaacttctatggcttagtaaatgtcttttaaatgatgatttgttactttggtattggtctttaggcacgtatggttcctcctgtaagtggagttagatccgagagagctcgaaaaagtctaagtgagaagctagagactgtagctttaaactctcctaagaaagatgctcgtgtgagtctttatggcgagaaaagtgtagtagatgagattttcctagaagatgaagaaatgggtcatgaaactggtttgaagaatggagagtggtcgcctttttgtggtgtatcggacaagcttttgcaacgaatcgagcttcttgggaaagaccatgaggcaacgagacttgataacaacaagttcaggtcaatcgaatctatgaaaaagagacaagaagaatcggcatgtgatgatgtagttgatatgaagacaaagattcaaacgttagctgcggagaacactcagcttaagaagtctcttgtggcgaaagaagagcttgcggtaagtcttcaagagcgtaaatttcaggtggaatcagaattcgaagcgtccagcccagattag

SEQ ID NO: 149791 - DNA, 560 bp, Arabidopsis thaliana landsberg
cttcagtaactgtcatgacattcatgctcgccggaggattcttcgtcaaggcaagtcctctgtgtcttgatttcctctgtttttaacttcccctgtttcttgatttcccctgttgtactgatttcctattctgtgtctacacagaaagtgccggttttcatatcgtggatacgttatctatctttcaattaccacacctacaagcttcttcttaaagtacaatatcaggacttcgctgtgtccatcaacgggatgagaatagacaacggactaactgaagtagccgcactcgttgtcatgatattcggttatcgcctcctcgcgtatctgtctctaaggcaaatgaagatcgtaacataacccattttccacacgaagaaatcaaataacatagaagaagcataaaaagagtgcatcagatcttgatgatcttgacacgaccaatccttgacaatgattaagagattggtcctaagattattcttgcttaattacaaaggtgttgtgagaatgataatgatagatgtcttgatttggagataaatatatgttcgagtttg

SEQ ID NO: 149792 - DNA, 559 bp, Arabidopsis thaliana landsberg; identical to SEQ ID NO: 52964

SEQ ID NO: 149793 - DNA, 775 bp, Arabidopsis thaliana landsberg
  unsure (1)..(775): unsure at all n locations
atggatggatatgttatgagtccttccctctcaaaggaacagctctttagcatcaatgacttctctccaagctgggcttatgtgggttgtgaagtggtggtaagcactgttgatcaatttatcttctcggggagtcataagataggtttgtgcttatttgtttttgcaaatttttaggtttttgtcactggaaaattcttaaagactcgggaggagactgaaattggcgagtggtcttgcatgtttgggcaaacagaagttccagcagatgttatatctaatggtattctccaatgtgttgctcctatgcatgaggctggaagagttcccttttatgtaacatgttccaacagattggcatgcagtgaagtgcgtgaattcgagtataaggttgccgagtctcaagtttttgatagagaagcagatgatgagtctactattgacattcttgaggcaagatttgttaaactgttgtgctcgaaatctgaaaatacaagccctgtttctgggaatgacagtgatttgtcacaattgagcgagaagattagtttactacttttcgagaacgatgaccagttggatcagatgctcatgaatgaaatctcccaagaaaatatgaaaaacaaccttttgcaggaatttctgaaagaaagcttacactcatggcttttacaaaagatagcagaaggtggaaaaggtccaagtgttttggatgaaggtggccaaggtgtattacattntgcagcttctcttggttacaactgggccttagaac

SEQ ID NO: 149794 - DNA, 1406 bp, Arabidopsis thaliana landsberg
atgaaagtgaagagacagacaaacgaactaaaggtgttctataacttcctctacatatcgctcgggcttgcgacgtttctcatggtggtcatcatcatcaacaaactctcgggctttacacaaagcgagtttggaggtagcgccgcggtagtgatcgtcttgcttcttttgcccattatagtcgtcatcttggaagagaagaagctttggaaggagaaacaagtcgccttaaacgatccagcacccatcaatgtcgtaactgagaaacccaagttagattcatcagagttcaaagatgatgatggtgaagagtcaaaggaggtagtggagaaggtgaaaacaccgtcgtgttggacgactgtgtttaatccaccggagagaggagatgactatacaatcttgcaagcgttgtttagtgtagacatgttgattttgttcttagcaacgatatgtggcgtaggagggactttgacggcgatagacaatttgggtcaaatcggagactcgttgggttacccaaagagaagcgtaagcacgtttgtgtcactcgtaagcatatggaattactatggtcgtgtggtttcaggtgtggtctctaagatcttcttgatcaaatacaaatttccaagacctctaatgctcacaatggtcctcctcttgtcttgcgcgggtcacctcctcatcgcctttaatgtccccggtggactgtatgttgcatcagtcatcatagggttttgttttggtgcgcaatggccgcttctatttgctataatatgtgagattttcgggcttaagtactactcgacattgtataacttcgggtcagttgcgagcccgatcgggtcttacttgctaaacgttcgggtcgcagggtatttgtacgacgtggaggcgggtaagcaatataaggcattagggaaaacgagagtagaagggcaagatttgaattgcataggcacgtcttgttttaagttgtcttttataataattaccgcggtaactttgttcggtgtattggtctcgatagttttggtgatccggaccaagaagttttacaagagtgatatctacaaaaagtttagagaaaaagcgttagctgccgagatggagatggcagcgccggctgtagccagatctatcgtggctaaggaagacaaggatgatgttaaaggcaaagtaataggaaaaggagggtaaactatttagtagatgattgttaaagatactagataacaaaagatggtcaagtattttgtaaacacttttatatatctctttaatgtgaaacctatcttttattaatagcattttgttttgtttttgaagcaatactttatatttgatgcttttatcgttttgcgttttaggagtttggatagtagtgaaggggtaaaatttggagatag

SEQ ID NO: 149795 - DNA, 1800 bp, Arabidopsis thaliana landsberg
tgctattttaggcgctactgcctcttccttcttcaccaaaactactactacttcaaacccatctccctattctattcctctgtttctcttttatcacagggctctatcttctcttccatatctttacaaacgaatctgaaattctcaattagaagtttgttttcaatggagggtcgagttcaatttctcgttttcttcctcttgaatgtgatttggacttttcttcatctaaaagtatgtatatttttttctcttgttttggtttgtgtgtttagaaaactgtgtttcaaggagtttcgttggaagattcgaagaagagtgtatcagagatcttcgctgtctccgagagaaagatcggagggttaaatgggttgagaagattcgaaatcaaagcgagagcagcagcttcgaagacgatagaggttgaagtagacaagcctttgggtctgactctaggccagaagcaaggcggtggagttatcatcaccgtgagttttttccacttaagtctctgcaatggaatgtcatctttgtaaatatgttgtttgataaaattgagggatttgcttttggttttcagggtgtggacggaggtgggaacgcagcaaaagcaggtcttaaatctggagatcaagttgtgtacacaagcagtttctttggagatgagctttggcctgcagataagcttggctttactaaaactgcaattcaggcaaaacctgattctgtctactttgttgttagcaggtaagtttgagtgtggttgtgattgcctctcttgtttttattttggtattatcttgctagaaatgtgggttctgctttttgaaataaggattagattgaaatgatcaaatttgtcgcaaatatgtttcctttgaatcctgtgcacaagaaacctgtgaaaagctgtagtcttgattaagtattccatggtctgatgctatagttggtaagttttcttggtgtgcaatgtgtaggtttagttctcttcttatgctatgtcattagattttcgcaatgcttagcttaacaagctgcataagttagcacctcaggttattcattaagctttttgaggttctttattggtttctgatgcaatttatgatctttggtcaaacacagaggtgcagaagttgatgtcaagaaactaaataagcgtccggctcctccacggtttggaaggaagttaactgagactcagaaggctagtagcaatctgttgtttcaaagattgaattattgcatttaaaacccctttttagaaacttgactgattgctttgtcttaacaccattacattctcttttgcaggcaagagctactcacatttgtcttgattgtggattcatatacactttacccaaatcttttgatgaacaggtgagtctcaatcctttacttttagtttatatacaagtttgattttggctgcatatatgtttctgatttttataactaagttttcgatttttttttcttggtgttctttcttcagccggagacatacgtatgtcctcaatgtatagcaccaaagaagaggtttgctaagtatgacgtgaacacaggaaaggccataggaggaggattgcctccaattggtgtcattgttggcttattggccggtcttggagctgttggagctttgcttgtctatggtcttcaataaatttttcttaaaacttttataatctctataaaacaagtccgctttgtaattgcaaaccaagaatgaatgttgatgacatcaacttgagagttaaattatgtaaagcatttttcgattctctccttctt

SEQ ID NO: 149796 - DNA, 323 bp, Arabidopsis thaliana landsberg
  unsure (1)..(323): unsure at all n locations
atgaatgatggtcgtatgatgaatcggtaagttctgtcttggcaagtgatcaaagttggcgcgataacggatcttcctgtcattcaaaattcaagaccactagaccaaagaccatatgggtataaaaggttttatttcaaactatagtttttgtacacgaacccaattcaagttcataaaagaaaagataagaaacatttgtctactttctttagaaatgctgcataagaagnttgaaagctagtctaaaatataactgcttacactgcgaagcatcaatatctgttggacaataaggacacttgaacgaccttgaaccattt

SEQ ID NO: 149797 - DNA, 971 bp, Arabidopsis thaliana landsberg
gttgatgaaggaattgtgcatggcgaagtgcgtgattttgctggcacagcgtgtgtgcctgtatatgttatgcgaccagtgagtcttcttgtgacagtatttgtgttgtctagagatgtgtgtgtgtgtttggttgatttggctgttgaatgatgtagctgggagtgattgatatgaactcggaagtggtggaaccggaggagcttttggatcagttaagaactttaaagtcggttaatgttgatggtgttatggttgactgctggtggggaattgttgagtcacatacaccacaggtttataactggagtggttacaagaaactttttcagatgattcgtgagcttggacttaagattcaggtaatgttatttgatcgatgagtctcagttcagtttagtgaaagatatgcagagttgaggatgaacctttttaaagtgttcttgacttgaattgacttcaggttgttatgtcgtttcacgaatgtggaggcaatgttggagatgatgtgcatatacaaatccctgagtgggtgagagaaattggtcaaagcaatcctgacatctacttcactgacagtgctggcaggcgtaacactgaatgccttacttggggaattgacaagcaacgtgttttaagaggacggactgctcttgaggtatggctttctactactccatgctaaaaaatctgtagcaaattatcattcgaagaatgtaatctgcagcgagttgtagtaggaagaatgagaagttgatctgtaataagaagtgtttactgactctatgaaatcacttgttatgtaggtttactttgattacatgagaagctttcgtgtggaatttgatgaattctttgaggagaaaatcatccctgaaattgaagttggactaggtccatgtggggagctgaggtatccttcataccctgcacaatttgggtggaaataccctggtattggtgaattccag

SEQ ID NO: 149798 - DNA, 1898 bp, Arabidopsis thaliana landsberg
atgcctgatgttaatagtgtttcaaagcttccaccgcaaaccaagcaagcttctactgttgtggaatctgttgatggcaaagggaaaacagttctgaaagagcaaactgtagttcctcccaccaaaaaagtttcgagtaagcattaaggagtttttaagagtaataggccttatgaccaacatatctctaagaaatgtagctgtatatgttatttagtcttgcttaaaggtatttggatggtatcatgaatgttttgatttattcgtcggagagacagatcttttggtggttattaggccatttctactgatgggtgaagcaataaatgtcgttgtccttgctctctgtttatctgagtcttaatgaattctaatgtgtgtctgcaggatttcgtcgtgagaaagaaaaggagaagaagactttcggggttgatgggatgggttgtgcccaggaaaaaactacagttctccccagaaaaatattgagtaagcacttaggaagctgtgaagatagttaggccttactttcaagatatctcttaaaataatctgtatatgttacgtttttttcattttgctgtattcatttggtatctcgaatgagattctttattccttgggtctctaagttgttctaatgattgttaggcagtttttgtgcctgtgtgactctgtttatctgtctaacatatgcaggtttttgtaatgaaatagagaaggattttaagaattttgggtttgatgagatgggtcttgcgagttctgctatgatgagtgatggatacggcgtagaatatagtgtgtctaagcagccacaatgttcgatggaagattctcttagttgcaagctaaaaggagatcttcagactttggacgggaaaaataccctatcaggatcctcttctggttctaatacgaagggctcgaagacaaaaccagagaaatcaagaaagaaaattatttctgttgaataccatgctaattcttatgaagatggtgaagaaatccttgcagctgaatcgtatgaaagacataaagctcaggatgtgtgttcatcaagtgaaatcgtcactaaatcatgccttaaaatttctggctcgaagaagcttagtcgttcagttacttgggccgatcagaatgatggccgtggtgatctttgtgaggttagaaacaatgataacgcagcaggtcctagcctgtcttctaatgatatagaggatgtcaatagtttatcacgccttgcattagcagaagcccttgctacggcattgagccaggctgccgaagctgtttcttcgggaaattcagatgcaagtgatgccagtaagtacataggaggtgttaatttagctatgatactttggatgtccatatgttgtggacttgcataaattcctaaattttgccctttgacatgctttatatagctgcaaaagctggaatcattttgttgcccagcacacattaacttgaccaagaggttactgaagaacatagtgaggaggaaatgactgaagaggaaccaactcttctcaaatggccaaataagcccgggattccagattctgatttgtttgaccgtgatcaatcgtggtttgatggacctccagagggcttcaatctcacagtaagtctcttatgcatttaaatatactcacccattaggaatgcgttgaaataaactcactggtcctcttccttcctcagttatcaaattttgctgtgatgtgggattcactgtttggctgggtatcatcgtcctctctggcatacatatatgggaaggaagaatctgctcatgaggagttcttattggttaacgggaaggagtacccccggaggattatcatggtagatgggctttcctcagagatcaagcagacaattgctgggtgccg

SEQ ID NO: 149799 - DNA, 3201 bp, Arabidopsis thaliana landsberg
atgaccgttggtgccggaatcagcgtcaccgactcagatttggtggtgctaggtcaccgtgttcttcacggcgttccggagaatgtcttagttaccccagcttcgggaaacgccttaatcgacggcgcgttcatcggcgtcacgtcagatcaaaccggaagccaccgtgtcttctcccttggcaaactcgagtactgttcaaaatccctttcctacacttttgttgttagatgtcacataatttgttgaattacttgaggcttagggtataaatgtttttttttttccttggcagagacctaaggtttatgtgtgtcttccggtttaaattatggtggatgactcaaagaatggggactaatgggaaagagattccttgtgagactcagtttctaatcgtagaagcaaaccaaggttctgatttaggaggaggagatcaatcttcttcgtacgttgtattcttgcctatacttgaaggagattttagagctgttcttcaagggaacgaggctaatgacctagagatttgtcttgaaagtggtaagttgacacagttagctagatttgagttgtttattttttgttagattctctctgagatttatatggtttgtgtatggtcaaggtgatccaaccgttgaccaattcgaagggagtcatttggtttttgtggctgctggctccgacccttttgatgtcattaccaaagctgtcaagtatgtaacgtttctcaagtctcaactcaagacttctttatgtccaaaatttttttagtgttaagaatctgtgcctttcaatgattatgcagggctgttgaacaacatcttcaaacattttcacaccgagagagaaagaaagtaaggaaacattgagacgttttatgtgatctttggttatacatatcaaaaattaactctgaaaatttcccctgttttggttgtgttcagatgccagatatgctgaactggtttggttgtgcacttgggatgcattctacaccaatgtcacagccaaagacgtcaagcaaggtcttgagaggtactcctgattctttacttttaaagatggctttattaactgtgacttaaccaaacctgcaatgattctctatagcctcaaagctggtggggttactccaaagtttgtcataattgatgatggatggcaatctgttggcatggatgagaccagtgtagaattcaacgctgataatgctgccaagtaagtaattaagctctcttaattctgatttaagttctttctttagtcttaataaaccactctttatcttttgtgcttaccttcagttttgcaaaccggttaactcacatcaaggagaatcataagtttcaaaaggatggcaaagaaggccaccgggtggatgacccttcattgagtcttggacatgttatcacagacattaagagtaataattcgctcaagtatgtttatgtttggcatgcgataacaggatattggggaggagtcaaaccaggtgtttcttgtatggaacactacgaatccaaggttgcgtatccagtttcttcaccaagagttatgtccagtgagaattgtggatgtttagaaagcataactaagaatggacttggtttggtgaatcctgagaaagtctttagcttctataatgatcttgactcataccttgcatccgttggggtcgatggtgtcaaagtagacgtccaaaacattcttgaaactcttggagctggacatggtggtcgtgtcaaacttgcaaagaagtatcaccaggctttggaagcttctatttcaagaaacttccctgacaatggtattatctcttgcatgagtcataacacagatggtctctacaggttagcttctggacctacaacgttgttctcattgatatttatccataattattactatcccttctaatttcttcttgtaatgatactttagcgcaaaaaagactgctgttataagagcatcagacgatttctggcctagagaccccgcttcacacacgatccacattgcttctgttgcatataacacacttttccttggagagtttatgcagccggactgggacatgtttcatgtacgttgaattgctttaacaaacttttctgaacttgtgaatgaatctatctgtttctcattgcagagtttgcatccgatggctgaatatcatgctgcagctcgcgcggttggaggatgtgccatatatgtcaggtaatcacaagattcaataccatttgacaaacaaattatcatagtaaaatgagctgcaagtaagtaactctagatccattcaaacttgttaaacagcgacaaaccgggacaacatgacttcaaccttttaagaaagctagtacttcgagacggttccatactcagagcaaagcttcccgaaagaccaaccagtgattgcttcttcagtgatccagtcagagacaataaaaggtatctcgttttcctttacttggaagagaagaaagcttaaatcttaactaactgttgtattatactttgcaagtcttctgaaaatatggaacctgaacgaattcactggcgttattggagttttcaactgccaaggcgctggatggtgtaagaacgagaagagatacctaatccatgaccaagaacctgggaccatttctggttgtgtccgaaccaatgatgttcattatcttcataaagtagcagcctttgaatggacaggagattccattgtctattctcatctcagaggtagtacacaaactcaaacatcagtctaaattactctgattatactaaaaccttcactttttttttccttttctatcaggagagttagtgtatctcccaaaagatacatctttaccagtgacattgaagccacgtgaatacgaagttttcacggtggttccggtgaaggaattttccgatggaagtaaatttgcaccggtggggcttatggagatgtttaattctggaggagccattgtgagtttaagatacgatgacgaggggactaaatttgtcgttaggatgaaacttcgaggcagtggtttggttggtgtttactcgtccgttcgacgaccacgaagtgttacggtggattcagacgacgtggagtaccggtatgaaccggaatccggtttagttacgtttactttaggagttccggagaaagaattgtatctgtgggacgtggtcatccaataa

SEQ ID NO: 149800 - DNA, 665 bp, Arabidopsis thaliana landsberg; identical to SEQ ID NO: 11798

SEQ ID NO: 149801 - DNA, 1469 bp, Arabidopsis thaliana landsberg
atgacgacgccgtgccggaccattaacgctaatgctatcgccgcaccgtcgccttcgggattgatctttaacgggtttcgtgatttcgtcccgattgataagaggcttgttatatcaagctttcgtggcttgaaactaccgtccaggacgacaaagacgattacgagctctgcttggagtttgagttataggtctccgagaagattgccttcttcgcgctctgcttctacgtctgcgtctgcggctgttacatcgagttcgacgaatagatttgaagctttagaagaggggattgagaaggtaaatgggttgatttcagatttacaaaatctttgtaaatctgacttttttagagatttgaatggttctgtttcattgtataaagctgagatttttaagggttaggtaaaagagttggtttcaatgatcatgatattgattgatattagacaaaatcttggagaagctgagttttttagatttttaggggtatgaatagctcagtgaattatagaaactgactcaaaaattatttactgaaattttcaggtcatttatagttgtcgatttatgacgtttcttggaacattaggatctttgctcggatcggttctctgtttcattaaggtaaagccactttctgattacctccttgctctttctggtttaagctacaattagatagaacagtgtggaatatgcataaggtagtttcctgtcttgtaatagcagatactgtcctaaatgttttgcaactcaccgaagaaacacattatactacttttgctgtctcttttaacgtttttttggtgcagggatgtatgtatgttgtagactcgtttttgcagtattcggtgaatcgtgggaaagtgatattccttttggttgaggccataggtgagagagtttatctatgtttcagattaagaacattatatgctcacaactttactgaggtgatactgatgatatatacgactatttgtagatatatatctcctaggaactgtgatgttagtctttggattgggactttacgagttgttcatcagcaatctcgatacttcagagtcgcgcactcacgatattgtttccaataggtcgagtctctttggcatgttcaccttaaaggttgctccttttgataactttctccatctgtatagttgatcaagatttcattttggtttatactaagacttttccaactgtttattttccctccaggagcgacctcaatggttagaggtgaaatcggtaagcgagctgaaaacgaagttgggacatgtaatagtgatgctactattgattggtttgtttgacaagagcaagaaagtagtcataacttctgtcacggatttgctatgtatctctgtttctatctttttttcttctgctggtctcttcttgctctctaggctcaatggttcacattgaggagttaatgggtgttgtcccaaaacaaaaga

SEQ ID NO: 149802 - DNA, 751 bp, Arabidopsis thaliana landsberg
gaacataaacataaggcgagtgaccgagatgtgcttgaagagaaagcaattcagcttcataaagagcttcaagcttctcacacagccatttctgaacaggttaataaatatttctttagcttcttctaactttatatctaattgtgcttagtatatattcttgagttatgatactttcttctgtgggggaaacagaaagaagccttgtctcataagcattcagagttgggagctactttaaagaaatcacaagaagagcttgatgctaaaaagtctgtggtcgttcatctcgaatcgaagttgaatgagcttgaacagaaagtgaagcttgcagatgctaaatctaaggttagccatataaaacatagccgcatcttcgttaaatttcttttctatacaaaatgtcgaaagaatgctctgttgatgtagaaaccaaatttgcaggaaactgagtctacgggaaaagaggaagaagtagaagtgaaatctcgagacagtgacttatctttttcaaatccaaagcaaactaagatcaagaagaacttagatgctgcttcgtcttcagggcacgttatgattcagaaagctgaaacatggcatctcatgacattgaagatcgcacttggagtggctcttgtctctgtcattctaggtatcattgttgggaaaaattattgatttctttttgttttatttatgaaagatctgtttgtttgaattgttcgtggttctaagaatttttgcttctacc

SEQ ID NO: 149803 - DNA, 1053 bp, Arabidopsis thaliana landsberg
gcgaagaaagaacgtccagattcccaaacccgacttcaggtttcttcaggacgaagttcggaatctgttgatacaaactctgtctactcagagcccatggtaatttctctcacccaaaatctcaactatttgtgcaggctacattcaatgagtgatctttatttcgattatatgatatttggtttagtttctgtgtgatcttgctctcggttataatatgtttgcttgtgattctctttttcaatgctaaaagttttgttttgatgcttacaatgccaaaacttggttgtttgagataattcaagcaagaaagtcccgggatcatcgcctttctgcagttttagacttcgtacgaatgtaaactttgattgctttgaaaatcagtcttgagatgcagtgtaatgataatgttgattccaagtaatgctaaactttttaacctgagatgatacggtttttggttttggtgtgcgttggtattgaaggcacatggattatacccgtatccagatccttactacagaagcgtctttgcacagcaagcgtatcttccacatccctatcctggggtatgtattatttattactcagccccaacgtctccggtttggaatatttagaaaagcttttgttttatttttaaagtttttttttcaggtccaattgcagttaatgggaatgcagcagccaggagttccattgcaatgtgatgcagtcgaggaacctgtttttgttaacgcaaagcaataccatggtatactcaggcgcaggcaatcccgggcaaaacttgaggcacgaaatagagccatcaaagcaaaaaaggtaaaatcctggcgggcaagtgctgtaatttgtttggtagaatccttcccaataagttgtaatttcttgttttcagccatacatgcatgaatctcggcatttacatgcgataagacggccaagaggatgtggtggccggtttctcaatgccaagaaggaaaatggagaccacaaggaggaggaggaggcaacctctgatgagaacacttcagaagcaagttccagcctcag

SEQ ID NO: 149804 - DNA, 272 bp, Arabidopsis thaliana landsberg
gacttgagaccaaaaaaaagaaaaggagaaggagaccgtcgttgttctccgatggcgattaacagaattgctcatggttctctgtttctgacggtagtcttgttctttctgacggttaattacggcgaagctatatggttgacgattccgacgacgggtggaacgaagtgtgtctccgaggagatacagagcaacgtcgtcgttttggctgattactatgtcgtcgatgagcataatcctgaaaatacacctgctgtttcttctaaggtaag

SEQ ID NO: 149805 - DNA, 2200 bp, Arabidopsis thaliana landsberg
cccagcttttggacctcgtgggctatatagaaaacaagtaaccaaagagagacgaagcaaaaacattcagagagaaaattcagcatttttgatagctcaagcacttgattctttccaaaggggtttcctgaggtatgtttgctttcctttttggttttaatttgtttcaaatcttagatcgattcttcactttggattcttaaatcggttcttgtcctcgtctgtgctgatttcgaacttttccgattccaactccgccgaatctacgtatagatctttgaggaaatgtttttttcgatttatgatcggcggatctaccgattcctttgcttgttttctttggatgtatcacactcttctgaagatgccttgacctttttatgtgaactagtaagagttattatggcttagatcgttgaatatctggtatatgtgttcttataatgggattaggatctatgttttggtgcgtattaaagcttagttgagattgatgtttttgggttttcaaattctgtttcttgtctgttgagctaatttaatgttgtgtagaaccatttgttgtttctggatctttacttatttgtatatgtattggtttatgtttatgtttttacagatcacaaaggccaagtaacaatggcgaaaggagttgcagttttgaacagcagtgagggtgttacggggactatctttttcacccaggaaggcgatggtagttctttataagagtgctttataagatctttgaagcctatcttttttttccttcctctcaaatgattgagttctttgtttgggttttttgcaggtgtgaccactgtgagtggaacagtttctggccttaagcctggtcttcatggtttccatgtccatgctcttggtgacaccactaacggttgcatgtctactggtaactcttatgcatacctctctgcaaattttcaatggattagaaacttttggagcttatatttatgtttcgtattgggaacttttattatcgccaaaagtaactgaacttgttattaaattcctattttaggtccacatttcaaccccgatggtaaaacacacggtgcccctgaggatgctaatcgacatgctggtgatctaggaaacatcactgttggagatgatggtatgccttctcaacatttgtatccctcatctcaagcttatttagagctgttttgcatcaaatttcgctactctctcaaatttgattttgcagtcttagttgtatagtacagttgtcacctttgaccagcggtagtgttcatggatttacataaaagcttttgttttgcttttctcaggaactgccaccttcacaatcactgattgccaggtttatagctgtgtacctttttatgcttttttcctaatccaaacctgctgtagtgaaccaatctcttaagatacattttgtgttggcttaacagattcctcttactggaccaaactctattgttggtagggctgttgttgtccatgcagaccctgatgacctcggaaagggtaatgacctttgaccatttattttcttgagattttatttacccatattatgctaacagaatttaaaagttagccagtccgtttgagggcatccaatgtagaatgcttatgattcaacatccatcctaagaacagtttataacctagtgtcattggtgttttacatttcaggaggccatgaactcagcctggctactggaaacgcaggcggccgtgttgcttgcggtaagtaaaacaaaattacatttttctcacatctcctgtgaaaaccatgtatattctatttaatcttgatcattaccatcattgtcaccttagactccattgattctctggtaactcggggttcatcttggttcatctattgactattattatcttgcattttgggggtccaactgaatggtaaaattatcaaactgattgaccttttgtctatgacttcgcaggcatcattggtctccagggctaaagctgctacgtttccaaagaagagattgatgtaataaggaggtccaaccttagacctgggtttggtagttgtgtgtatcttctggtgtgtggctaaaaacctttgagcttagtgtggctcaaagcatttttaattcagacagaaaacagagaaaattccgtacttttattatttcatgaataaaaaagagttggtttacagttataa

SEQ ID NO: 149806 - DNA, 667 bp, Arabidopsis thaliana landsberg
atgattccaacaagatgcaatgagatcaacggctcacgtccttcgtcgctaaaactcgccggagaatcccacaccatcaagaaaacgtcgttttgcaagtcgaagccacgacgcacatggacgggcatctccggttatcatctacgcgcattctccaaaagtgatccacacgcgtgccgaagacttcatggccctggttcaaaggctgacgggtctagacgagattattagacggaacactagtgaatcttcctcttctgttgtgacggaagaggttaacgtcggggatgataacacggcggctccgtttagtcaggatagaacacaacgacagaagttaactgatatggccgttgttcacaccgagctcgatgaccttgtgttggttctccaactcaacttatgtatatgtcaccgaaccggaccgattcatttcgacccttggtttttaagttcgaataagacttcttagcaaaaaaaaaaaaaagttccaataagacttcccataaaatatgcttttatgatttctattttatatgtatacaattggtttgttcattcgttcgttcataagttgtttcactgtgattagttggtgtaaatgtcacttaactttacaaactaaaaacaatgtcacttaatatctgtatttggttgtttaaaacat

SEQ ID NO: 149807 - DNA, 450 bp, Arabidopsis thaliana landsberg
caggttggtgtgccggtttatacagcagggactgatgtaaaacctgcagatataggtaagcaaggttttaaagaagctaaaaagaacaatgttgatgtagttattatggatactgcagggaggcttcaggtaatgtttcgtctttaagagtcattgtatcataaatctattgcagcttcagtcatgaaattgcctctttgtgacagatagataaaggcatgatggacgaattaaaagacgtgaagaaatttctgaatccaacagaagtgttactagttgttgatgccatgactggacaagaagctgcaggtacgctgtttctattttacctttgtcaagaagattcgagacatcctgaaaatggattagattcaaaaccgtaaatgtatcggtcatatactaagatgagcttctgtacttcctacagcactggtgtcgacattcaatgta

SEQ ID NO: 149808 - DNA, 1853 bp, Arabidopsis thaliana landsberg
agagtgaagcgaaatcggaaaagttaacgacggagatggctacagaggcaccaacgcaatcttacagcgagcaatggtattgggacgatcgttacaagaatgaatctgaaccgtttgattggtaccagaagtattcacctttagctcctctcatcaatctctatgttcctcaacgtaatcaacgagtcctcgtcattggctgtggaaactcaggtatatagaagaaaacaactcttttgatttcacagttttgtgtgtattatggatccgttttggtcattagttgtttcgaacttttaatgtagcgtttagcgaaggaatggtggatgatggatacgaagatgtagtcagtattgatatatcatcagtggtgattgataccatgattaagaaatactctgatcgtcctcagctcaaatgtaacgttttttttttggttttttttttacatttgttgattcttctacttaatgttgcaatttgggaagagacatatctgtgtctgccttaatcgggtatattactagatttagcatgaacttgtgtatttttggataacgtgaaaaataaaacagatttgaagatggatgtgcgtgatatgaaagcatttgaagatgcttcttttgatgctgttatcgataaaggtgttcttactacttgtttgaatatcattactagcctaaaatgcattatgtttcatttgtataacattttggatttttgtgtgtgtgttttcaggaaccttagactccattttggtgagtgaggtctactttctctttacttatgttatctctagatgctcgatttctcactaagtcttatactttttacatgtattagtgtgggagtaattcgaggcaatactcaacacaaatgcttgaagaggtttggaggtacttggcatgaaatgttgaatggtttctgtttatctgttctagcttcttctttttctatttctttcttgattctttcacctataatgaaagcagttgatgaaacctatagggtcctcaaggataaaggagtctatatcctggtaatattttcgtatcactttttattcttatgtgtctatgtttgttgaatgcaaagtgatatttagatggttctctgtagattacatatggtgctccgatttaccgtcttcgcctgtttaaagaatcatgctcttggacaaccaaactccatgttataggtcagctttcactcagaaaccatcgttaaatttgtatcttgtacttagttgtggataaaagttcactgttctctactaaacttagactagctgtctttttaatgcagacaaaagtttaaccgatcaaccgttagacaccccaaaatgggaactgacaaaacctcttcctctagatgctgatggaagttcagtggaatctgcgataggcaaaaaccctgatgtccattacatctacgtctgtattaaggtgtgtggtttgatgctccttcctgctttgctttctatagttttttttgctaagatgatgcttttctgtttctggataaccatttgcccacactcttccacattgatcatgcaagatctcatctttaaactcggtctgagcttcacatgtctttgttcctctggaaaattgtctcaggatgagtcttcgaagatggaggcagatgcagcatgaagtcatgggaacctctttgtgccatttgctccgaacatataagtcctctaaggtcttatttttgtgttttgtcgtagttatctacaaatttaagacgagtaatcttgagttcatgtttactccgtaattagaggaggaacaaaagttttaactataattctattagcaatgggaaaatgttgatgttacctcgta

SEQ ID NO: 149809 - DNA, 1511 bp, Arabidopsis thaliana landsberg
atgctcagtaatttgtttcgcgcagctgacttagattctcaatttgcttgtatgctgaaacaaggtaggtcactgttttcagttttgattctactgctatccgtgttatgattatgtaacaattattgggatgttttttatgtagcggctaatgaaattccttcgaaggcacttccactggtaaaggagcaagcaactaatagttgcataaatgcactctatgcctaccgtaaattttgtgctacagtgacatcatctggacaactaattcttccaaaggcgctcaagctatttccattatacactctcggtatttctttgtgacttttgtcaaattttaagttaatgttacacaccgtaggtttctctttgcaaattgtttcccatcccttatcttgatattagaagtgaatatattgtgttttcacctgctatgcatgcttacttctaagagatattaaatgacagttgttttcgttttctgctatctttgtggtaattacatgtggcctccgtgaagacactgtagcatatttggtacctaccatactagcagcatgttagataccttaatttctccagatgtttggaaacctgttcagtgtgaattacaagtactaattgtgctactcgctagtcgctatctgtttttgtttctcttatatatactgagtatgaaatgaaacataccgcatgggtcttgtcaggatcatatagcttctcaggaatggatttacagaaaatagaatttgatttgttgttatttccttttacatgggtcctcctcagcattgaccaaaagtgtgggtttaaggacggatggaagaattgatgatcgatcattctggatcaactatgtgtcttccctttctactcctttggcaatcccattggtttatccgagaatgatttctgttcacgaccttgatgtgaaggtgtgatgggctacttttttttaatatatctctgaagacttaaatatacagtttgtgaaagttttgattattcttactttttaatctatcaggacactgagggatcggtccttccgcctccaatcccattgtcaagtgaacacattagcaatgagggagtttattttcttgagaatggtgaagacggtctactatttgttggcgaatcagtagactctgttattctgcagaaactttttgctgtttcttcagctgctgaaattcctaaccaggtaatcaatatttctcttcattagtagatggaattgtaacatgattaaatagcgacagaatctaacttttatattattttaatacacgatccatatatgactgttgtgattgtttcatcatattattgataccataagagaagaaatcacttttctggaacttttgaagcctgctaagaaatgtaacctgtgttttctttatagtttgtgctgcagcagtatgataatcagttatcaaagaaattcaatgatgcggtgaatgaaataaggaggcaaagatgttcttacctaaggtatctagcaa

SEQ ID NO: 149810 - DNA, 849 bp, Arabidopsis thaliana landsberg
ggtgggaggattgtctatggaactatatcttcccaatgttggatggcgcctctcacaaggtgaggaaattggttcaatagattcatcttagaagacccttgtgacaagtgaatcttttttgtaggctgcaacatcatcgaaggacgaatggcaagggaaagaaatcggtactcgaggagggaaagctgtgcacatgcttatacatcataggtgacaaaaaaaatttcgtcgtgtggatatcttctgcattgtcaatctctttgtgatagtctttgatgcctgaataactcgtttacatcaaaagatttttactagttttcctaccattgaacttgccatccattttctgatatgcagtcgcaattcagcccagaagcagtgggatgaaacatttgtacttgtccttggaggaatagcccgcctcttccggtcctactttcctcttcttgaaagcttacctaacttctggtcaggtgagtgaattgtaataatccttgactgccctgcagtgcttattgtttaggagaaactgaaatatcgtgaaactttctgcttctgtaggatgggagtctttgcttgcttttgttaagaatagcattttcaatgggagtaaagaggtatcacttgcagcgataaattgtctgcagacagctgttgtgtcccactgtgtcaaggtaacaacgcagctatttgaacaatctatgagctacaatgtacactgtcatatccatatttcactctcttaacttttttttttttttatgaactagggaaacttgcaacttcgatatcttaattcggtactggacgtgtatgagcatgttttccagaagtcatcgagttacacag

SEQ ID NO: 149811 - DNA, 1581 bp, Arabidopsis thaliana landsberg
aatcgaatccgatcgaatcgagagaggaaaagtttgaattttcattcggaatgctcagtgatattggaacgaaggaggtgtttcctctgattgggttttagtgttcccgtgaaagaagaagaaaacaaaacatggacgcggagcgatcgtcgttgtgcaactttttcgtcaacttcctgatggaggagaactacctcttgacggcgtttgagcttcttcacgagctcctcgacgatggccgcgatgcccaagcaattcgtcttaaggagttcttttccgatccttcccgtttccctcctgatcagatttctcggtataattcaattcgaggttcgccaattttccgcattctgcctcacattgttattttgtttgttaccgaaattgtcagctaaatcgtccctctcagagtggttgagctgcgttacattttagtgatctttttggggatctgttgtatgatgtgaataaattagctatcttatttggtctttcttaattcagaaagcagttgaatagtggtcaggttggatcatggacatgttttaaaagttatgaaaagcacagtagttcataaaatgatggagaatcctgaaaatggtggagtcatgtttttgttcttcatgcatttgatgttcttctcatagtctaagtttgaaaagcaatcataattgaaggtttcttgaatggtgattgttcagcttgttaaatggggtatactattatgaccaagaacaaacccatgtcggatcttgtgtcgcattctcaggtttttgattgtatagtgtcaggctttcttagacaacttggtttgtagcgtagctagtaattgttaccctacaatgcagttgcggatccacaaagtttgttggaggagaaagaagctttagctgagaagttagctatcagcgaatatgaatttcgtctagctcaggaggatattgcaagattgaaaactgaaggacagaagaaatctgttccttcgattgacaagtcagaaggtaatccattactgaaatatttattctgatctttagcgtctcgtagttaatcttctacttagataaacgtgtatgtataaacactcagttcgggttttgtggcatgaagtcggttattagggtttcagaaacttcagtgatgatcttagtctgaagtgcagactcttcaatgtattagaatttttctctgcaataagtagttgttagtctaagtttccagttcctgtacgccagccatctcctcttttctttcatttttctccatggagatattttctgcttaggtatgaaagcatcatttataatgcatatgagttttattctttgttattttcatcagtgccagcatggtagcaacctaatcaccaaactatgtcctgatagtgtttgttatttctcagagatggattcggatgagtttggaggcaacaggccagagattcaacggaaaaagaaagatttttccttcactgatatagggcctttgaagaacaatgaacgtcgagacttaaactgtgcagtgaaagaatatcttcttctagcaggttataggcttacggctatgacattttatgaggag

SEQ ID NO: 149812 - DNA, 986 bp, Arabidopsis thaliana landsberg
atgaagcaggactgttcaagaaacggagaatctgcattcagtggaattgtctctgaccaagactactattcatttgtaaagcttccagaaacatgcaagcgaaagaacaaggaagaagaagcagttactggtcatgctgttagtggaacgagtaaaacccctgaaagatttcgtgagacatacaagagaagacggttcaagaactcatcaaaaaaggcaacaaacaagaatggtgaaactcttatggaaagagaaaaaacagataagcctatacctttttcttcggagatgaaggaaagcgatgcagaaccgtcggttgtaactactggaacagccagtaaagaaactctaggatcatctgttggtgttgttgacattggtgtcaacaaggttgcttacttttttcaggttgctttgcccggtgtccgcaaagattacggtattattacactttgttgcacatctaactacttccatacacgccacatcgggtctaagtgctaacacatgaattggtttggtccttttgtgtgcaggtgaattcaactgtgagattgaatcagatggaaaggttatactggagggatcaactacaacaggcgaaaaaaatatcaagagacattctcgggtgttcgagatgaatatccggaagctgtgtccgcctggacctttcaagctgtgctttaacctcccgggaccagttgatccgcggctattctctcctaacttccgatcagatggtatcttcgagggagtcatcatccgacacaaaaactcttaattaaaccggaggttcctatacaagtttagaacttaggatctatgtagatcttttatctttatgtgactggacatagaaggaaagcgaatcaaacagcatgcaaggataaatcttttacttttaggacgtgactctgtagattttgcatgattttgctaaatatccgttttcacaatgatttcatcaaactgagaatccgttaata

SEQ ID NO: 149813 - DNA, 1087 bp, Arabidopsis thaliana landsberg
cgtcgacggcaaaagttgaaaataaaacaataaacagtcgaaattctccggcgaagatgagaaccggaaaaggaaatcaagaggaagaagattacggagaagaagactttaactctaaacgtgaaggtccttcttccaacactactgttcatagcaacagaggtaaattgttcgatttgggagacttttgaatatttcttagttgttgtttcgtcaatttgtgttttggttggagctattgttgatatgtatcgagatggatttgatttgaatagtttgggattagatttttctaagttttgtctctgtgtgattcggtgtttgattttgaaagcagattcaaaggaaaatgataaagctagtgcgatacgttctaaacattcggtcactgagcaacgtagaagaagcaaaatcaatgaaaggtaaataataagtgttcaaagtttgaatttttatcagattttctaaaaagggtaacaagaaagtttcgtaatttgtgattgttggttggtggatacagatttcagagtttaatggatattatacctcagaatcagaatgatcagaaacgagataaagcttctttcttgttggaggttagtaaaatttatagttttgaacagaacatgtgtttagagaatcagaatgatgtttgcttttatatgttgtctcaggttatagagtatattcactttcttcaagaaaaagttcacatgtatgaagattctcaccaaatgtggtatcaatccccaaccaaattgattccttgggtatattccttctcctatctttggttggttttctgttatattgaatcgtttttgttacatttttttagagaaacatggttattgtgttaagtgtttcatctttcttggtatttttgacaactgtttcatgtaactttgatgcagagaaatagtcatgggtctgttgctgaggaaaatgaccatcctcaaatcgttaaaagcttttcaagtaatgataaagttgctgcttcttcgggttttctcttggatacgtacaattcagtagatcctgatattgactcagcagttagcaccaaggttcctgaacacagacctgt

SEQ ID NO: 149814 - DNA, 632 bp, Arabidopsis thaliana landsberg
tatgcgagttttaacttattaagtaattcttgtctcttaggtatggatgtgtgactctagaggatgttcctcttttgttggagcaacacattaacaaaggcgaaattgtagaccggctttggaggtatagaagatcaaagcttcttgatttagacagtctctaaaaagaatttcggcctttaaacaacacttattgattgttttccaggggtgaaatgggtctgccagaagaagatcagaagaaaagtcaagaacaaaggttacaattaaacagcgaaaagatcagcaacagagaggtgactcaagaatcagttaataatagtatctgttgccagtctcgagctgtcccagagctgaacggtagtggttgccaacaaaatgggaactcctcttactgtctggaggagattcacacagagaaaaatacctcggagagagtaacctctgtaaaaaatgcatctcttcggatcggtagcagcgagaatggatcttctggtggattcaaggtttgtgcggtgatgtcaatgtggttggagacttgggagagagaagatacatatgctgctttagctgttgcttgtgctgctgcatctgtggctattgcttataactgctataaacaattgaaatga

SEQ ID NO: 149815 - DNA, 404 bp, Arabidopsis thaliana landsberg
gaaattatacactccactagtagtggactagtgaattttatcagcatctatctactcgagaaaagaaaatggcagatgaagtagtagtgatctctaagagcattgttcgaccagagagctacaacgaggaatcggatcgggttaagatccatctcactccatgggatctcttctttcttcgatccgaatacccacaaagaggtcttctctttcctcaacccgacccggaaacccatataatctctcagttgaaatcatctctctctgtcgctttgaagatcttctacccattcgctggtcgtcttgtcaagctcgagaacgaagatgctggaacggcgtcgttttacgtcgattgtgatggctcaggtgtcagattcatccacgcatcagctaaatccgtttgg

SEQ ID NO: 149816 - DNA, 3184 bp, Arabidopsis thaliana landsberg
tcttagacttatctctatatacccccttttaatttgtgtgctcttagcctttactctatagttttagatagacatggcgaatgtggatcgtgatcggcgtgtgcatgtagaccgtactgacaaacgtgttcatcagccaaactacgaagatgatgtcggttttggtggctatggcggttatggtgctggttctgattataagagtcgcggcccctccactaaccaagtatttttgtggtctctttagtttttcttgtgttttcctatgatcacgctctccaaactatttgaagattttctgtaaattcattttaaacagaaagataaataaaatagtgaagaaccataggaatcgtacgttacgttaattatttccttttagttcttaagtcctaattaggattcctttaaaagttgcaacaatctaattgttcacaaaatgagtaaagtttgaaacagatttttatacaccacttgcatatgtttatcatggtgatgcatgcatggatcatatctagagatttatggttggatatatatttaacattttgatattagtttttaaaaaggtctgaataaacaacacttgttagataaactcgatataatcaatacatgcagatcttggcacttatagcaggagttcccattggtggcacactgctaaccctagctggactcactctagccggttcggtgatcggcttgctagtctccatacccctcttcctcctcttcagtccggtgatagtcccggcggctctcactattgggcttgctgtgacgggaatcttggcttctggtttgtttgggttgacgggtctgagctcggcctagtgggtcctcaactaccttcgtgggacgagtgatacagtgccagagcaattggactacgctaaacggcgtatggctgatgcggtaggctatgctggtatgaagggaaaagagatggggcagtatgtgcaagataaggctcatgaggctcgtgagactgagttcatgactgacacccatgatccgggtaaggccaggagaggctcataggctaatataaatcgcgggagtcagctggaaacgcgatacatgtagcttgacttttatgtcccagttgctttcctctcttaagaatatactttgactatatatgtgttcgttcgttttgtcttgttcaaataaaaatccttgttagtgaaataagaaatgaaataaatatgttttcttttttgagataaccagaaatctcatactattttctattgtaacgagttttcttgtattaaatttagaagaatatacaaaactaaataattaaatcgaatcaaaataaatcacaatcttagactcctagtacggacttgaattaataattttgattctctgagttcttgaattaataattttgggtcggttcggtttctctattatcttattgggccaaatcggacggcccattatctagctccggcttatcggacttcctcttccccggcgctgtaaattccaagtccctccgttcacgtctccaaactagccgttgccttctctctctccagccaaagcgatggcctcatacgctacgttactggagaaaactcgcgtacctcaaccttctatacaaagattcgcagtaatctccgtcttctccaagttacgatctgctccagaacaatttggatcagaagccgaagccggaagagaagctatctccttctgcctcacttctgaatctatcactgtcgttgatcaatccgttcatgagctatgtcgattagtatcagactcagttttagacctctctcgtggtttgctagaacttcaatcagctctcgaaggatgcgattcgaaattggtttcgctgttcgtgaaagggttagggtttttgattcgtattggttatgaacggaataatgggaactggaagtttaattcgacggagaatcatccgtttgttagggtatgtgatttcattgatgctttcgttgttctattgggaatttttggaattagctaggctttgatgtttcttgctattgctggtggtggggtttcagattcaatctagcccgagggagacacagacggagctttttcatcaagtatcactctttgggatgcataatcgaagattaggaatggtggacgtatgtgaattcttggagccgttcttgaatttcactatactgcggattccgctttcagattcgtcttcatcgttgtttgcgagggagttgatttcatcaatggcttccctttgttgctcatcccgccacgaagcactaccgatattcagattgcttatgcgatgtctaaaatatatcccgggaaataatctggaagtaattgtcaagatcctagtggatgcctacactgtggttgtgagagacttggttggaaccggattggtatgtgcttatttcatcatgcattcatcttaaactttgtgctcattgtctgatacccatttaattatttatactagcaggaagtaacagaagttcatttgctcggtgtgcaactggtggatggcgtactttttctttgcgcttctcctcatgtacaaacaaccgaacaagagtctgttatcgaatctttgaagcacttgttggctgttcagaaagaccttggattagcatattcacatgatttatccttggtggttctctcgctagttttcatgcttgccaaatctactgtcgagcatgaacaactctgtattctaaagtttctgctttttctgctcaaatggaaaactgaaagtggtatatttgtgtctccatctttttattcattaccctcttgctatgtgtgtatttttctgttgactgagaattgattctttggaatccttttgtagaaaacttgtcggttaaggatgcggctggttcaagtgtggagtctctattattgttccctatcaccgcactgatgtcttctccttctaaatcaatcaaagtagcagcaagtaaggttctttccatcgtagaaaatttcttggtaacagtgtcaaatgcaccaaagattgaggtccacacaagtaagggagattcaccactcagcagggtgggctctgtcgtatttaggttcatgcagcaactctggcatcagaatgattacacaccttccacgtcttccttcctcagagtggcttacaccaatggaagtgaaaaacaggaaacttatctag

SEQ ID NO: 149817 - DNA, 1028 bp, Arabidopsis thaliana landsberg
gcatcaacaaaaagacaattctttgtaataaatatcttcaattcgtaaatgtcttggcctttgtcgttttcaaacttcatcatcagcatcacgtgattggctaatacaaataaaattttctctttattttattattttgccacaagccgtgaaaagatggagaaaatgaatgtccgttttatgattgtgttgatggtaatgtctctggttctgggtttttcgtcggcagttgatttcagatggaggaaaactgcaggattctcagatagattcaccagagctgtttcttcagtcgtgttcccagttcatggcaacgtttatcctcttgggtaatctatatatttgcaaactcaacttcacaaaattattgcgtgcgttccctcatttcagaaattctctaaaacaatttattttggttgaaacaggtactataatgtaaccatcaacataggacaaccaccaagaccttattatcttgatcttgatactggtagtgatctcacttggctccaatgtgatgctccttgtgttcgttgcttggaggtatcataataatttcatcttcagttctgttattctctggatccaatgtcatagtttcatcttacgaacttttttatttatttcaggcgcctcatccactgtatcagcctagtagtgatcttattccttgcaatgatccactgtgtaaggctttgcatttgaatagtaatcagagatgtgagactccagagcaatgtgactatgaggttgagtatgctgatggaggatcttctctcggtgttcttgttagagatgtcttctctatgaactatacacagggtctccggctcactccccgtcttgctctagggtatatatctatttctacaatcttggaccggcaatgttcagtttgattttagcaattgtagttcctagtaaatcctaattggagttttttgtgtaacagttgtggatacgatcaaatcccaggggcttcgagtcatcatcctctagatggagtattagggcttggtagggggaaa

SEQ ID NO: 149818 - DNA, 1202 bp, Arabidopsis thaliana landsberg
  unsure (1)..(1202): unsure at all n locations
cttttaaatcgcgaaacgatgagtcttctcacgntgatcgacctctttacagtgcagattgggcttgtcctaagtaagtaatttctaagaacaattagctcgtatgccatgtctctagaaattggtctggtcctttatagtttatacacagtgaatccaattttagtttcctaggctcttaccttttagatcatatcgtatctgatgctgcgataatgttgtcagcatctttggatgaagatgttaaattactggtttgagaaatgagtgtttgtttctgtaaatttctgactttaggttttgtgttttctgttactgtgttcctcttcagatgcgactttgtaaactttgccagaaatgaaagatgccgagagtgcaatgaagtcgctgacagacgacctgttgctgctgttgtcaaggaaggtgactggctatgtcctgagtaagtctaaatctgacaattacccgtttctctcgaaatcaaaagtattaagtcttttatgccataccctcattggttattttcttgctggctccacaggtgtagtttcttaaacttcacaagaaaccagagctgtctgaaatgcaaagcaaagggaccaaagaaaacttcaatggtgaatattgttgaaatgaagaaaggagactggaactgcactgggtaagtttcccttacctctcaaagcctctactatatcttctttttttgcttctatgtctccgcgtttgtttatgattatcagctgtatctgcctttagtctttacgttcattttttctggctgctaaagattgaaagtttgtaaagttgttgtatcttgtatgattgtatctttgctcgattgctctgtctgtactgatcagaatgctttgtatgtatattttcaggtgtggatatatgaactttgctagcaacaaacagtgtcgagagtgccgagaacaacgtcacaagacgctagctgagcctggagattgggaatgcccctcgtgcgtctctcttcctctctgtctcttatttagtaatttgttatcttcatatcctaaaccagaccattttgttcccgtggctcattttaattttgcagatgcgacttcgtgaactttaggagaaacgatgcttgcaagaaatgcgagtgcaaacgacctagccaagccaataacgatcaagaagaccatacatggaaacgacccgccttagtgtaa

SEQ ID NO: 149819 - DNA, 953 bp, Arabidopsis thaliana landsberg
aaagcccagccacctcctgaaggtcgtctgcctcaggccaccaaaggttatgcagttatatgaaaatgaatttagcttgaattcaggtatcagattgtagatacatgttcataatcataaattcaggtgtggatcatctaagagatgtgtttggtcggatgggactcaatgacaaagatatcgttgcattgtctggtggacacaccttggtatgtatgctgcatccagaaacaaagacctatgtgcttttctcagttctggctcacaccattcttttactttcagggtcggtgccacaaggagcgttcaggattcgagggtgcatggacaccaaacccgctcatttttgacaactcctatttcaagtaagatcagattctctgcttctgcttgctcatacttgaattggacatgagctgaattagaagctcttgaatcttgatggttgttaaacagagagatactaagcggagagaaagaaggacttcttcaactaccaaccgacaaggctcttcttgatgatcctctctttctcccatttgttgaaaaatatgctgcagtaagttgttcaactcatcatttcatgattctctcagcatacatatattgtcaataggataatatcactgactggattgttactctcaggatgaggatgccttcttcgaagactatacggaagctcatctaaagttgtcagaactcgggtaagtaacatatagaacaatcattctcatcaacattttatttaactttctttcctattctcctaatgtagtgtcgtaaactttgaatggtcctcagaaactcttttcatttgcaaacactttgatcataataacataacttacgctcatgtcatcatgtcctttgcaggtttgctgacaaggagtaatctggaatctggtgtcatctcctacctccttgattcttgttccctcacattattatga

SEQ ID NO: 149820 - DNA, 2522 bp, Arabidopsis thaliana landsberg
  unsure (1)..(2522): unsure at all n locations
tttgtttattccttgtaaaatatctgtgagcaaatcctaaatcggtgggagggagattgaagaacggtaaacggaaaatatgaagacgacgaagggaggcaaagtgatgaaccctactgatgcttatcgcaagcagattcgcaagagagaaattaagcgtgtaagggcttttgttttctccattctcaatcttccctttcttttttgttggtgaaatcgaattgggattaattgttgttgtagctgtatgagtttagattcaggttaaaactgctctgttttgatttagctttgattcatatattactctttgttagggttcaagtggacaaatcttcatataaaggctaatttttccttaattagactttttctttggttgtttaggcattagagaaattgatttgtgagtttgatttgcatgttcagactcgtttaggtcaatagctttgcagtagctaagaaannnnnnnnnnnnnnnnnnnnnnnttgttcaattggtgtctcattatctgtgagcaaatataatttgtgggcaatgctctccccatttacattaactttggttctttaacagaacaagaaagagaggcaaaaggtacgagaggttggaattttgaagaaggatcctgaacagatcaaggatcagatcaggaagcttgatatgtcaagtaagttttactctacttctagtaacaacttataccttcaaatcgaatatgtcttcttcttttcgtagttatttttggctttcaagtttcaagcatatctctaaacccccaacagatatacagatttgctcagtccctatgcaaactaatacagagttgacatttttttggtgtagaggcggaaggtgctttggacaaagcaagaaaacataaaaagagacagcttgaagatactcttaaaatggtggtgaagaagagaaaggtattgctctggttgagttaggttttattcctttgtcccacaggactccccccagcttatgatttggcatctcctgtcttcttattcctttgtctcttttgtttttacaggaatatgatgagaaaaagaaggagcaaggagaggcaacaacctctgttatgttcaggtgattaatcgttcatcgcgttacttttcgtttgctatatatattgtttgttaagatgtcatcggcttgctattagatataagtataacctgttcttgttttctatgtagtcatctaccccctcagcgaagattaactggcgaagaggacttaaaaccagaggtacttagttagttttctttctattccccctgcttgatttcgaaaacctccctcacttttctgcatattatgacaggactctgtttattatcaccctactttgaacccaactggtgcaccacccccgggaaagccaccaatgtataattcatccataggtatatcttttgttaatgctgcttcttacaaatcaaaacagtcttttccctacttccttttattgatcgtaaaaggatttttttttctaacgtttttcaggacttgctatctcctcagatggtgcttcatctagtagtgctgcattgtcttctattaccgagtcagaagattccgtcttagttaatcctcctccacttcctcctctaccggatggggataatgctttatctgcttctttgccacttccacctctacctcctttgccaccaactacaggccttactttgccacattcaccatttccaccaccacctccggggccaccaccaaaagagcaggattttgttcgtcctcctcttcccccacctcctcaacttcctcaatcttcccaaccacctcctcctggtctaagtggaagtcaaggcgatggtagattcccggaatcatcagattttaccttcgacaatcgcatggtaaaacctcattctgttactgatagctatcttaaaatggtggcaatttatgtgttttcgtgtatcaaatgaagaaagattgaaacttgattacagatttttccatatctattttgcagaatgctaatataacttccgtccctcttctcccaccacctggcattccaagcaatgaatctgagagtcgtcctgcagaatctaacgccagtagttttcaaaacgctaacctctcaaagatggttgcaccaccaccaccagcacctttacatcagcaacatcaatcaacatttgcaggagctgctgcttcactgactaattttcaacctgatgttcatcctcctccaggaatgttgcgttttccacctccaccgcctccactcgatatgcatcctcctcatcctggaatgtttgttggtcatctaatcccaagaccaccgtatggcccaccgcctggaccgcctcctatgatgagaccgccacttccaccaggaccaccaccgtctagttttcaagacggtcaagcaatgatcagaccatatgtaccaaacaaaccatcttttgtaaaatccgctgctcctactgttgtcaggagaccactcgctcaacacacacctgagcttacatccatg

SEQ ID NO: 149821 - DNA, 1413 bp, Arabidopsis thaliana landsberg
gagaaacctccgataagcttatcggacaaaaagagaagtagacgccgccatggataggcttttgcaaccaccttcttctcactcaattgctccctccaaattccaatcaagaccatctcccttattactgcagcgtctccactcaacgaatcttagtacttttccctcctctcgccgtctcgagtcacgccgaatcagctccatttcctgcttcttccgccacaatccattgccggatacatctccaggactgaatcagagtagtaatttcttgattgcttcttctcaaaccgatgcgtcgaaacctaatccaggatttatccaacggatcgtgagcagttttgagcaacgcaaggtaattcacaactatgaatcttctccatttacgtctctgtgtattggttatataggttatggtttcagttactagatttggtgtttctggagaagagcgtcaatgcttataggcttcaattgtttcaagaaaccattggattgattactagaagtttagggtttcgtgatcgagtattgtgtactttaccttgagattgttcactgttctgtatctgatgtgtgcaaatttgtgtgtttcttgtagaccatatcggcaggaatggttatattagtctctgctatagctgcgcttttgcttaatcccattcttgtgccgcctgctttcgctagctttcaaacggctactaattctggtggagctgctgtggttggtggaaaactcctcaggactgaagtattgacaagtgcttggactggtttctttgctggttgcttacacacgttatctggacctgatcaccttgctgctttggctccactttcgattggacggacgagaatggagagtgctgcggttggagctctttggggatgtggtcatgacgctggtcagctcatctttggtttattgcttctgcttctaaaagataggctccacactgaagttataaggacttggggtacaagagtcgttggtttgactctccttgtgattggtgctatgagaatcaaagaagcttctgagatcccataaccatgtgttgttactttggagaatgggaaacagatgagaaaagcttaaagaagaaaaagatagggtttgcgacatttgcgactgggattgttcatggcctgcaaccggatgctctgatgatggtattgcctgcattggctcttccttctcggatagccggtgcttcgtttctcatcatgttcttgattgggacggtgattgcgatgggaagctacacagtttttattgggtcgtgtagcgaagcgttgaaagagaaagttcctaggatcactgagaaactaacgtgggcatcttctcttgtggccattggacttggattggcaattattgtcagccagttctttggattcagcctgtattga

SEQ ID NO: 149822 - DNA, 1473 bp, Arabidopsis thaliana landsberg; identical to SEQ ID NO: 69066

SEQ ID NO: 149823 - DNA, 718 bp, Arabidopsis thaliana landsberg
tttcaatccttgaaacattgttacaatggatcgatgagattcctcctgctcaacaatcagctcgatacggtaacgtttcggttaggtcatggcatgaacggctccgtgagagaggtgaatcgcttatacttgagtttcttcctgaggaatttaaagaatctgtgattgagattgttccttacttcttcgatagctttgggaactcaagtaggattgattacggaacgggacacgaaacaaatttcgcggcgtggttgtattgtatagctaggatggggatagtgaaagaagaggattatcatggtttggttgctagggtttttgttaagtatttggagttgatgaggaaattgcaaatggtttattgtttagaaccagctggatctcatggagtttggggacttgatgattaccatttcttgcctttcatatttgggagttctcagttgattgatcataagtatatgaaaccgaaatcgattcataacgatgatattttggagaatttctctagtgaatacatgtacttgtcttgtattgcatttgtgaagaaggttaagaaaggtttgttcgctgagcattcgccgttgttggatgatataagtggtgtaccgaactggaagaaagtgaatagcggtttgcttaagatgtatagagttgaagtgcttgagaaagttccgattatgcagcatttcctctttggctggctcatcaaatg

SEQ ID NO: 149824 - DNA, 2605 bp, Arabidopsis thaliana landsberg
agttttaaagctgccgtccgactcataaaggatgcttttttcaaacacggggagaaggaagcactaagatcttgcgtcaaggctataacattttgtgcgtcagaaagtaaaggggagcttcaagatttttcacgtgggaagcttaaagatcttgaagatgagcttttagataagatcacttctgcaattagagaagtcaaggtacactttacttcctttgccatctatcttcatactcatcttatggatgaaacgttacatctgttttctgtgcaggatggaaatgatgaatactccctcctagtaaatctgaaaaggttgtatgagcttcaattgtcaaagcctgtgcttgttgagagcatgttcgatgagattgctttgacgctccataatttcagaaatttggacgaagaggtgctaaaggaattagtttaaagcacttactatcttttttgtgtctctcacattttaatggaacagttgttcatggttgcttaggttatctgtttcctgcttctgaatatgcacatgtatttggcgtggtatctgcactccatcataaattgtgaagctatctctgaagcttccttatcttcccttatatcaaagcgtgataccctgtttgaggagctttcgtacttcctgaatggaattgaggaatcgaagaaatatggtaatcagctatcgaacagggtaaagactatttgacattccaatttaacttacacatttcattccgtatatgtgcttgttttatcaagcaatgagtcatgattatcctaaaaagtgaattctccaatgcttacagatctgtgctatactcgccgaaacatggtgtttgtttagaaagtcaaattatgactcgggtaaacttgaaagattaggatactgtcccgacagtgtctttcttgagaaattttggaaactctgtgcagaaatgtttaacacttcaggtgactctttgttttgcttttccacaaacccctgtcatttcttgattttccaaattacgtattatttatttctgccggactttgacacagatgagaccgatgaggaggatgaaaataaggaatacattgaagagacaaacagagatgtttcagtcattgctgcctgcaagttggttgctagtgatgtggttccaaaggtacttaccaagtgcattttacattgctgctattattatcttagtatttttctgacacctatatagattgatgctcacatatcaatttgcttatatggattcttttctgttgcaggattatctaggaccagagatcatatcgcatcttggtatgcatggacctggtgtaacaggcatcataaagaatcttattacattcttaaggaaaaaagaagatgacatctctaatatctatctcgaatccttgaaacgggtaagcaagattttcagaagatgcaaagtttcgtagtccaagaaaattgctgacactatgtaattgggcaggcctatcaccggtattcaagtgaactttctagtggccgtgaagaatccagagtagataaatgtcttgaagagtggcgggagcttgcaggtgggctctcaggaatgtatatcggggctgcgcgcaacaaatacagattggagatattgagtgtggtgaaggaaggtgttgagtttgcttttagggacgccccaaagcaactgttgtttctggaagttgctatccttccatttgcaaccagactctcagtgtctgacatcattgacatgtaagactgatgactctctgagcaagtaggaagctctctgctaataaataactttatatatgctcttgtttgcttgctgaacagtaagaaggacgttcaggggcgtatagtgcatgttaatacagacgaagatcccagtggatggcgtccttgcttcaccttcttggaaaccttggaggagaaatgcttgaaaaacgaggatttacaaggtatgttatgtgcactcgcacaacatctgatttggtttaatcaaagccggtagatgagtatgatatgtctgcatgctttaagtcttgacttgtgatgatgcgtctgtcacagacgacaaagaagcagcaaatgtaagacgcaggggacggccaagaaaacgtccggaaacagagcgaaagagactgtttgatgagcaaagtggaagcgatgaggatgagtctattagtggcgggtcagacagagaagataagctcgacgaggacgctcctctaatcgagacaattagatcggctgccagacggaaagcgctcaagggtgaacggtccaagggacactgacgacgggtaaaacatttatcaatcgacataatttatgtgtttaaaagtttgtttctagttgatacagtcaaggaaaccaacaaaactgctctttgttatagaaatccatcatttcaagtttagacattaccatggaatatctatcattagcagaacaaaattgaaggcatataatgaaaaaaagaagcaaacaaaacttgtgatattgattagatcaacttctacccgcaattctcatcaaaggagcaataacaccctgaatctctagaagagactgttgtatcctaatctcctgattaacctccctcttcaagttc

SEQ ID NO: 149825 - DNA, 2767 bp, Arabidopsis thaliana landsberg
atggagcataagaatattggtgcagaagtacttcaagatacgtacgatgatcaacagaaatgggttcttgattcttctcttgatagcagaggacgtgttcctcttcgggctcgaactggcgcttggagagctgcactcttcatcatcggtacatagcccttattgagattgtatatactttataccatagaattataacactgaaagaagtgtactataatatcccaaaatattaaatctttgtgaagtcttttgtttcgtcttctctgcacagcgatcgagttcagcgagagattgagttacttcgggttagctacaaacttggtcgtctacctaacaacaattctaaaccaagatctcaagatggctataagaaatgtgaactactggtcaggtgtcactactttgatgcatctttttggaggctttatagccgatgcatatctaggccgttatggaactgtcctacttgcaaccaccatttaccttatggtactaatttctgagaaaccggataaataataatactcaaaaactattatcgatccttttcaatagtttaaagatagaccttcacatatacacacctcttctatactctcataaccgagtcaatgatacccaaaaatatcatgagttcaaaattttaaatatatatttatatatctaccttattaatatatatatctatattttatattttataatttatttttgttattttgttgtcggttttgatcggtagtaccttttggacactattataaaaaccagctctaataacttcatatcttatcacacacaacaaattttgagattagtcaaaacttgatatatgttttgtttccttgtttcttgtcttaatttgttgaatttacaaatttgcagggcttgattctgttaacattgtcttggtttataccgggattgaaagcatgtcatgaagacatgtgtgttgagccaaggaaagcccacgagatagccttcttcattgcaatctacttgatctccataggcactggaggtcataagccatcccttgagagctttggagctgaccaattcgaagatggccatccggaagaacgaaaaatgaaaatgtcttactttaactggtggaatgctggtctatgcgctggtattttaaccgcggtgactgtaattgtctatatcgaagaccggattggttggggtgtggctagcatcatactcacaatagttatggctacttcgttttttatcttccgtatcggcaaaccgttttaccgttatagagcaccttctggtagcccattgaccccaatgttgcaagtctttgtcgccgccattgccaaaagaaatcttccttgtcccagtgattcttctcttcttcatgagttaactaatgaagagtatactaaaggccttcttctttccagctcaaagaatcttaagtaagtgcttaacaactcggatgcttagtcttggtttaagttaggttttggtttggatgttttagttttttttttaacaatagcaaacaagtaacatatatccaaaataatatggatcgatttgttaccatttcggtcaggggtttaaaattagtcttgatcaaatatgcaacaaaaaaaaaaaattacataagttttgaatccgtttaaagcatattatagtatccaaacatgcatgtaagtgattccgattctgtttgcagatttctagacaaagcagcagttattgaggaccgaaacgagaacactaaagccgagaagcagagtccatggcgactcgcaacggttacgaaagtggaagaagttaagctactcatcaacatgattccaatctggttctttacattagcctttggagtatgcgccactcaaagctcaacactctttatcaaacaagccataataatggaccgacacatcacagggacaaacttcatagttcctccagcttcattgttctctctcatagctctctccataatcatcaccgtaacaatctacgagaaactcctcgtgcctcttttgagacgtgccacaggaaacgaaagaggcattagcattctacaaagaatcgggatcggtatggttttctccttattcgctatgatcattgctgctctgattgagaagaaaagattagattatgctaaggaacaccacatgaataagaccatgaccttgagtgctatatggttagctcctcaattcctagtcttaggagttgcggatgcttttacccttgtcggtcttcaagaatatttctacgaccaagtcccagattctatgagaagcttaggcatagcgttttacctcagcgtgcttggagcggctagctttgtcaacaatcttttgataacggttagtgatcatttagccgaggaaatttccgggaagggctggtttgggaaagaccttaatagcagccgcttggaccgcttttactggatgctagccgccttgaccgctgcaaatatatgctgctttgtgatcgtggccatgagatacacttacaagactgtgcagccgagtctggctgttgttgctgactgcggtgatgacgttgagacagccacggggacgaataacacgtccaagcttacgtaacttagctattggtttggtcatatgatgaccattttatgttctgtgtttattgtgtacttttgaaaagtgattttgtagtcattttaacattcgtgtggcgttagcctttagaaacgtatgtaatacatcttacagaactgaattccaagtccaaatttatatacaaaata

SEQ ID NO: 149826 - DNA, 1117 bp, Arabidopsis thaliana landsberg
cagagcaaccaaaatgcaactccaaacccaatccttcgctctcaatcttctgccatctccaaatttcgccaaacccatcgagagacgtgaattcatctctctaaaacgagacccatctcgtccaatttcactccgatgttccgtttccacgactttggatactccggcgaccgcttcgacccacaagccctttccggcggaggtttcaaggagtatcatggagctttcatctgttggaactctctccactttgacccacgacggttggcctctcggcgtaggagttcgcttcgccgttgacaaagatggcactcctgttctttgcctcaatcgctctgtctctcctgacaagaggtctgctcttcatgttcaggtcctcatttgctaattccactctgtttcttctttgaaaaaatggcaaagtttacttctttttgaaggaacaatcatgaattgtgtttgtttatggaatcagttagaacaatgtggattgaggactcctcagtgtacgatacaaggtagcattggtcgacctggagacgatactgttctaaaggtatcattttttaatgaatctctcactccaaagaactcaatcctgaatctctcatatacattggttatgatgaacctttgtatggacgataaggtttcttgattggcctgttactgtttttgtccgtgctactattatgttggactagaaccccaagttcttagggtaaagaagacttgcatttatattcattttctctgtgtgtgtgtttgtgctagtatttgctagttgatatctattgttgagtagactttaggcgttttttctatttccattataagagctgtttgtgtgtgtagttgaagatagtggtgttgcgtttccttgcctctaggagatatcctgtggaaaacagttggttatttcttataatagtgattttaagatgctaggtttcttgcccttttcatgtgcttttacttgaattgaatcgaagtctccatgttttttatgtagcgtcttagtgctacatggagggaaaagtttggcgaagaagttgaggaagacagtttatatgttgttgcagttgaccgtgttctccaaatggaagatttcatggag

SEQ ID NO: 149827 - DNA, 2148 bp, Arabidopsis thaliana landsberg
aatggtttacgtttattggtcagaaagcaccatctggctttcctggttcaccatatgcgatcaacttcaaatcaagcatccctgagtcatctgcgatggtaccaatgaacgtatctgtttattcatgtggtgacacatcccttggatgctcttgtggtgattgcccttcctcaccagcttgctcaagtcccgaacccctgccgccccatgatgaagattcttgctcaattagaatcggtcctcttaaggtgtgagttatgaattatcccattgttgcttgaaaacattattgagttggtatgatcttggatttgattatattgatttgtattttcaggttagatgcattgagttatcaatggcacttgtatacgtcttgctggtgtcttgcttcttcggatgggctggtttaaatcgaagaagaaatacgacacagcctcttgatagctcaaagccactattgcatcctgtggaagaagatggaattaatagtgaaatgaaggaaaacatacttggtgtcaaggtatatcaatgtattggctagaaattgtagttcttatgtgtatgtatatataacataaaatacatttatatacccacataaatgctggactatccttgaagatttaatctgtttggaggaaagaactaattgatcaattgacttctaattcttaggtgcaaagacatgctcaactctctcctgttcagagatatatggcaaaattttacaggtgaatctccaggattttgtttcgttgtctgtatcttactcgcaagttatctctacaattagatgagatgaaattcgtaattgtttccaattgtttgtctcagatcatatgggtcatggactgctagaaatccatctcttgttctcttcatgtcagtagctattgttcttgcactctgttcaggtctctataatttcaaggtggaaacacgaccagaaaaggtatgtattaactttgccaggaccataattgtacaaatcattcagcagaaaagcaactgcaaatactggtatgattgttcatgtgaatttctacatgttgtagttgtgggttggtcctgaaagcaaagcagcagaagagaaaaagttctatgatacccacctttcgccattctacagaatcgagcaggtagtttctatgttttgcttcgacagtctatattccagtttattattaaccgtatatataatctttgttcacgatttccttctgtggcagcttatcttggccactgttcctgatcccaaaagtggcagggcgcctagtattgtaccagatgaaaatattcttttgctttttgtcatacaacagaaggtattctaaaaaaatgcttctaatcaataactactgatataatacatcaggttattccagtatcatccgtttatttcttctgtttctattgattttgtttccaccaaatatgacaggttgatcaaattcgtggaaattattcaggttcagaggtctctttgcccgacatatgtttgaagcctttgggagaggattgcgccactcagagtattctgcaggttgataatttctgatctcgtgaaattttcaatggttttaatatgttgtgtaactcctcctggtttagatacacagagtacttccatgtgttatctcaaattcttgaacataaaaattcatcttgcacatggaatcgcttctctactgacatctctttttggataacattttcagtatttcaagatggactctggaacttttgatgattatggaggagttgagcatgctgagtactgtttccaggtttattttttgttcagtatcttacacatagctaatttttcatcaacgatggggatttgggtcattgacttcgtaattacattgttgaatgtatgccctcttgattagtgattgaatactgtttactgataccctctcgcttcaccctccagcattacacttcatcagagacgtgtttgagcgcttttcaggcgcctgttgatcctagtgcagtgttgggaggattctcggggaataattactcagaggtaatggtttcagaacttggctgctcagtaccctttgattgttattctcacgtcaacgaacgttatttcaggctacacgttatattgtaacatatccagtcacaacgtca

SEQ ID NO: 149828 - DNA, 875 bp, Arabidopsis thaliana landsberg
aagagatcaacccaccgtcgtttgtcaaaaaccacgtcgtattggtctccgtaccacccatcaccatccttctcgatctctccgttgttacttcaggtatgaattcactcacttctcaaattcaaaatctcatgagaattcgttttccctgtgaatttttacaaattgctaattgtgatttgtttcagtcatcaattggagctttgtgaatccaaagcagagactgatatcttagatatcatactcaccaaggtattttttgtttgttctctcttgttttttaggttattggtaggtgaaatttgtttatcaagaaaccaataaaaatcagtagcaagtcggtttcgtctaaagatttttttatttctcatagatagagtaatcgtgtacgattcttgattaaagaaaacatgtgatctttcttgtgtttgtgactttgtcgataacgctttcggattaagacgtcttcgagttaactcattacagcacatagagtgggccaattctctaaccaatttaaataaattatgcgtcctttctttaaaccatttagccaaacttgatttagtcatcaagaaactgtatttttatgttagtatattgatgatatgtttttgttgtggttataggatggttatggtgcacaacaagttaataagcaggtaatagactcgccgtccccgtttttatgtgggtcgccgccgagcagagtcgctaacccattaacacaggatgctcgatttcgagatgagattgtatcggtttcttcagtgattccgcctcagttgggtttacctccttcttcatctccttcttcttcctctgggaggaaaggaggatgtgttgttagaggcaattttggtaacagcccaaag

SEQ ID NO: 149829 - DNA, 519 bp, Arabidopsis thaliana landsberg
  unsure (1)..(519): unsure at all n locations
tctcttaaaaacactcaaaaacaatacttcgttgtgtgatctttggtttccttgaaatcatacagttcaaagagtttgctcaatgaaggttcacgagacaagatctcacgctcacatgtctggagacgaacaaaaggtaatttctacaccagtttgttccttaattttttttattagtaatgtctttttaacttaatctattgttttctttagaagggaaatttgcggaagcacaaagcagaagggaagcttccagaatctgaacagtctcagaagaaggcaaagcctgaaaacgataacggacgttctgtcaacggcgccggagatgctgcttcagagtacaatgagttctgcaaagcggttgaggagaatctgtccattgatcagattaaagaagttctcgaaatcaacggccaagaatgttctgctccagaagagaccttgctagctcaatggttagtctctcattatttgaacaagtntttaaaatagattttaaagatttttttttgttttttg

SEQ ID NO: 149830 - DNA, 1190 bp, Arabidopsis thaliana landsberg
cgaaatggaacttctcgccggcgactgtcggaaacgagtcggcgacgactttgaggaagatattaacccattcgatggttcggacggccgctgcgggtggatgtacggtacccgtcaaatgggttctaacggaaacgacgacgctttggctacgctcgcagacttggcttcgcctcctcagaaattgaaacctataaggtgtggcgttaagcttccgtcgtcgtcggaggatcgacatcctcttgatattctcgccggaaccctagataggctgccggagatgggttttggctgcttcgaagctcctttgggatcgaagattgctgacgtggaggaaagtggtcaattgactcgtgggttttcaaaggaagaggatgattctcttcctcctcttcaaatggagtttcaagctcgaaatcgcatctcttgggatggtctctctctcaggtataaatctcaccattaaaaatgtgagctttttgttcaactttggatctgttactgtgaaaagttgttactttttttctgtattattaagagtctaattttttttcacgtttattagaagcttgtttggtagagacctcctaaacacattctcttcctcttgatatatttgagctttgcggtatcatttgattctagattggttgactggtgcatcactgaacactctcagcttaaagcattaaactttgcagatatcaatcagattggtgtgccgtcattacaagcttttacagtgttggtttataccacttctaagcagtgtttgtctatatattttgcggaacttttggattattagttcttagatagtgtaaccatgttggaagctttgagtttttgataagtactttccaatttttgattttgcagctcctctgttgatagcagcgatagtgactcatctccagacgttcgcaagaccgtcacgggtaaaagaaagcgggaaacaagggtaaagctggagcatttcttggagaagcttgtggggagtatgatgaagcggcaggagaagatgcataatcagttgattaatgtgatggagaagatggaagtggagagaatacgccgtgaggaagcttggaggcaacaggaaaccgagaggatgacacagaatgaagaagcacggaagcaagagatggcacgcaacatgtctctcatctctttcatcagaagtgttactg

SEQ ID NO: 149831 - DNA, 1013 bp, Arabidopsis thaliana landsberg
gaacttgctgaaaggaatttgctaaaagggattacagctgatgagagtgtgattgttcatgtaagtattttctcatcttttctcagttatctacatgcaaatggtgtaggccttgaactagctatacttttagctccactctctcatcaagtagtagttttcttagatgaatgaattagagtggagctgtaatcatccacagtgcatttagtagtcatgcatgtatgttttcttctaaagattataaccagtgaagaaaaaaatatccaggatactccggctttaggcaaagttattgtaagacagtgtggatatactgcggtggtaaatgtcaagggtcaaactcagaaggcaatgtctgatttccgtgatattttaatcgatgacctgccggatggaggagctaatgctcttaaccttaacaggtatgtgtccctaagatttttaataatatgcgtattttgcacaccgtacatgttcttattaaagtttctattttgttaagggcctctcttgcattcattactttttgagtattaattcttaaatgaatttatcaaaggttttttccgactgtatctataacattgcggtgtttacaaaagtaacaaactttctcacaatttgttctcatcccttgagaaaagacatatttcagcatctaacttgttgttttccatcttggttgttaactttattgcagcttacgggtagagtttcacaggccccatagtgttggaacatctgtagagaaccagcccacacagcttgattgggatgatttagaatcttatagatgtattatacaggagttagtaaaaattaacttaacaaaggtagaagaaacaagggtatcttctgtaagacccatcagatgggaactcggttctacctgggttcagcatgtacagaagaaagaaacagacgtctgtggaaagcctgcaactaatgatgagactgaactttcagttaaaggcttgggaaaacaatctaaagatctaaagagctaacgt

SEQ ID NO: 149832 - DNA, 469 bp, Arabidopsis thaliana landsberg
atgataagtcttactgatgttctcaatgttattcaaagtttctttgaaagtgcttctactttggtaagtatgcaaaacaagtgaaatttaaatatgatccattcatatattcaattcttattatttgcttttgtttgttgcttttagaatgctattgaacaagaaataatcactgtctctggaaattcagtggggacttcaatcgggaccacaactcaggttgtaaactcaatttatcactaattcacatccctttactattacttatttttatcttttcttgcaggctgaaattaactttgttgatgtggataacttagacaacaatgaagacaacgcttattacatttccacgccaaagcctataactaaaagatttttgcccacatcccaacatgttcaacaatcatcaacaaaaccttaactaatgaccaaggctcaaattaagaaggaaaaaaaaggttttgct

SEQ ID NO: 149833 - DNA, 630 bp, Arabidopsis thaliana landsberg
gagaaaaggtctgggggtgtttggaggaaaacagaggacttcttctttgccttcacctaaaacagacatagatgaagtgaattttcagacaaggtcacagattgatacagagatagccagaatgaagagtatgaacgtacatgaggcggcagcagttgcagcacaggcagtagcagaggcagaagctgccatggcagaggctgaggaagctgcaaaggaagcggaggcagcagaagccgaagcagaagtagctcaagctttcgctgaggaagcttcaaagacattgaaaggaagaaacatctgcaaaatggtaaaaaaaagaaaaaaacacccatattcttttatatcacaagacattatatctatgagagaactttgaaaatctcaaaatgcttttgttgaaaatgtgattcgacagatgatccgtgcctgaggtaatggaaagcgagagaagaaggagactaaatgtgaagagagagtagagagaagcctagtgtttgtgttgatcattctctttacttgggaagttgttttttagtagaaagcaatcaaatatgtttgtcagtatgtcgtcgctctgactcttttgattcctgcacaacttttgggaaaaaatgttttatttggctc

SEQ ID NO: 149834 - DNA, 1041 bp, Arabidopsis thaliana landsberg
ggtatgataaaatctcccgtaaattggcatctcaggtacttttgctagttcctaagtctctcgagtctttgatggtttaaaaatggagtagaagtaattgaagtctcttggttcgtatgttggacagggtaatgtttcttcaggattggattctgtaaaggatgaaccagagaaactcagggaggaacaaatggagggggatggttttaaggagaagttatcagactctgtgttgatagatgagaagcttgaagagtacagtgattgtgatcaaacaacaaccacttcctgttctcacacagatccagtatcttctcaatctactcaccagaccccggaaagttttaggactccaataacatgtgatgatgatacttttgtatctgtctctgggatttctagggatgtttcaaatctaatcccattcgcgacagagactccagcttcacctgttcaagaaaaaatggcaaacactagatcctttacgcaacaactctgtgaaaggtttgtgagttttatcatctttttctacatgttttgggattggtctctctgcagttttgtaagtttcatcatgttcaactcttattgtgtaggtaatcaagatgagttcttcattgaagacttcgatgttggtccaatggataccattgatttgtatgacatgacatttcgagaagacccctcagattttgacgacaatgtgctatatgcaatgcgtgacaggactaagcaactcagatcattcaaggttctctttcatgatgtatctgtcataaaattgaatactgttctccctgtgtctttattcctaatatgtttcttctttatcataatcatcagagaaagataatggatgctattaaatcgaaaagaagaagagagatggaatatgaacagcttgctatatggttcggagatgcagatatgggttgtgatctggtaaacgataaggaacagtctacaacatctatagactccagaagctcgcagtcaaatgtgccagttgtatcagaagattctgagtgggagattttgtaa

SEQ ID NO: 149835 - DNA, 930 bp, Arabidopsis thaliana landsberg
atgagtatagctatacttccgatgtcagctgagtatggttggaatccagcaacagttggtctgattcagtcttctttcttctggggttaccttcttacacaggtaatcttttttccctgattccttaattagggtttctatttttagatgatcaatgtttttttaaatgagtctcactagctttcacatttaaatcaaaagtgtagttgaatcagtggtttgttgatattatagatagctggtggaatttgggcagacactgtaggagggaaaagggttcttggattcggtgttatttggtggtcaatcgctacaattctcactcctgtagctgctaaactcggtcttccttacttgctcgttgttcgtgctttcatgggagttggagaggtttgtgattactcttagtgatgttagatatcagtctcggatttgtgtgtgttgataaggagaagtaagttctcatttgtgttctccagggtgttgcaatgcctgctatgaataatatattgtcgaagtgggttcctgtgcaagagagaagcagatcactcgcgcttgtttacagcggaatgtaccttggatctgtcaccggtttagccttttcgcctttcttgattcatcaatttggatggccttctgtgttttattctttcgggtctcttggaactgtatggttgactctgtggctaactaaggtcagactttttctactgttcttaactatttgtagatcccatatctcattaccattgacgatttgacgtgtgttgttacttgttacaaattataggcagagagttcaccattagaagatccaacattgctccctgaagaaagaaagctaattgcagacaactgtgaaagcaaagagccagtgaagtcgatcccgtggaggctgatattgtcgaaaccaccggtataggctctcat

SEQ ID NO: 149836 - DNA, 1519 bp, Arabidopsis thaliana landsberg
tcgctggctgattccttctttcccaagtcgcagtctccgaatttcgcttggattggacttccaaaattctcaaagaagtccccaagaccagaaacagcaggaacggacgaaccaggaccgtacaagcaaatagcagagcagttcttatgggagtgtgagaacataccggattacaggcacactccagaagtggataagcttctcaacgaagatccagttttcgagaagaaggagaatccgagcacagaagagattgaagctgagcagaaatggtgggagagttttcgagcgagtcctgtggttcagtttatgactcgcgccgaggagattgccgacgatatgaacaagatggagctcgaggataacgacacgccttatcggaaagaagacaaggattactggagagccattcctcatgtcccgggctttgacgggaggcccatgcctaggaaggcgatcaaatcaaaggaagagagtgatgataagttttgggatttcatgaaacagtttctcttcggcctctggggtttccgtcaacgtccttacccgcctggtcgacccattgatgtggctcaggctattggttacaaacggctcgagaagcgctattatgactgtaagtgccttcgtttgcttaaccatagtgtgatatcttggtgaaatgattttgactctcccatgtcatgatgtttctgaatcgttaagggagcatattcaagtgtttctggatcgttaagacattaccgggttgcttcatattgatgttgtttctgtgtttgtgggatttgatccatattctgtgtttatgagttagtaggtggctatcatgattcagtgagaggctctggattccaagctcttgttgttcttaatgttgttaaattgtatagtcatagtttcttgtctatgcgcgagtttatatggttccacattttatcttgtttatgttctgcatgaaggtccaagcttgtgcctgttgttgaattgcaggaatatgatgaaagtggtatgcttttttgtgggttcctttgtgttggatcataaccttttgtttgttctcctatgatttaaaattgtagtcataatgaagactggtggttggtggtataaagaccgacttggccgttctagaggcccttgtgagattataacccttaagacggcttatggagctggaataattgacagagatactttcatttggggcgaggacatggatgaatgggcgcctattcacatggtttacggtttggaacctgcaattgcaacttgggaaggtctgtctatgggataatttgaaatctcggatgaatctgatcattgaagaattacaattttgcctcctatatatatgacttcattgttggttttattggctcgtttctttcttgttcagtgaggcttggtgcagcggcaacggctttcctacacaaactccagaagggaattccaccgtgggttccattaaagggacgagagccaaaaacatacaagcagcttcaaaaagaagctattgaga

SEQ ID NO: 149837 - DNA, 1537 bp, Arabidopsis thaliana landsberg
  unsure (1)..(1537): unsure at all n locations
caacattgattatttctcttctccattgccaccatcaagaagtaacaatggctgaagctttcacaagtttcaccttcacaaatcttcatataccttgttcctgcagtcactcggtacatattattaattatttaatattcttaccaaagacatttaatttcaaaacacatttaagaattgtgtcttgtgttgtagcctaagcagaattcaggaccaaatcatggatattggctatctgtaagtaattttctctaactaagactaagattagaaaaaaaaatctccatattcttgtgaatttacgtcttagaatttgaaaaattagaagaatgttaatgagaagagggaaaggaatttgatgagaggaagcttatgtgtaagaaaggcattgccacatgatttgccattaatggctgtgatggttcaacaaatagaaggaatgcgtgatatcattacagagaaacacgtgtggcatctaagtgataaagctatcaagaatgtttgtaagttaaacacttggggtttcttgagagattttattttctttcttagacttttttttcttcttgttcttatgttttgatattgatcttgatatggcagatatgttctacatcatgttcacttgttggggatgtttgtacttcggttcagcaaaagtatgaaaacaacaactcaaactgaatcttttgatacatttgctgcattgggatcttaatagtactttgtgatattggatcaatacaggaaccattctatgactcagaggagtaccgtggagatggaggggatggaactggatattgggtctatgaaactgtatgtatctgtccctttctagtactattaggaaagaaagaaaaaaacttanaaatgcatacaaattataactagggatgttgcaatggaccgaccaacccgctgtggtcttactagaccctgtggaccagttcagatctagtttgacctcagactatcccaccttggtcttagtaggccatgtagacctgttcagagccggttttgagtactcctccatgtgtctcagcatgcgataaacctccctaaacaaagaaaaataggtggcttttaggttagcgtttaccgttggtatatatgcacccaaaaatatgaatccacaaccttgatcatctaaacgaaagtcacaatctgatagatggtaggtaacattgatccatcctattgatagatcaatcatgcttagtaagtttgagccgggttgggcttgatataataattcaaacgttaacagatctgatggtaggtaacattgatcctaagttgggtcgggctgggcttgctcgggccattgacctttggtatatcatcacagattcacaatgtgtacaactattataagattggatagagttgttattgtgttttgggttatatgatgcagcaagaagacatagaagagaaagcaagagcggacgtatggcgtgaagaacttatcgaagaaattgaacagaaggttggtggcttaagagagcttgaagaagctgttaataagtag

SEQ ID NO: 149838 - DNA, 278 bp, Arabidopsis thaliana landsberg
agattttcatggatatggaggatggttcaagatttacggctgagaaactgcggaagaatctagaggagaatggcattctccttatccggggaaactcatcccggtatgtgtagcatttacgtttacatgtgaaaaatgtttagttttactaaaaggaacacaaattttgattaatttttcaaaactatttatatgtggtatgtgttttcaagatcagaatagttatacatcaccagataacaacaagtgatgtgcattacacattgtcttgctttcag

SEQ ID NO: 149839 - DNA, 722 bp, Arabidopsis thaliana landsberg
aaaagttgaaacagaaatcatctagagacgattaagagaaaactaagaacgataactctcgccttcgattctttttgttgattgaggcgcaagctacctgtaagccttaaccctattccttataagtgtatccatcgatcgatctctttgttatgattcattgatttgtttttctgatttttgtcaatcttaggcacacaatggagaacaatcgagagggaccatactctgttctaacgagagatcaacttaaaggaaatatgaagaagcagatcgccgaaatctctgagatcttctcgttatcaaaacccgatgcgaccgtactcctcatgtttctccgatgggactctcatgaagtttctgagtttttggttgaaaacaacgaaaaagtcttgtcggaatcaggtttgaaaccagtggtagttgatccgaatcaaatttcttcttgtgggatttgctttaagacttgtgatgaggtttatcttgatgatggtgattacttaatctccacgcccttttgctgtcacattttctgcaaatcttgttggagaaagtatcttgaaaagaatttctacttggtggagaaaacccaaactcgaatctcttgtcctcatggagcttgtcaagccgcggttggaccggacacgattcagaagctaaccgtaggtgatcaagagatgtacgtggagtatattctgagatcttacattgagggaaacaag

SEQ ID NO: 149840 - DNA, 2396 bp, Arabidopsis thaliana landsberg
cttgatgcgactgctcaaacagagtcaccggcgattacgatggccggaaacaactcggaatcgagtctctaccaggttttggtggagtggtgtcagagaatggagacgagtcaagcgagactaagagaggatgtcgatgacttattgcttcaggaggagagtcgaaccggtaaggaatcggcgacgggattggagacggaggcggagaaagaggcggaggtagaggtggaagcggaggcggcggattcctgggataatccgacggcgacttgggagagagctgtttctggattctatttcgctgatagtgcgtatcggactttgatggattcaatgggacacgcgattcatgtaacatcagctgcgtctggagaaattacattctggtgagcttgataagttcttcttcttcatctatggtgtttgtagatcaggagcttatagtttttctaaatactgtttcattgaattgtgtgtttaagtagttaaacaaagttatatatagcgattcattgtatatgcaagtggacatttactatttgtttctgagtggagagattcttttattattattcaggagtcgttctgctgagaatctgtaccattggtatgctgaggaagttgttggctacagaactattgatgtgcttgtaaccgaagaataccgtaattcccttactggtatcaggaatagggtgtgccgtggagagacttggactggtcagtttccgtttcagaagaaaactggtgaactatttatggctttggtgactaaaagccctgtgtatgaaaacggtgagctggttggtgttgttactgtctcgagcgatgcaacccttttcaataggatgcatccactaagtaatgagcatcaacaacaagctcgtagtaataatagacatgaatcaaacttgagaaaacatcagtggcacctcccgaggcctcagatcgctgcagcatcacaggttccagttgtcccacaatattcatcagctgttgcttcaaacctggtagatctcacatcatgaatgttcgaagtttctcagtacttttttttatataataattcgtgtgcaacatgaatgattgtttgttttgctgttttctgcacaaaccaagaaggcgtcgaagcttctaccacagagaaatggagatgattccttcaatggaaatcataattcgaggagccgagatgaaaatgttccggttgttgcctccacaactttcgagaagtatggctcactggtaagtcttcgttggctccttagacaagacacttctcattgacatttcttagaacgattattgtctcatgttataagctaaatctgcatatatactagtgtaggcggataagtttttggggaagctgcaaaggaagattactggctgccaaggaaccgaatataatgagcctatcttaagaaacggtataaataaatcagcatgtggcagtggaggtagttctaaggcttcttatgcagttacctgcacggctttcagagacaatggcaatggaaaaccaaaaagggctagagttagaatttcagatgtctatggaaatggagctgagggtttgatacataatggagatcgctttcagtatattgggaacctgggacaaagtaaacctcccagaggactaaaaagtggtttggtgtctggcatgcggggaacaaaaatgtcggacctaaatggtgagatagaagatgcttggaatactcgtcttagtgttgatcccttgccaattcttggagtcaacagcggtaggcaacaaagtcctgtcaaccaaaggaacaatagattagttactgattcgtcatgtgagatacgatgggaagatctacaacttggggaggaggtcggacgaggtgcatttcatttaccaaagtcttacactcgttttcacgttttagatatgcaaattcaatacagatctgtgtcattgatgtttaaatcagattacaagtatttctgatgcgttacattttctcacaggttcatttgctgcggttcatcgtggagtttggaatggatcggtgagttttctgtaatttaagataaaataaggatggttctagtattagttgcacatgggtagctaactaactagtccaatctatttggaccaggatgttgctattaaggtttacttcgatggtgattacaatgcgatgactttaacggagtgcaaaaaggaggtatgtatatttagttctctctgctatgtaagtgtttctagaagttatccgtgccagacaaaaataaatcagttgtgatcaataatatcttcagatcaacatcatgaagaaactgagacatccgaatgtgctattatttatgggagcagtatgcacagaagaaaaatctgccataatcatggaatacatgccaag

SEQ ID NO: 149841 - DNA, 657 bp, Arabidopsis thaliana landsberg
gatgggtactcagggagtgactaaaggtctgtaacttcctccatccaaagcacaaactgaaaacccatttcataaaaatccacattctaatcaaattgtctggtttgcagaatctttgcgtgaccgcggcacatcttcctatccgagagattcttgaaaaagaaaagaaggtttgtctctgttttaaaaatcataataatggttatgattgtggtttttgaaaccatggttttgttgactcgcagcagagaagtgtggcccaatccgaaaaccgagcaatgcctcagttatatagcagtagagacattagacccttgaacatgagtgatttcaaaaccgcacatgatcaggtttgagaaactgaaacatacaaattagtttcaccatttggtctagttttgggatataacggagtgttttttttcttcttattattggaaggtatgtgcgagtgtggcgtctgattcatcgaacatgaatgagctccagcaatggaacgagctctacggagaaggaggctcgaggaagaagacatcactgagttacttcatgtaatgagaaaacagagaggttgtgttttgttagttaatcaatatatatatatatatatatatatatatatattcaaatctctctctaatttatatgttgtacaga

SEQ ID NO: 149842 - DNA, 1158 bp, Arabidopsis thaliana landsberg
caaacgcagcaggcctctccgacggtgagagattccggtgagaacgtcctccgatggcgacaactcaaccatgtcttatcggccaaatgatcgctgttcctcaatttcacatcctcttcagccccagaaattctctaaagccggagctctcgaccaacaaacgcacaaatttctccgtatctatcggtctacgacattccttcgcttcttctatatcaacctgtaaccctaaagccccatctttaagctgtctgcgaaattgcgccgctgttgatggagctgatactagttcgagtgaggataagtgggattgggattgggatcgttggaaccgtcacttctccgagattgaagaagtcgagagcgttgtttctcttctcaaggttctatccatctaaactctgtctactattgatgattttttgttcgattattggttgattatagatttctaaatttggagtcttctagcttatgtaacagtctcaacttaaggatgctgttgaaaaagaagactttgaagaagcagtcaagttgaaacaagctatttcagaagctactgttgatgatgctgtcgctgagatcatgcgccagttacaggtttatatatgtgtgtttttttattacatcaaactcttatgttatcttcttacttatatatgattaacttccttgcagactgcagtaaacgaagagcgttaccatgatgcttccaggttatgtaacgagacaggaagtggactggtaattttgtttaccgtcctttatactttgttctttcttgtttagcttgtaagatattactagacgattcttacacatttgaatcaagaaaataggttacatgtctgtaaactattaaggtagttaaggttagttgaagtaatatatgtttcctgacataagtgatggtttcacctagtcaacttatcaaggattgcttcatggtttcagtgttacccaaatctctagtcaagaatctatgcttttatctagacgatgattgttttagaatttcaatgcatttgtcacgtttctgatgtttatataggtgggttggtgggttggtttacctcgagattctgaggaaccatttggcagaattgtacacataactccaggtgttggtaggtttattggcaagagttacagtccaag

SEQ ID NO: 149843 - DNA, 1012 bp, Arabidopsis thaliana landsberg
gagagatataaaaaacaacaaaattagacgagaaaatatctaagaaaggcgtcggaaaattgcaaacagatagatatagagacgacgaagatgcatccgattaatgttgtggttgcggcgaggatgttagccggaatcagtcaatctaacgccttacaaagcgaggcgattccgtttggatcgcttgagtggatcacttacgccggaatctcttgtttccttgttctcttcgccggaattatgtctggtctcactttagggcttatgtctctcggtctcgttgagctcgagattctccaacggagtggtactccaaaagagaagaaacaatctggtaaattgatccttctctttcgtaattcgtcaccgatcaattgattataaggaattgcttgaattgatatgaatctgtatctgatcatttgactttgtgtgaattttgctgtgattgtggaatttgcttgcgattgattgattttttttctcagctgcgatttttccggttgttcagaaacagcatcagcttttagtgactctgcttctgtttaatgctcttgctatggaggtaattatcttcattcaaagtctctctgactttctatgttcgttgtgatgatgaaaccaggatcttaagaggcttcacttgttgaaaatttgcaggggcttcctatatacttggataagatattcaatgagtatgttgctattattctatccgtcactttcgttctattcgttggagaggtatgctttgatcttctacctttaaagtcttgctaggtttataagcttcatgagatttgaacactgtttttttttcaggttattcctcaagctatatgtactagatatggactagcagtgggagctaatttggtctggcttgttcgtatcttaatggttctatcgtacccgatatcttttcctattgcaaagatgttggattgggtgatgggacacaatgaccctttatttaggcgagctcagttaaaagctcttgtgtgcattcacg

SEQ ID NO: 149844 - DNA, 597 bp, Arabidopsis thaliana landsberg
catcgatatgtgagagatttcatatccatggattacaaagaagacttaagcacattgatagatatgcacattcactaaagttgactcttttgagtaataatgcttccaacagtatcgacgtttgcttccacaggtaaaatctagtatctgtgtcatctctatgtatcaatctagtatctgtgaaatcttaaagtttacttctttctgattataggaattcgtcgcgtgcaattggaatgtgtcctgataatcagtggaagagagtgtccaaagggttaccttgggttgggataatgtcaccttttgactataagattcttgatataagaacatttggtggctcatctaatgtcagcaccgtggagttggttgctaaacaaggtagagtgcttgtgttgttttgtgttttgcaaaattctaaaactaaacaaagtagagtttgtatttgcagagtttttcatataccggattgtgtttttaatcatggggatagtgttactgagtttggcttctagacttagcaaatcagttgcgttttactatgtcggtgcaatgtctattgggattgtcattcttgtaactcttatcattaatcag

SEQ ID NO: 149845 - DNA, 1893 bp, Arabidopsis thaliana landsberg
aagagggaaagaaaatccaatgcaagctcctctttaaagattctatctggataaacacaaaagtaggcttcagagaagaaattgaatctagattcccatatgatctcaagcagagctacacaaccgcatggaaatggtattctaactgctgggttgaatcaagggggtgataaacaagattcaagaaacaataggaaatccactgtgggtaaagacgatcataccatgcaagttatagagaaatgctcaacgataaacaagtcttcatctggaggcagtgcacatttgcgacgatgtaatggacctttaacgaagagattcacatgtgccttttgtcagtgttcagaagacacagaggttgaattcactatctcacattggagtcctagatgtagccctttgttgacttttatcatattattaattggaatgttatgtgaacaggcttcaggagaaatgactcactactacagaggtgaacctgtctctgcggattttaatggtgggtctaaggtcatacatgttcacaaaaactgtgctgaatggtaagaaatctggatagtagtaattatccgctcatgccttttgacatcatttaaaatgcttgaatgacacatgtgcttctgatacaccactgactgaacgtaaaaaactgttttgcatttttcagggctccaaatgtatacttcaacgaccttaccatagtgaatcttgatgtggagttgacaagaagccggagaataagttgcagctgctgtgggcttaaaggcgcagcacttggttgttacaataagagttgcaagaatagttttcatgttacgtgtgcaaaactcataccagaatgcagatgggacaatgtaagtgttgcatatattgtagaagctctatatagtcccttacacagttcttttaacacattttcttatcaacaggtaaaatttgtaatgctatgccctttggatgcatccattaagttgccctgtgaagaggctaattcaaaagacaggaaatgcaagcgtactcctaaagagtatgcaattttatctactgataaggattatgatgtgattccaatatttgaaattagacagctgacaatagatcattgttttctctagaccactgcactctcagcctaaacaagtatctggaaaagctaacatccgtgagctccatatcaagcagttccatggattttccaagaaattggtcttatcttgctcagggctcacagttgaagagaaggtatggatatatctactcttttactatatgcaacactcgagctgaaacttgtatttgatggatggctttgattgcagactgttattgcagaatttgcggaactgtctggagttacgatctcaaaaaactgggagtcaactgttacacatgttattgcatcaatcaatgaaaacggagcctgcaaaaggaccctcaaattcatgatggcaatcttggaggggaaatggatactaaccattgattgtcagtattcttaacccattagcaacgaaacatatatgtttgcaatctaacaatcaacaaattgtctaagtgttgtctatcttttcttgcagggattaaggcgtgtatgaaaaatacaaaatatgtaagcgaggagccatatgagatcactatggatgttcatggaatacgagaaggaccttatcttggaagacaaagagctttgaaaaaggttagcttcgtctctctttgatgctctctatgacacaaccaacttgataataattcatctaagtggtttcattctccgttatgcagaagccaaaactttttagtggacttaagttttacatcatgggagatttcgagcttgcttacaaaggatatcttcaagatctgattgtagcagcaggaggaacaatctag

SEQ ID NO: 149846 - DNA, 966 bp, Arabidopsis thaliana landsberg
atggctgagaaagaaactccagcaatcatacttcaattcgctccattgaacagttccgtcgacgaaggtttctggcatagcttctcctctttgaaactcgacaaactcggaatcgatgattctccgatttcaatcaccggtaaacacacaatcatcgaattaaaaaatcatccaatgcatcgatttttatatattattcgatgagtctatgcattcgagctcttatgatccgtttaggttagagaagcaaaaaaaaaagttgaaaacttgaaaatcctctgttttctgggcaagttgttatgatccgtttaggttagagaagcaaaaaaaaagttgagaactttaaaagcctctgttttgtttagtagagattattcagatttagaatttatgtgcttttttggaactgaaattttcaggtttctatggaccatgtggacatccacaagtctcaaatcatttgactcttttatcagagtcattgcctttagatgaacaatcattgattgctagtactagtcatggaaataggaataagtgtcctgttcctgggattttgtataacaccaataccgttgaaagcttcaataaacttgacaaacaaagtttgctataaagcagaagcaaataaggttaattcaaaacttagctccgtgacttggttttaataggttcttgtctgcaaaagttttaacaatatttgtggtgaaattttaattttgggaggatattcaatcaggaaaagctcttgaagacccttctgtgttatcaagattcctcgttatctcctttgcagaccttaagaaatggagttttcggtattggtttgcgttccctgcgtttgtacttgatcctcctgtaagtttgattgaattaaagccagcttcagagtattttagttctgaagaggctgaatcagtatccgctgcttgtaatgattggcgcgagtcagatttataaccttta

SEQ ID NO: 149847 - DNA, 943 bp, Arabidopsis thaliana landsberg
aagtttgaatcagtcaactgtctcaatggctagaaagaaacgcattcatgctcaggtttgttcctccttgtctactcaacatctttatgctgaaatggtaaaaggacaatggcattaaagtttaagatatttgtctattaaagaataagaataattactacaattaggccccagtgattgtgttacagttactaccatgcctagctactcagctcttggtcatctggattgacagctcgagaaattgaaagtggttgtgggtagaagatgaatcttcttacggaaaagataccttagattaaggcccacatttttggtggtctttataaaaagccgattggacttcagagagattgatttcgtattgtttgcacgtaaaagtagaaatagctttctggactttatatctactgcttagtgatagtagccgcttcttgtctctctggtactatagcaacaaaaagtcactatgttctctagacacactaacagttctgtgaatactatgcaatcacaattatagtagttttcttgaaaaaacctgcatggtcctttaatctctctgtaactgcttgttgatatatgcacagattgcctaattctgttaaagtgtcttgtcttgtagttcaatgatttacaagaatgttacctccaaaagcggcgtcagttggcagaccaaccaaatagtaaacaagaaaatgataagagtgtagtacggagggaaggctatagcaacggccttgcagattttcaatctgtgttgactaccttcactcgctacaggtagaggagtgactatcccttttcaatcggtctagccgtacataaagagtgttttcgaattagttggggttttaattgcactctttattcacagtcgtctaagagttatagcagaaatccggcatggggatatatttcattcagccaacattgtatcaag

SEQ ID NO: 149848 - DNA, 246 bp, Arabidopsis thaliana landsberg
cattttgttttttatgggtggtttgtgaaattgttgtgaggatataaagatttcaattttgtttgaaaatggaaactgaggatgtgcttgacataccagcttcaagcaactttggctctgaagtaaagaaaaatagccttgaatctgggaatgggtcacctgaggctaattctttagttggtaatgatgagaatgtgaaaggaaatttagatttggatttaacagaagaaaatttgagaattggtg

SEQ ID NO: 149849 - DNA, 564 bp, Arabidopsis thaliana landsberg
atggaggaagaaaaagcggcagcttactacgacgagctcacgcgtaaaggagaaggagctgctcgcttcaagcaaggtctcggcttctccaccggagccaacgctgttccggagagaggatcggcgatcgcatcgtcgtcttcgtttctcaaccaattcgtcaaggcttctaaccatactaaatccactgataacaaggattccgagatccggtccatcagagataaattgaagaagaaacctgaagatcctagggtgccggagaggagctatagagagtcgagtgaacggcgtcgttatcggagtagagagagggatgagagagataaaagccatagaaggagaagcaggagttcagagagacgtagtagttatgtggatagagagagacggagaagcaggagcaggagtgcagagaggcgtaataggtacggggatagagagagccggaggaggagtaaccgaagcagaagtttgtcgccgaggagagagcggaggagcagagaagatgttaaggagaagaagcctgattactcgcggttaatcaaaggctacgatgagatg

SEQ ID NO: 149850 - DNA, 3933 bp, Arabidopsis thaliana landsberg
gtctctgacttttacaaacgtccaacactagaaagcccttcaaaacttgctctagaggaaaatgcgttcttgtttgaaaaccatggtgctcagttgcttggccagattaagcgtggttgctgtcgagctcgggcaattttgttcaaagttctagctgatactgtaggacttgaaagtcggctggtggtggtaagcctcagtttctcatatttcaatttttttctttacctacatttatgatctagatgattggatcttatgctatttgtctcttacaaatcaacttggtttcccttttgattcacatgtgcagggtttgcctagtgatgggactgtgaattgcatggactctaacaaacacatgtctgttatagttgtgctgaattccgttgaactactagtcgatcttattcggtttcctggtcagttggtaccgcgatcagccaaggcaattttcatgtcacacatctcgcctgctggagagagtgattctgcagaaaacgactcttgtgactcacctttggagccaaatagtcctttatatgagagaagagatcctgagaggtcggcttccgttgtgtgatttttctttctaaagcatattacagtaagatcattctaaaacaactcttgtgataagcgtcccctagagtgatatcgtttcctctgctacagtacagaaaaagatgaaaatcttcaattttatcggaagttagaaggatatccaaatgcatctggttcatcactgcgtagtttgatgctcagaccttctacagctattgaaaggaaattgaggtaaatattacatatatatttctgacaagttgtataatggaatcagtacaatgattggtataatagaaatgtgcttttcttccttcagcaacacctcgcatagtgaaccaaatgttgctactgtattctggaggcgtagccgcagaaaagtaattgctgaacagagaacagctagctcaaggtttttccgtaccctttctggcttgtattatagttaatgaaaaagaaaataatacattggcacgacctcttgttgtctttagatacagtaatgagatggaacatataaaattatgtttctcttctttttgctgattctatatttaaatctcttgattagcgattctgttatctgaagtgtgcctttcaagagctaccctttttttctctatacctaactgatgatagttggccatttgttacatttgcagcccagaacacccatctatgcgacgtggacgatcaatgttgagcactggtaggaattcttttagggattacactggtgaagcatcatctccttcaaggtaactcatttttacattagtgcatgcgaaaattttcagtatgccgctcctatcatatacattccagtattagttaagttgcttatacaagtctgcatgtatatatttgattggctgtgcaagcaattttttaatattctctagctttcaaacagttcatccacatcagaaattcgtaaaactagacggcgaagttttaggatcacaccagaaattggcgatgacattgcaaggttggtattctcatccatgtgcattgtttctactttcatcgtttagcagtttttttctatcattttcaccttgcatttaaagagctctatattggagtttattctgtaaatctagttggtaaggtatttttaaaatctacaatcatctgagcagctgctagatcacatgaaagtatggcatgagtcatctcgaatgcaaaactgctatctccaaacttctagatgcttaggttaggtgtctgtaagatggttatatgataaacatggaactatatatttactttgatagtcatagaagctgtaagccatttgatggtactccttttaattttgtaataatgatactgagattcgtgagaactaattaagaacagtgattttgtgatttgcttgtgtattgactctgatgttacaaattattgaagcgctgtacgagaaatgtatgagaaatcaaagcaaaaccgtctcttgcagggtcgagaggatgaaaacagctcagttatcgataacaacgtaagttttggctctgttagtaagagtgattgttttgttgtgttagttcctttctcattgtataaccagtctaaaagttctgagtttcttctgaagttcactgctctattagctcttacctctaaatttcttgtgatttttgtttgtgctttctcaggtgtctggtctccatcttgatgatgagttaaattctaagaagacaatgtcattgccctcatctccccatgcttacaggtgtcaaacatttggacgaagagggccttcagaatttgccgtgaaggatacatggaataaagtggttgagtcttccacattgcagaatcagcctttattaccctatcaagaatgggacattgacttctcagagctgactgttggaactcgggtggggattggtaagctgctctaaatttactactcggtgcaaatcttcttttaatcacggacgcatgatccttctgagaccttactatagataaatgagctatgaggcttatttagtatgccatatcgaacgtcttttgcaaattcaagaacgtctctgttatgttgatattctgtttttccatgttgactaaactcaaaacttttatgtaaagatacattggcttatattttgtatctaggtttttttggtgaagtttttcgtggagtatggaatgggacagatgttgcaatcaaattgtttctggagcaagatcttactgccgaaaacatggaagatttctgcaatgagatatcaattctcaggtatcttgttaccaaattcttggtcattcttagatcatacctgtgtacctctactaatggttttgcatgtttcctcgggcatctgcggttctctcttcagccgtgttcgccacccaaatggtaattttcttttttttctctcgccttttctcttgtcatttttatcaagtaatttgcggagacatgtctgatattgttatctttatttacttttgtcagataattcgtgacttgtaatctatgtatttgcagttgtactatttttgggtgcatgcacaaaacctccacgcttatccatgatcacggagtacatggagctgggatcgttgtattatttgatccacatgagtggtcagaagaagaaacttagctggcacagaaggctcaggatgcttagagacatctgcaggtatttaagctaccctgcatagctcccttgattatatgttttaagctacatatgcttatctcatgctgttttgtatttcttatgggatgcataaggggtttgatgtgcatacaccggatgaagatagtccaccgcgacctaaagagtgccaactgtctagtggacaaacattggacagtcaagatctgtgattttgggctgtcaagaataatgactgatgaaaacatgaaggacacttcatctgctgggacaccagagtggatggctccagagctcattcgcaacaggccttttacagagaaatgtgatatctttagtcttggggtcataatgtgggaactttcaactttacgtaaaccatgggaaggagttccacctgagaaggtataatatgctgtgccatgatttctctagagatgtgatatctttagtcttgtgattacacttaatgaaatttgcttcttaggttgtctttgctgttgcacatgaagggtcacgtttggagattcctgatggtccactcagcaaactaattgcaggtttagtgttgttgaataccatgtttcttgaacttttttgtttattctcttatatttctcaactgcttcagtctgagttaaagttaaccacaatttctgtgcagattgttgggcagagcctgaagaacgcccaaattgtgaagagatacttagaggcttactcgatt

SEQ ID NO: 149851 - DNA, 265 bp, Arabidopsis thaliana landsberg; identical to SEQ ID NO: 39296

SEQ ID NO: 149852 - DNA, 178 bp, Arabidopsis thaliana landsberg
aagcatacaaagcagaagtcatcttcttcccccgtcactctctctctctctctccagggtttgaggattcaggagagatcgaagaggaagagaagaggacgatggtggctcagcgttgcagaagccaagagaagagagttaattgagttatcggtggtggggcgttgaatctgagtgg

SEQ ID NO: 149853 - DNA, 2078 bp, Arabidopsis thaliana landsberg
atgaatcctgcacagtcaaaacacatttcaacttctgaaatcagttcagaaaatggaactctgatgtcagatactccaagagatcttcacacaggatacgggagcctctcagcctcatcttgtctggaagacggagtgaccaaccctgatctggctgagatatcatcatattctggacaggaggatccacaaaccatgtctattgtttcagatgatagtagtgaccctgaggtaccaattcctgatggtacttgttttgcaggtgatgtcgatcgcgataaccagactggcctgaataataaggccattgagaccgtgccccagaaagaattggaaactattagtgatccgcaggagagtcttttaggtacagaagaatgtctttcatctgagtattgcttacagatacagaaccaaaggcaagaaagtccatcagaaacagggtcagcaaattcaagaacatcatcagacgagtctcctcctacacaaaatggatctgttggtgttcaaagttcacctttagatgtttttccttcaagcataactgaaatagaagctcttcatgcaccataccaggaaattttcacatcattaaatgatcatatctctgagtctgttctttccaagggtctgactgatgaagaagatttcttgaacgtatcccctgagtccatactacccctctccacgtccctccatgaaacacctcaggcaaatccggagataacacctccgcttccgcctcttcctccgacacaatggtggatggggaagctggttgaatcaaccgaaatgccatcacttgcaggcagtggaaacaacagtttcaacatccagagggatgaaaacacacagaatggatcagttcaagcgaacgaggcacaatatccatcagaagtgtcggttacagatggtgaaaaccataattttcatatttatacagaagaatctaaagcaaccgaggaacagtctccttcaggagtcaatgggacaagcgacacctatatggaaagtaaacacaagtgtttaaatagaactccggaggattcattttctttggcagaatcggcccaaggcttagaagctgactggaggactgaagcaatggcacttgaatggtttagtcagaacttaagagagcataacaatccccaccctgcaaagttagaagaggaagagcctcaggttgatcacccactagaaaaacctggacaaaccaaatttcgacaaaccttgcgagacaataactcatataatcagaatcagaaagctggaaagcttaaaagagacgaggatacgcttgttattggcattgacagaagcatggttagtacttcaatggcttatttttctcttctctctctcacgcgttaatcatgagactcaatttgtgtttgattacagttgaggaaagtatctgaagggaacaggacacacgttggagctcgagtggacgagaatgattcactactagagatcatacggagcaaggtcaaatcaccatttcatcttttccttttcactttattcagttttctattatagaacatttaacttgaaaaaaactttagcagtcgttcaacctgagaccagcagatgcctcagggagaccaaactttcaagtagctgttcccaaaaccaacttgaaggtggctgcaattctagagaaagccaacactcttcgccaggtctctccctctctccttcttggttaaatttggacacttgatataataatctgttgcacaaagaaaaagatataataatcttggggatcgataaagtggttttgtgacatacatataaataggcaatggcgggaagtgacgacgagcacgattcagatagctggagcgagtgagtcgttgaatcaaatctgcaggtaacaaacatatagatcacactctgtatagaagaattctcacattgtatgtattctcacaagtaatgtttttattgctgtatttttgacacattgtaagtcactctgtttttttcccctttatatgtacacccaattttaccctcttttaaagggaatcaatccagttgatgtttcagcatatttgcatgtttga

SEQ ID NO: 149854 - DNA, 919 bp, Arabidopsis thaliana landsberg
ctcatcggttttgttacaaatgcagaaaggagtatgagagactacgtaggcagtgcaaacggcttcaaaaacacaataacgggactcgtaagttatacaacggcagtgaaactatccaagatgagtatgattggcctcgagttcaagacactgacagttcatgttctgatgaagttgttagtgcccgtgagtctctctctagtgacgaagacattactgaagatattgggtatatgagtgaggtttcatgtacagttgagagagacgacggtagtagttcaagacgaatcaccaatgctactatctctacacttaattccgagtcatcagattcagattcttcagatgagagtgaagtggtacaggtctttcaatcttctgctactccggatgtgaatagtacttatccagccaggtcatctattccccggacagaagaggattttgtgacgtggcagcgtattatccgtctagacgccgtgcgtgctgactcagagtggacctcctattctccatcccaggcagttatatcggaggatagagcatgtcgtgccgctgaggcggttgggttgaaagattacaatcacctggaaccgtacaaaatctttcaagctgcacggctagttgctgttcttgaagcttatgctttgtatgaccctgacattggatattgccaaggaatgagtgatcttctctctcctatactctctgtaatccctgatgaccatgaagccttttggtgtttcgtcgggttcatgaagaaagctcgtcacaatttccagacttgacgaggttggaatcagaagacaactcaacatagtctcaaagattatcaaatccaaagactcacaactctacaagcatcttgagaaagtcaaggctgaagactgtttctttgtttacagaatggttcttgtta

SEQ ID NO: 149855 - DNA, 936 bp, Arabidopsis thaliana landsberg
atgtattggaatagagagtacgcagatggtgaagatggtgagatgtcgtggttcaacgctggtgtgggaattggtcttggtgtctgtgtaggtttttggcattggggttggcctgctggttcgcgcctatcaatcaaccaccaaaaaaatcagaaggaggattatctagtttcattcaaattgcctactctctctctctccctctaggctctaactccaatccgttgcacatcacttttgactgcagaactctaagctatatagtctaagctaatactgctgtgtagtgtaatttttgttttatgtacttttttttatctctttgtgccttcaaattttgaaagaaatcattttcccttcttcttgtgtttggtgagattcagattgaaagaaacaaagcttgttgctggtaatgtgaatcttgttttctgcttcctgtaaataaaatgcttatgagtgtaaagagtttttggattcacttacaagccttgcaagagttactaatacacacaaaccctctttattttaatcaatgctatgtctaaatcatacaacctctctacttagcatcaagagctaaggttagtccatttcaaaagggttggttttaataatacattgccttcagaaccagtcaagggtggttttggattggctcaggggcaatctcagctccagaaaacccgttgctcgcgtgcagctggttattgttactgtgacccaatccccaaaagttagcagttttaacatcgtcttggttcatttgcttggagaactcttcatagttatactgcaacaaagctttccctccaaattcggttgggagattttcctcgtcgaaaaatgtgctcataagctccacgctttccgagttctttgggtaaacaaacttcaccttgacgaatgtctttgcatcaatgaagtacttcacaatct

SEQ ID NO: 149856 - DNA, 154 bp, Arabidopsis thaliana landsberg
ctcacaaaccaaaagcccgttaggaggaaattacaaaaatgtcctcctaccgcagactcgacgagcatgagcaagcgaaacttgaggcaagtcggaagacaaagaagagaattgccatcatcgctatatcttccatcgttctcgtctgcattgt

SEQ ID NO: 149857 - DNA, 1887 bp, Arabidopsis thaliana landsberg
aatcaacaagaacgctttgagaactcagaacttcggaatctgaacaaccaccttaggtctgaaaatcagcggttacgagaagctattcatcaagccttatgccctaagtgtggaggccaaactgcaattggcgaaatgaccttcgaagagcaccatcttcgcatcctcaacgctcgtttgactgaagaggtactagatttgaactagagcatttctattatgtaaatgtaaatgttcataacaattgcacattgactatttcaatgaatatgaaagtaacacttcaaaaatgattaaacaagttgtatttcttgttttgtgggttatagatcaagcaactttccgtgacagcggaaaagatatcaaggcttacggggataccagtaaggagccatccccgtgtgtctcctcctaatcctcctccaaatttcgagttcgggatgggatctaagggaaatgtcggaaaccactcgagggaaaccactggacctgcagatgctaataccaagccgatcatcatggagttggcatttggagccatggaggagttcttggtgatggctcaagtggctgaaccactgtggatgggaggatttaatggcactagcttagctttgaacttggatgaatacgaaaagacgtttcgcacgggtctcggtcctagacttggcgggtttcgaaccgaggcatccagggaaactgcactcgtggcaatgtgtcctactggcattgttgaaatgctcatgcaagaggtaaattaatcaatcaaattatatgatcataattaatccttttctatagtatactataacatatattaggtcaggtgtgtaattaatgacctgtatttgcagaatctgtggtcaacaatgtttgccggaattgttggtagagccaggactcatgaacagataatggctgatgctgctggaaacttcaatggaaatctccaaatagtaagtcttctacactaatatagagttatacaaagaaaaaaaccaatacatgtttgatatatataagtttaaccaattaatattgttcttattcatagatgagtgctgagtaccaagtgctttccccgctagtcacaacccgcgaaagctacttcgtccgctactgtaagcaacaaggagagggtttgtgggcggtggtcgatatttccatcgaccatctcctcccaaacatcaacctaaaatgtcgccgccgaccctctggatgtctgattcaagaaatgcatagtggttactccaaggtatgtaacttattgttacattatggttatttttgtgtatcatcatatagtttatattttaaatgatgtttttttttttttttttggtttgaaaaaggttacatgggtggaacatgtggaagtagatgatgcaggaagttacagcatctttgagaaattaatctgtactggtcaagcttttgctgctaaccgctgggttggtacattggtacgccagtgtgagcggatatctagcatcttgtcgacagattttcaatctgtcgattccggtgatcacataagtaaactcattaccaaattttgcttcatatggaaaatgttttctctgttttcttttcttaaacgttttgtgatgttttgcagcgctaactaaccatggaaagatgagcatgctgaagatagctgagcggattgcgagaaccttctttgctggaatgaccaatgcgacgggttctacaatattttctggtgttgaaggagaagatatcagagtgatgacaatgaagagcgtgaatgatccaggaaagcctcccggtgtcattatttgtgcagccacttccttttggcttcctgctcctcctaacactgtttttgacttcctcagagaggctactcaccgacacaatgtatac

SEQ ID NO: 149858 - DNA, 3612 bp, Arabidopsis thaliana landsberg
atatcaagatgcagtggcagacgcagtagaactcttgctgagtctcaattgtatccataaagataataaaatttgtatatttcctctttcctctgagattcctttgtctgatcgtgaacttgtagtagtgttttcgtgatagaaaattttcaaagttaatgtgcatacactagctagtgaagaagaagaagactaactaagaatggaaggaacttgttttctccgtggacaacctctcacaacaataccctctcttcccagcagaaaagggtttcttctccaaagatggaagaccaatcggattttcaggttttcaggttttaagaatcactcggtttctggaaagtcgaggtctttcgatcttagcctcagagcttcaggtactactaaaaagtttcaagctttttgattacactacttctgcatcttttggtttgactttgtttgcttttcgtgaaatgggactttgctcgaacgtgattcgcttcttctcttaacactttatctgtgtcttgtttttgctgatggtttctgcaatgttgtcgtttcccaagtctttaattctagtttcaaagttctcatcttttcaaccttttgatcagacaccagtagtctcattataatttttggcgcctgaagcgctagctttactgcaacatttctggtattgattatctggaattcatagatttttactcatttccctacttgttattgaacaaaggtcccattagagcaagctctgtagtaacagaagcaagccctaccaacttaaattccaaagaagaccttgtctttgtagccggtgctactggtaaagttggttctagaactgtgaggtcagtttcttgcttctttaagtttgaatgataattcacaatgctggttggttgaactgtcgaagtgtcctatcaatgtcgcctttcatacagagagctactgaagctgggatttcgggttagagctggagttcgaagtgctcagagagcaggaagtcttgtgcaagtatggcttactttgattctgaatatttgctataagtgtttcatcattttggtgatgtttatccgcaattgatactttgcagagtgttaaggaaatgaagctccagaacacagatgaaggaactcaacgtaagaacaaaatgttttgatttacttacaatgattttgttgtagaaaagtaacaggcagtgtctgtgtctttagcccagctgtagaaaagcttgaaattgtggagtgtgacttggagaagaaagattcaatacagcccgcattgggaaatgcatcggtgattatatgctgtattggtgctagcgagaaagagatctccgatattaccggtccttacaggatcgattacctagccaccaaaaaccttgttgatgctggtaagacaaaaatagcttaaagcggtttatttttccattctctctttcttgtttcatcattgcttcttgtggtattatgagcagcaacatcagcaaaagttaataacttcattttggtgacatccttggggacaaataaatttggatttcccgctgcgattctcaagtaagtctgtaatgtttttctttcattacacacttttggtcagaacagcccataaaacttaatggcatgttcttgttatatgacttcttctaaacacctcgtttgtgaagcctattctggggagttctttgctggaagagaaaagctgaagaagcattgattgaaagcggtcttaattacgcagtgagtagttcacaaaataaaataaaccaaacttacagtttcacagactctttcgattgtatcacatcttagaattgtctttccatcttatttcatcagatagttagacctggaggaatggagagaccgactgatgcatacaaagaaactcataatctcactcttgctctagacgatacattgtttggtggtcaggtctcaaatctccaggtaataatattttccctcgtctctgacagagtgatatgaccagattatgaagaagagctttaagattttgtggttttctgcttccttgttattgatctccaggttgcagagttgcttgcttgcatggcaaagaatcctcaactttctttctctaagattgtggaagtggttgctgaaacaactgcaccattaactccaattgaaaagcttcttgaaaagattccttccaaacggccttatgtccctccaccgaaggttagttacagtatattgctttcatctcctctcttttcgatcttgattatcgctctcttgtgataagatagtttatctttatttatctgcatttcggttgtggacaggcatcagttgcaaccaaagaggtcaaaccagtccctactaagcctgtcactcaagaaccaacagctcctaaagaggatgaagcacctccaaaagaaaaaaatgtgaaacctaggccgctgtctccttatgcctcgtaagaaaacttgtttctcaaccgcaaaaaaataatcaaatatgtaactaaaatgacctattggcatgacattgattgttttcgatttgtcttgtttctttttttttggtgaatgtgatatatatagctacgaagacttgaaacctccaacatctcctattccaaattcgaccacatcggtcagtcctgccaaatctaaggaggtagatgccactcaggttcctgttgaggccaatgtagtgccagtgccagatagtacctcaaatgtcccagtagtagaagtaaagcaagttgaggaaaagaaagagaggcctctttccccttatgcccggtaaaaccttattgtctttgcgactttattatattcaggagtcacagtttgagtaataaatatgtgagaaggtaatgatatcgaaagtttgatggtcttttacttggccgttttatgatgcagctatgagaacctaaaaccaccctcatcgccctctcctacagcttcgagtaccagaaagagtgattctttgtcgcctggtccaaccgattctgatactgataaaagctcaacagttgcaaaaactgtcactgagacggcagttgcaacaagtgtcactgagacctcagttgcaacaagtgtacctgagacagcagttgcaacaagtgtcaaagagacagcagcaccagccacatcaaaaatgaggcctctttctccttatgcaatgtaacaaatcttcctcttatgttatttagttcctctataaatatatcaaattctattgtggtccgatttttcctcaatgcatctacactgtcttttgcagttacgcagacctgaaaccaccaacctcaccaactcttgcatcaacaggtcccaaggaagcagcatctgtagaagacaactcagagttacctggaggcaataatgatgtgctgaaaacagttgatggaaatctgtaagtatcttgaagccagatttacaaagtgtgtgtagactttcgttaaggaatcgatcaatacaatatcccgggttttttgcttgttgttcaggaacacaattccaccttctacaccggaagcagtacctgttgttagcagtgcgatagacacttcccttgcttcaggagacaatacagctcagccaaagccaaggcctttatcaccttacacaat

SEQ ID NO: 149859 - DNA, 492 bp, Arabidopsis thaliana landsberg
atgcttaacattgaatgtcttcaaggtacctgtccagctggcgatttgtgttcaaatcagcaggtataatgtcttgtttgcaagcgaaagggttacattcacagtcagttatatcattctcaatcttttggctcatatttctgcagtttcaaaaacggaagtatgttaagtttgagagattccaatccggtaagaagggttatggcctgagattgctcgaggatgtacgagaggggcaattcctaattgaatatgttggagaggtgtgtttgaaatgatctttcaactcttggtggatgtgatcaactgtagattggctttttcagcctctatttttttccttatctgtgtgttttattaatacatgcgtataacttgtgtttatttataacaggtgcttgatatgcaatcctatgagactcgccaaaaagaatatgctttcaagggtcagaaacatttctatttcatgacactaaatgggaatgaggtaat

SEQ ID NO: 149860 - DNA, 880 bp, Arabidopsis thaliana landsberg
ttttattattctattttctgtacaggtgatattgaatctatgccctttattgaggcccttggtcaattctcgtataaagttggtgagcggtgctctaatttatattaacttttgaagattcagtaattttcttaggctattgcttatcggcttcatcaccgcatctgtcttttgttcttaggacctggtaatttctgcttggttcatgtcagccttgtgcctgttctcagtgttgttggtgaacaggtaatcgtctatatagttgatatcttccattgagattctattttattagtttgtaacgacggagatatgagcctatattgcagaagacgaagccaacccagcatagtgtgcgaggcctcaggagccttggtttgacaccaaatatcctagcatgtcgcagcacgaaggtaatgggcgctccaatattgtcatgtcctttaagtgttgatgttagctatggtttttggtttttaatcttatcagttcttgttttgtaacaggcacttgaagaaaatgtcaagacaaaactatctcaattttgccatgtgccggtatatcttgttaaatttttggttcttatttgcgcttcttagcctaggaaggtcagatttctcatcaaaagacccctgtccgagtaaacatttctgtctgctttcctatggtttcccaggaagtgaatatagtaacgctctatgatgttccaaatatttggcacgttcctctgcttttaagggtaagtacatttcagttgaatagtttcttactaaaatctaatgagcttgttcctatgctggattttttctcttatcattcttttggtgttaacttctcttcaataggatcaaaaagctcatgaagcgatcctaagagagtt

SEQ ID NO: 149861 - DNA, 1088 bp, Arabidopsis thaliana landsberg
  unsure (1)..(1088): unsure at all n locations
accactacaaaacatcnccatgcatggactctaaaggtgatcctattatggtgcgtttgatgaagcttttcaattccgttgatgatttctcggatcatttgtggagagatgctcaagaacggagtgggttgatgagtggtatgagttcagtggatagtaagatgatgcagaagctaaagtttatatgcaagaaatctgttgaacaagccaaacaccttgctactatttatgagccatacactttctatggtggaaggtaagacagaactcattaacattctaattcttagagcagacaaaaccggtacccgcaaagttttcatcttttttttttggtttcttttacagatttgataacagcaatacacagagattaatggagaatatgtcagaggacgagaagagagaatttggatttgatgttggaagcattaactggacggactacattacaaacgttcacattcccggtttaagaaggcatgtcttgaaaggaagagcttaactttgaatctcactaaaccagaccaaacagaatcgatcccttcttttatctttttatctttttcttttttcattacgtgtaatcgtgttgtgtctaatatatcagtttgatttgtaataatttgaaaaaaaccggaaatgttgttatctttaagtttgcccaaaatctatagtcatgttcgattcaagacaaagtttaaagttacaacttgtaaaaatagcatagtgtctaatgtaaacgtatcttaaacataattattaaatgttgaagttagtaacatacaaatattaatgaataaatgtttaatcaattaaataccctttagtgattgtcctataaaatctcttgtttcttgtttcatgtcatcaatcttacatctaaaactaaaagtattcttacatccaaaaaaacaaagatgacaaagactcttctcatggttacgctcgtgtctatagtaatgttttacatggctcgtccaattttctcccaagaaattgatccatattcgctagaggtgctagaagatgtggccttatctccatcttcaaagtttaatatttacgttgaagctcccgatgaagct

SEQ ID NO: 149862 - DNA, 1165 bp, Arabidopsis thaliana landsberg
ccaaaatttgttggagaacgaacactctcgagacggaatcgatggcgaattctcagacggtgatggctatgatcaggttggctagacctcctttccgcaacaatcacgataaggttgctttcgctattcactcttctttcgtcgcttccggttacatcctcaccgccaccggacggcctgctttcgccgacgaggctctctcttcgtcttctcagagttagtattgattccgtttagttgtttttctgattttttctagggtttaggtttctgattttgttcgattttggaatttttagatgatgttggaatcgaaggatggaacgaattcgagggagagtatgcgtttgtctatgcgaatccgaagaaagggtcaaagaaaattctggttaagtgtttggcgatggatgataaacttcttgttgatgccatagctgatggtggagcagaacctgctcatcttgagattaagtaagtttctctttatttgtgctcgattctgattctttttgtgcaaatctagtaagaattttctggttgtttgtgcagagttggggattatgctgaggaaagcaatgagggggattactctgcgcagttcaagaatttggataagttagtgactgatttgcagagtgagattatcgataagcttgatggaaaaccaaaacctgttgcttcgagagcacagtccaggtaatttcccttattaagcaccaagaatttgatgcctcttagtgtttgatcattgggacttgcgacgaacatatgattgtagcttgtattgtcactgaactgtattggcgatgtaaacttagatttgctcattcgtatagtctttttgacagagttttaaacacactgaaataatgtgcagcagagtctctactaattttgagtctctcttttaatgaactaggttttgatttggtacatgtagtctgttctcattgtggaacttcgttttgtggaggcatttgttaattggaccagaatgatatttgtttcctaatactagaagtgtattctgagatctccattgtttatcatttgttgcttgcagctctgagactaatgaagagcctagatattacgatgatacgcctaatccattaggccctcagattcacccctcagggtatacatcactttcccctcttatgtg

SEQ ID NO: 149863 - DNA, 1467 bp, Arabidopsis thaliana landsberg
atggatgtgaagaaaccaacccaaactgttgatggctatgatgatgatgaggcttacagggagaggaagaagaaggacgagcgatcatcttcatattcattttctgcagctattaacagcaatgtgtatttgtctaactacccttgtagaagggtctctagtagcacccagtgttcctcaccttgtgtggcttaggaaaaaagaagcttacgctttctcaatatatttagtagctcctttggtttttattctcaacccaacactgaaaacacaaacttcagttcagtgtgtgggggcgtcattcatatccaatttttgattttctttactgtttttatgtctgtttttttgtggttatctttttttcttgcgcaaattatgtagatttggatgtgtttgttccaatttgcttcttgggacaaaaatgttggaaatcctttcgaatgtaatcatacgtacgcatagaattgaataataagtgaataaatatagaattgaaaggttcttaaaatattccttagcatttcctatttatctgaaaacatgcaacacacaaagacaaagtcaggacaagtcataatgagtaattgcttacgtggctaattttacatgattcacgacaaaagggagcggcctagaggcgcgtatcacacacgcgcttccacttaaaagctgacgtggtcaattggctatctgacattctatttacccattttctccctttctttcctctatattcacgatcctgccattgtacacccaatcatacgctcctgagatcctcatgacttgttcttaccgtactccgcgagacatgcgattgatgattcttgactgtattcattgagaaaaactgttcgcaaaaccttgagcttcatcatcgcccattactcacctttcagtttcagatgcccaagcaaaaagctccaaggaagcagctcaagtcctataaactcaaacacatcaacaagagtattcaaggtacgtctgacttgttcatcctcaatttgaaattcgtggatattgaaagtgaatcgttcgatgttgttttgtggttaaaaagagggagatgctgtgttgatgcggtcgtcggagcctggaaaaccgtcgtacgtagcgagggtagaggcgatcgagacggacgcgcgtggatcgcacgcgaaagttcgtgtgaggtggtattatcgccctgaggaatctatcggagggaggagacaattccatggagccaaggaggtttttctctctgaccacttcgattttcaaagcgccgatacgattgaaggaaagtgtaaggttcacagtttcagtagctacaccaaacttgactctgttggaaacgacgacttcttctgtcgtttcgagtacaattccactaccggcgcgtttgatcctgacagagtcaccgtgtatgtgttcctacgactctctgttactttattcgagaagaaaatactgattgaatga

SEQ ID NO: 149864 - DNA, 795 bp, Arabidopsis thaliana landsberg
ctcaggaagaatctagttgcggttatcttcagcccaaagagtaaagacccatccatccgttgctgaatctgctgctttgatcgaaaatgacgtcgtcctctccaacacagcgtactcacgtctcaattcctcctgaaccaggtccctttattcttcttcaatccctcaatttcctgattcttaactcagactttgataattcgttacttatcgctgttttcattttaccctaagcgatttgctctatcccttcaaattcccccgaagaattttgtgttattacgcctttgaatcaatcaattaaattattaagcaattaaatgcttaatttaacttcatttctgatccaaatgtctgtttagtcatcaaatatttgttattaatgcatcatatttcttcagattagtgatttgaaatgtcttatggaactgtagaatgcatgagttttgattagatcatttgcagtatcactcttttgcaatttggattgtgtactaaactatcaattgttagttagtttacatttgtgttatgcaagtactgtagtagatattgtcatgaatctcttgtctcatgtttgagtttttcgcttcaggaggaaggtcgccgacacaagaagctaatgagccaccagttccgatttacattgtgacggatccgtttcaacttcctgctgatttcctaaacccttctcctgaaaagaaattggttatcggttttgactgtgagggtgttgacctctgccgacatgggaaactttgtatcatgcaggtgtgaccctttttttgtatgatt

SEQ ID NO: 149865 - DNA, 1291 bp, Arabidopsis thaliana landsberg
atgtgggaaaatttcagtcatgtcgctatggatgtgggaaatattgatcaggtaaatgcagctattaatttataactttaatattctactcttgtctaaaaacagcaactgtcacttccccgtatatttgttttattttagcttaggagttaaacaaattggcttcatctttgtgtttttttctcttccaggcctttgaagctatacaacagatactgaaaatgagcaaaaacaagagggttgatgttgttttattggaccgtataatgacagagttagaaaagaggaattcagcatgtaagtcatcatcttcatcgactgaaaccgaagcttcttcagatgaatcaacagaaacaaaaccatgtactgcaacaccagctgaaactcaacgccagctagaattacttgggaaagttattcagcaggttagcaaaacatttcaactagtattatctctgtattgtctcattctccgagtgataactcttgaggatgcatttgatatgtagctttgtatagtccctttatgtgattccttcatttgattatttcttttatagattgtcaaaacagaaagtacagcagaaatctgggggttatatgcaagatggagtagaatcaaaggagatcttacggtatgcagcgaggcactgttaaagcaagtgcgatcatatcaggtatctaataatgactgatgatttaccaaagccactcttttatcagtgagcagtatttgatgacatatcgatatctctgccagggatcagaagtgtggaaagacaaagagcgtttcaagaagtttgcaagagcatcattggaactttgtagagtgtatatggagatctcagcttccataggaagcaaacgagaactgtttactgctgagatgcatttgaagaacacaatcaaacaagtaacaaaccaaacttatcattaattaatccccacaatacttactaagctttttgatcagaatcaataaaaatggctgacatatgtatgtgtaggctacagtgagcttcttggacagtgaagaattgaaggaacttgaaagttgccttgaggaggtaagaaatgtcatgcagaaaagtgaagaagagtatagagatacaaaaacatgaaagaagaaaagacttgtcactatcatcataggttagcatttggtttctgggtgttgtaaaattaaatcatttctgttgtttggtttatgggtgttgtaaaattaatcatttttgttgtttgggttaaagacattgttgagatgataacttaatgtttctttttttgcgat

SEQ ID NO: 149866 - DNA, 418 bp, Arabidopsis thaliana landsberg
agacgaactgaagccaaacctctcggaaccagatgagcaattggaaaactcttctccttcgcatcggcgaaaagggacctgagtacggcacttcccccgactacaaagaccacatcgtcagtatctctctctcgattcatcctcgctcttaaaccctaattttctcactactcaaaacttttccgattctctatatacaggagacttgtttcggtgtcattcgtagagaaatcgagcgttctggagatcaagttttgcctgtaagtgacttcgagccttcaattttaggatctgttgtgatgtatctctgtggatattattattgtgtgttctcattatttttgttttcgtcttaacagtttctactacaatgtgctgaacaattgcctcataagattcctttgtatgggactttggt

SEQ ID NO: 149867 - DNA, 2415 bp, Arabidopsis thaliana landsberg
gtctttgaggtcaggtcaggtcttcttcctgcaaaaacaaaaacctcagaaatagagaaaaagtttcaatctttcttcatcttcttcctccaaaatccttgatttctaaaaaggagaagaagagaagagaacgcgattaacttgattcaccctcctccttcaggtttgggaggctcgaatactcaggaaatgaaaggggcaagtggtgctgttaagaagaaaccccaggtgttgaacgaagctggtgaggcggatacggcggtggaaacagtcggagaaagccggaaaattagtggagacggtgggtttggcagtgacgacggcggagggggaggtggaggtggaagtggagagtcgattcttcgcgagattggtgatgataggcctacggaggatggagatgaagaagaagaagaggacgaggatgaagatgatggaggtgatgaggaagatgaagaaggagaaggagaaggtgggcaagaggaaaggccaaagcttgatgaagggttttatgaaattgaagctattcgtcgtaagagagttcgaaaagtaagctccttttttcgtcttcactcagcaaatgtggtttgtttttgttaaccataattagttgaggttttaggttttctaggtttaagataagtatcaaacgtaggttacacattggtgtgagaaagtggctgctttagtagttagtaatcatcgtaacatagtagtttataacgaaccaaagttttgattctgtggttgttatatgttgtaggaagaaaatgatctttaatgtttgatatcttcttggatttgattgattgaatgattctgattctgcattttggtactgtttttctttctgtatctgtagggcaaggttcagtatctcattaaatggtcagtttttctaatctcacttggtttcatttttaagtctgttgttcttgattaaacatatgtttttccattgacataagttataaactcggttgtgaaaggcgcgcatggcctgaaactgccaacacatgggagcctttagagaatctccagtctattgctgatgttatagatgcctttgaggcaaggtaagtaaatgcaatcttatataaaagttttgtgatacttttgaattgattgtttcatgcattttcttggtttaatgtatggatttgctttcttgtttcatatgtttcaaagtttgaagccaggaaagcctggtagcaaacgcaagcgcaaatatgcaggtcctcattctcagatgaagaagaagcaacgtttaacatctacatcacatgatgctactgagaaatctgactcttctacgtctctcaacaactctagccttcctgacattcctgatccactagacctaagcggttcgagtctattaaatagagatgtggaagcgaagaatgcttatgtatccaaccaagttgaagccaacagtgggagtgttgggatggcccgacaagttcgtttgattgacaatgagaaagaatatgatccaacacttaacgagctacgaggaccagtcaacaatagtaacggtgcaggatgttctcaaggaggaggcattggttctgaaggtgataatgtaagacccaatggccttctcaaggtttatcctaaggagcttgataagaacagtcgtttcataggtgctaagcggaggaagtctggttctgtgaaaagattcaaacaagatggatccacaagtaacaaccacacagcacctacagatcagaatctgacaccagatttgactacattagactcttttggtaggattgcaaggatggggaatgaatatcctggtgtgatggaaaattgtaatttgtctcagaaaaccaagattgaggagttggacatcacgaagatacttaaaccaatgagttttacagcatctgtatcagacaatgtccaggaagtgttggtgacctttttagcgctgaggtttgtctctttagctctttggtcatttctcgtaatttgatttcatatttgtacaattgtacttatttggttactctcataggtctgatgggaaggaagcattggtggacaacagatttctcaaggctcacaatcctcatctcgtaagattatctttatagctttttttttctgcacttactcatttggaagtttcttattagcttttctaatttgtttttcccacaccagctgattgaattctatgagcaacatctcaagtacaatcgaacgccttaaatcatccggaatggtaagaatttgtttgtacacagcccttgtaggtagaaaagattagatggcttctttattctagcagtgcaacatgtagagtcgaggtagcgacaattggattttgtatcgcgtctccgggaggtttcagcttgtaatttatctcctcgggttcgttgtgttcactctctatctctatca

SEQ ID NO: 149868 - DNA, 358 bp, Arabidopsis thaliana landsberg
ttttggaaatttcgattcggttaccatatcaaatttgggcgggcgaggaataaaccaaaccggtcgagagttcacgagccacggagagatcttggcgatgagttgtcggagattcttctcgatcccggtccttttggtgattctggtgatgggtttcgtgtattacgtcacactgtttgttttcatcgatgattgggttggtttacaaagctcagctgggaaattaaacgccttactcttcagcttattggcgtctctctgtttcttctcgctctcaatttgcgttcttgtagatccaggtcgtgttcctgcatcttatgctcctgatgttgaggactctggctggtccaatagtaac

SEQ ID NO: 149869 - DNA, 2046 bp, Arabidopsis thaliana landsberg
aatatcacagtgaagtgctgtgcaggaaagggaataccaaaagttgtgagccttgaattaaatggggaactagttgaggggaatattatcaagggtcaagcagtggttgcatggtgtggtgggacaccaggaaagtgtattaccaggtaaatcgtgttttctgctatctccttttgttatatgcagcttctaataattctgtctattctaatttgttgattcacttatcattaataaccaaagaggtatggtttccttttttaaaaccagttggttgaggagaaagtggaatgggagccctgtggtgatcgatggagctgaagatgaggaatatatgttatctttagatgatgtgggatcaagtatggttttcatgtacacaccagtcacagaaggaggtgcaagaggagagcctcagtataagtacacagagttcgtaaaagcaggtagatggaaaaaacttctaatagatagtatcttttcctttttcactacattcgcatagcattgtcatttgtgtttctttgctttcattattgactaatggttcaaagtctctgtggttgcttgcttcttttgaatagttgttgaattctttacgatagcaataatcttatttatctaattttatctatggattagtgtaaattcctgtcaactgttttcagattgattaacttgcatgataaaactgattcatgtagtgtagtggttgttatttgtatatttctttatttttcatcttttaaactactaatgccgctgtctgtgaatttcctgatctgagggtactaactttaaattctggtggcagcgcctccatctgtaagtaatgttcgaattactggagatgctgttgaaggctgcgttctcaagggggttggagattattttggaggcaaggaaggtcctagcaagttcgaatggttacggaagaacaaggaaacagggtacctatacatgagtgtctgaatgtgttgtcactgcagtatctctactttcttttttcatgtttcttggtcatgtttgcttaaagcatatgttttattacagagaactctcgttgatatcggctggaacctccgagtatacattgacccaggaagatgttggcacacatgtaacttttgtgtacatacctgcaaattttgagggttggttttcttcccgtttcttttccctcgggttcttacttagaagaaagcctcaaattatagagggttaggccgtagacaattctgacgtattctagaaaattgcagggctagagggggaaccagtgtcaacttcatccagtgtagtcaagccaggtatgctaaaatcttgtaaaagacaggcttcttttatagaagaagatgttttccaaagatactgattcatgttgctcgggttcttcttgttgctctaacaattgactgttgtgaactagcgtctactagttctcgttattgggcatggcatgtttttttttttttttgtttttttcttttttttttaatatatatatatatatatatatatatatatatcttggtgataacgcttagcatttgatttgacgtattttatccattagaactgcctgtttggatttttttgctggactgtttctcttcatttttggctcattttgtttttttttgttttttttattgaaactccagcacccccgaaagtaacagatgctaagatagttggtgacttgagggagaatagtaaggtcactgtaacaggtactgttactggaggaactgaaggttcaagcagagtgcaatggttcaaatcaagttgttctatcctggaaggagacaattctcttgaagaattgagcacatcaaaagtggcaaaggtaggttaatgtctaatactcatcagaaaagtttggaagacatatatcttataatgttgcatctcaacggtttttccagtcattccgtatacccttgggggcagtgggctattacatagttgcaaagtatactccaatgacacctgatggggaatgcggtgaaccagtatatgtactctcggaaagagcagttgaga

SEQ ID NO: 149870 - DNA, 442 bp, Arabidopsis thaliana landsberg; identical to SEQ ID NO: 70389

SEQ ID NO: 149871 - DNA, 908 bp, Arabidopsis thaliana landsberg
  unsure (1)..(908): unsure at all n locations
gtgaatatattgcaagtggaagcgatgacggtcggtggtttatatgggagaaacagactggaaggcttatgaaagtgctcgttggcgatgaatcaggtgatcttttttcctgtcacattttagccaatacataagtatctttttttttcattgaatttcatgagttggctaaaagnnnnnnnnnnnnnnnnnnnnnnnnnnnnnnnnnnnnnnnnnnnnnnnnnnnagtgttgtagcaacgagtggaattgataacacaataaaggtaagcaggcacacaaagctgtcttcagggtttggttttcatttcgtgtaagatctctaaaactaacatttgcatgtaaaaatatgtgtacagatatggagcccaaccgcatcagtcccatcaattgtagcaggaggatcagctggaccagcaaccgccaatgtagtggaagtaatggagagtaatcaacagaagctaagccgcaatcgagagaatcctctgtaagttttctgggataggtggtttgagttaatataaaagctccaaggcggtttcagagtacacaaaatgggtttgatgatttggtgcattgatgattcatttgcaggtctgtggagctaatgcaaaggtttaggatgcaagaatttgcagaaggaaactttcacccatttgaatgtactcagagctaaagcaggaggaaactgtagaagtataataagcttgctttgtgaaggtgatggtggaataacaatggctttgaatatgaataatgaataataaggtttgattaggtttcatatgtagcaaaagctttctctctgtaaaactcatgcatagcttccttctaaaagctttttttgttgttgttgttgttgtacagtttgatattggcttcttcttttgaatgtgaatattcatcgtt

SEQ ID NO: 149872 - DNA, 674 bp, Arabidopsis thaliana landsberg
aacactgttgaagcaggttccaaactccctaaagctgacgaaatttcagataatgggacttgtgaggctaatcagaaagctgatgactctgcagagtctattgaccgtgtcaccaaagctgatgattccttaccaattattaagcaaggcagagaaagttgtttaccagagcctggcccccttcttcggtgtccttatctggatgagatctctgattctagcactaggtacatcatcaaaatctattcttcatctatttggtcgcataacaagcaatctcttaacctgtctattacttaaatatgtgtaaaaatatacatcgaaaatatcacccaatctagttgaagatttttggatcgtctttcaccacactttatggcctaaccgtactgataactttacgataatcttgttgatcgtgtttgcaaagtattacctgtatattgaaagaatcctgtgagccgaaatcttaattattgtgtattagtggttagagaaattttcgtattgctttatgagggtttgcatttttttttgtctttcatacttctgcaaagcatataacttgctttttgcagctttcaggctgctccatgtgagaggaggcattctaggaccagtgcagatgatactgagacagatgaagcatccttttctgggcaagaagattcaag

SEQ ID NO: 149873 - DNA, 1273 bp, Arabidopsis thaliana landsberg
catcaagttttttaaagatgttgcagaagttgttcgtgttcgacttattgtaaaccacaggggtgagcatgtgggctgtggctttgttgagtttgcttctgttaacgaagcacagaaggtgagagtagtttatagtaatgataaaaaagtattgaagtagtcatttcgaaagtagtgtatttcgaaagtacgaaaactaatcaaatattttgtactataggcgctgcaaaagatgaatggtgaaaatttgcgcagtcgtgagatttttcttgacgtggttgagttagctccataccctctccgacccaagtaaattgttttttccatatggagattagtttctctaaattatctctatagttttgatgtgtcattacaaaagattaatgctattttatcttctttggtaattaggcacaaccatgcagagaaactttggtaagggatttaactatttgcctttcgagtattgttatcaatagcacattgggtgaagtttgtggtatacaaggagagattacaatgggttttttttttttttttttattccaggcacgaacgagaaagtcttctgaagaaacagaaggaatatgagatgttgagcgagaggaccgaattctgcggtaagaagattatcttctcttacgacgacgaagaccatatgttctgatattaaatcattatctgccttcactattatgtgccgtatacagtatactattttaactgatttgtttgtcaaaactcaaaaccataatctcggacaccaaatacagtctcaacttgattcagtctttcgtatctttcaccaaagtaaaaaagtagtggtaactcaagacctagacattggctttacgataacctttgtacagagacaaaatcgtaagcttgacccgaagcttatgagtattcttatgagttatgccacagtaaaaaaaagtaacatttaaaactatcttcttttacccaataagatttgccaaatttgtaattcggaaaaatgttaacttttaaaaatagaaggtcggttagaaccctctatatcattcagagacttcaccgctaacttttgtaaaggtcctttagggttttcggattcgagcaaaaacaaaatctccgcaatcgagagaaactctgagatcggaatcaatggagtctacaatatcgttgaaggtcaacaaaggaaaaggcaaaggatcaaagggagcttcctcttccgatgacaaatccaagtttgatgtcgttaaggaatggacccaattgtcattgaaga

SEQ ID NO: 149874 - DNA, 560 bp, Arabidopsis thaliana landsberg; identical to SEQ ID NO: 20645

SEQ ID NO: 149875 - DNA, 595 bp, Arabidopsis thaliana landsberg; identical to SEQ ID NO: 22016

SEQ ID NO: 149876 - DNA, 1060 bp, Arabidopsis thaliana landsberg
  unsure (1)..(1060): unsure at all n locations
gctgaaagggagttgcagccttggatcgccaaagatgatgaagaaggccaaaaaatgtggaaaatcaaccaacggatagtcaaagtgttggtggaactcatgcgcaatcatgacaggcctgagtcactggtgattctcgcaagtgcatcagatcttcttctgcgggcaactgatggaatgcttgttgatggagaagcttgtacattacctcaacttgaggtactgcactgttatagattgctcttcaatgcccttcttcgggctagagtaataatcattttctgattccactgtattttaaacttttgcagctacttgaagccacggcaagagcaatacagccggtgctagcttgggggccatctggactagcagtggtcgacggtttatccaatctattgaaggtaaaagcagaatcgaacagagcctatggtttcctgcgtcgattgtagatgatcagtagtaggtccagttaccaaagtgcttaaccttgttcacatctttttgcttctannnnnnnnnnnnnnnnnnnnnnnatacggtgcctttcacacccaagtgcacacgtacgtgccttaagcacgtcagtactacgtgatatcatgaaccaaagctccatacccatcaaagtaactccaaaactgccaacaacagagaagaacggaatgaatagtccgtcctatcgattcttcaacgccgcctcaatagactggaaagccgatattcaaaactgtttaaactgggaagctcacagcttgctctccacaactatgcctactcagtttctcgacactgcggctcgggaactcggctgtactatatccttgtcccaataacgagcacccacttttgtttttggtaaattttagttctctagacaaaacatttggacgtagaccaagaagaatatatatatagtttgttgtatgtaatgttgtaatgatgagtgactgacgcaatcactcccaccggcgttggatttgctctcgctcggtgtcttatataactcaacctcttctctgtacattttaaatgacgaagtagctcaatcttttttttt

SEQ ID NO: 149877 - DNA, 1687 bp, Arabidopsis thaliana landsberg
gtatctaaaccgtggccttgcgaagctagttgaagaaaatccacctgcgataatgcttttgtttgagcccaaagggcgtccagaagatgaggggaacgatttttatatccagaccaagaggaatatatgtgttgggtgtggggaagggaaacattatctccgttaccgaataataccgtcgtgctatagagttcattttcctgagcacctaaaaagtcatagatctcatgacattgttcttctttgtgtggattgtcatgaagttgcacatgctgctgcagagaggtacaagaaacaaatcgctacggaatttggaattcctctttttgttcgtagagtactcgattcaaaagaagcacaagggacgtcttctttagtggaggatgaatcaactggtgactctgaggatgcaggtgtctcctcattacatcttagatcagcttgaatggcgctcttgcaacatgggaacagaatgccttcaagtcgccgtgaggaattgttgcatgtgatgtgatcatctaactatttcaactttcaagaaattgatttgaaccaagtattctgttattgatactttcttttggattctgaatatagactgtgaagatgtattacggtggacgggacctatctgaagaagatttggagaaagctttactcatcggattgagccctcacgaaagaagaaaactcgaaaggaaaaaaggggtctccttcaaacattctgcagaggttgctggtatggacaaacaagaaggtaaccatataataagcattgaaaattgtgttggttgataaagtgtaagatatgatgatcctttgatatccagaaatactgatgcaaacaacttcgtatctttagatgaaaacaatgatggggaggctcttgcagattttgagaaaattatgactgtagaaaggagcacagttgttgatgatagtggtgatggtacaagtgaaggagatggagctaaagagctaaatgatactcagtgtaatgggaatacgttgcaccaacaaaactccaaactctcttcgttaggacatggaccgcacggtaaacagatcgtagaatatcttttaagggaacatggagaagatggtgtacgtgatttctgtcaaaggtggagaaaagtgtttgttgatgctgttcatcctcgccatttacctggtggttggaatgttagtcacaggtaaaccttagatttacgtcttctttttaattataaacttgaggttctacttggatgtttatcatatcttgttgtgacatgagacaagtaacaacttttgtgttagagaaccaaaagtctttgaatttactaaaagtgaatttatgtggaccttgttctttacaagggtttgattgttttgttgctagtggccgaagagactttggagaattcagcgtttacaatcccacaaagagactctccaccgagtagatttgtctgtttctgtaccatctctaccgtttcgtcaattttggattgtcataatctaggattattttgtaatcccccgaccgcatcagtggtttgttgttgtattcttctgtagacctctgtactttgttttagccaaaagtctgatccttttaaaattgcagtatatgactattttgaaacgataccagaattttgctttacgaaagtcatacaaaaatggctctatgcccatcacttaa

SEQ ID NO: 149878 - DNA, 1035 bp, Arabidopsis thaliana landsberg
gtacttttctagaataacaataaaaaatgggggcactcattgattattattgtcgataataccaatatatatcaaacgaaattttaaaagtagatgattcatgaaaataatttttgcttattttaattagttcttgagtaaaattatttatacattctagatattaaataatgtcgaatttttaattgaataaacactttattatatataaaaattgaaaaacaaagcaagccgaggaatctctctctaatctatctccaagacggaccaaaccagttttagttctatctctcaatctctctgatcagctccatttccaatgtaagcccaccaacttcaactctaatctccatcttcctcttcctcttaaaattcgtttagatcaacaagttcccatctttccagtgtcaatcgacgattcctttttccgttaatacgcatgtatttgattcttattgctgaggaattgaagaaccattttgatcattgttgtacccattgatttcaaattcaagatataattgactactgtttgttaatcatcattgacgtgataaagttgactcctttttgtgtagtgcaattcaaaggtttttgatttacatcagtaatgaagattcttgttgatggttattttgcagtttgttggaaagtagatacctttgagaatctaaaggatctccctttatggcggataaggacgttccttttggggttgaagatattgttcagacgcctttacctggttatgtagctccaactgcagttagctttagtcctgatgattctttgatcacttatttgtttagccctgaaaagaatttgaaaaggagggtgtatgcttttgatgtcaataaaggggaatctaatttggtttttagtcctcctgatggtggagttgatgagagtaacatttcacctgaagagaagttgaggagggagaggttgcgggagcgtggtttaggtgtaactcggtatgaatgggtcaagactaactcaaagatgagattcattgtggttcctttacctgccggg

SEQ ID NO: 149879 - DNA, 1387 bp, Arabidopsis thaliana landsberg
gagtaactttggcggcaacaaaagggacctcttcccatatttgttcaggagctcgtgccttagagcggaggagctcgtgaggtccgttgtagccaaggcatttgaaagggagactcgtatggctgcttctctcatgaggctccatttccacgattgtttcgttcaggtactagagagtcatttttagaacttgctcaacaagctaattactaatgctgagaatcatcattaatcttatctatttaaatgaaaatgtgtagggttgtgatggatcgttgcttctagacaccagtgggagtatagttactgagaagaactctaaccctaacagcagatcggctcgcgggtttgaagttgttgacgagatcaaggcagcattagagaatgaatgccctaacactgtctcttgtgctgacgccttaactctagctgctagagactcctctgttcttgtaagtcgctttctttctcttgctctctcttttacttctttgagttgtcaagattcaatttcgtttggttttgtgtagacaggtgggccaagctggacggttcctttgggaagaagagattcggcaactgcaagccgggctaaaccaaacaaagaccttcctgaacccgacaacttgttcgacacaattttcttgagatttagcaatgaaggtctcaatctgactgatctcgttgctctatccggtaagcttacttcacacacaaggaagattttgactttacttgctttggaagctaacgttaaaccttacaaaatggtcgtgtcatacgttctgaccgaaaaaaatttcagggagccacaccattggattctcaagatgcactagtttcagacagagactttacaatcaatccggaagcggaagtcccgacacaaccttagagaaatcctacgctgctatcttgcgccaaaggtgccctagatcgggtggggaccagaacctttccgagcttgacatcaacagtgctggaagatttgataacagctactttaagaacttgattgagaacatgggactgttgaattccgaccaagtcttgttctctagcaacgaacaattcgaaaagagctcgtgaagaagtatgcagaggatcaagaagagttcttcgagcaattcgcggaatcgatgatcaagatggggaatatctctcccttgacaggttcgagtggtgagatcagaaagaattgcaggaaaattaataactcttgatttcctagtatcggatgggagaaatagaaatgtgacatgttttggaggaaggaatttatgtttatgtttttttatattgtatgagtctgtatttctttgtgtcaagaatttgaattttgtaagtttaaatgattgaaactatctataattaaaatgttattaca

SEQ ID NO: 149880 - DNA, 366 bp, Arabidopsis thaliana landsberg
tgtttagattcgtttgatgttcttcaccatgggaagattctgatgggttcgttgtttggaggtttaaaggctaaaacacacattccaattcttcttaaacgctacttgagcaatgaacttgaattggataagtttgtgacacatgagatgaaattcgaggagatcaacgacgcattccagctacttcttgaagggaaatgcattaggtgtgtcttatggatgggctaagtgaattgacttattttatctttccatcttttgcatcaatttcatatgtttcatgtttaactatttttattggtttgtaatcaaaacaagcaaatgccaaagtggcagcaaaataaaaagtcaatgaattgtaatgaa

SEQ ID NO: 149881 - DNA, 1151 bp, Arabidopsis thaliana landsberg
  unsure (1)..(1151): unsure at all n locations
agaatttgacttggagaacgagaaaagcctgcttgacgagcaagggcttagaatagctgaaaatcaagaaaacagccaaaagaatcgccgaaagcttgcatagagcacacgaggtacttttttgtttcaccttttatattgcttaacacttcaacattttctcctgagggacctcgataggttccagcgaagagatgttaacatattctttggtttatcttggtaacaacagannnnnnnnnnnnnnnnnnnnagaacaaacttagtatgtttaattccctcctcaagggatatcaagaagaagtagataatattaccaagagggccaagtttggggagaatgctttcctaaatatctatcagaaactctatgaagcacctgatccgtttcctgctcttgcttctattgctgtaattatccacttatctaatgttaacataatagacacctaaagtcctttagcctgagaactaactaattgctgtattccaggagcaagatcgtaaattatctgaagtggaatctgaaaatcgaaagatgaaagttgaacttgaggagtttaggacagaagcgactcatcttaaaaatcagcaggccacaataagaaggcttgaagaacggaaccgccagcttgagcaacaggtcagcttgcttttaacctcttcttctaattgatatagggataaaactaaatgaatgtaaagcacagcttccttgattatttttcagtctattctaggaggtcaaatgcaaatttatacactgagccataagcatgatttatatagagatgctattttgtgatcttgtaacgaataactgtcgaagattagcagtgatatcgagttgttatatttggattcagatggaagaaaaaatcaaagaagttgttgagatcaagcaacgaaatctggctgaggaaaaccagaaaacgatggagcttttaaaggataggtaaaaaaaaaattctcttctgcatgctttgggtgtttagaaagttttcgaggaagcaccaacctttccttgttcactgtttaacagggagcaagctttgcaagatcagttaaggcaagcaaaagacagcgtctccactatgcaaaaattgcatgagttagcacagaaccaactttttgaactccgtgctcatcag

SEQ ID NO: 149882 - DNA, 1150 bp, Arabidopsis thaliana landsberg
atgacgaaagtgtgtcctgaaatagaagggacattatctttatcagtggttccagtatcagtagatgtgagctttgcttctgatcactttccaacatataaattaggacctgataatcagatagtagaggaaccaaaggaagatgaaaaaggtccatctgtgaaggagactgtcgagaaagagagcgagttgttgtctgatcagcacaagcggctttcggtccgtgacctcgctagtaaattcgacaagaatcttgctgcagctgttagtttggctaatgaggttactttctacaattcttgatttcatataacaattctcactctctctttttgttgaaatatattcttggaaactctcttttaggctaagttaagagaggtggcttctttggagggacatgttatgttgaagaagctaagggatgctttagaatacatgagaggacgcacggatgggcaaaacaaacaggatgtggagacagctatctccatggttaagatttaagattgatttagtcagattttaagataaggttccttgttcactctgaaactaatgtttttatgtgacttgtgtcaaaactgtgatgtatgagaataggtggaagctctagctgtgaagttaactcagaatgaaggtgaattgattcaggagaagtttgaagtgaagaaactaggaaacttcctcaagcaggtctcgcttctatagtatagattgatattgatgccgaaaatgttctgttttcgcttgcttacatttccaacagtaacaactacaaaggaagctgattattgttactctcatattgacagacttcagaagatgcaaagaaactggtaaatcaagaaaagtcattctcttgtgctgagatcgaaactgcaagggccgttgtgctgagacttggagaggcttttgaagaacaagaacggatttctgaagcttctagagctcaggggccggttagtattattttctagtctagatttatagttagtagtaaagttttctagtgaactcaagttttcaattcttaggatgtggagaaattggttgaggaagttcaagaggctaggcaaatcaaacggatgcatcacccaacaaagggactacatcaattcattgcactttaacttcataatttgatgtg

SEQ ID NO: 149883 - DNA, 1598 bp, Arabidopsis thaliana landsberg
tttatgcttttattaccaaattgaatgctttaccaaagtcacagaaccatctcttcttgacccttttctttaatctttaatctctttcttcttcttcttcttcttcttcttctcgccaccgctccttcctccctccttctctctgtatcaggtactttttcctaattcctgtccaattttagggttttcttttaagggtttcgtatgtctcttttcatgttctttgaatttgcttcgttcgttgcgttttcatttcagtctcgtgactgactctgtttgtgggtcgttttcgtaattgagtttccccggtcgtctgttttttttggggttcgtgatttcttttttattccttctctctctcttggaattgcgaaaaagaggaacgtttttttttacgtttcgtttgaaaaagaatgtgaataaattggacataagtattgaattctttttttcattttttttctggttgttgtttagtttttttctcgataggaaaatggaacaagccgcgttgaagagcagcgtcaggaaagagatggctctcaaaacgacttctccggtttacgaagagtttcttgccgtcaccaccgctcaaaatggcttttccgtcgacgatttctctgtagatgacttgcttgacttgtcaaacgatgacgtttttgccgacgaagaaactgacctcaaggctcaacatgagatggtctgtgtttcctctgaggaacccaacgacgacggagacgctcttcgccggagcagcgatttctccggctgtgacgactttggttctctccctacaagcgaactctctcttccggtaattagataaaccattggattaaagttttgattctttttcccacgaatttgtatctgatttttgtttctttttggtgaaggcggatgatttagcgaaccttgagtggctctctcatttcgtggaggactccttcacggaatattcgggtccaaacctcaccggaaccccgactgagaaaccggcgtggttaacgggtgaccggaaacatcctgtgactgcagtcacggaagagacctgtttcaaatcccctgttccggctaaagcccgtagcaaacgtaaccgcaatggcctcaaggtctggtcgcttggttcgtcgtcctcctcgggtccttcctcgtccggttcgacctcctcctcctcttcgggtccttccagcccgtggttctccggcgctgagctgctcgagcctgtggtcacgtcagagaggccaccgtttcccaagaagcataagaaaaggtcagccgagtctgttttctccggtgagctgcagcagctgcaacctcagcgaaagtgcagccactgcggcgttcagaaaactccgcagtggagagccgggccaatgggagccaagaccctgtgcaatgcgtgcggtgtccggtacaagtctggtcggttgctaccggaatacagacccgcttgtagcccgacattctcgagtgagctgcactcgaaccaccaccggaaagtcatagagatgaggcggaagaaggaaccaaccagtgacaacgaaaccggtttaaaccagctggttcagtccccacaagctgtaccaagtttttga

SEQ ID NO: 149884 - DNA, 418 bp, Arabidopsis thaliana landsberg
gagtcttcggtataagaactcagtgacttcgcttcgtgctgttcttgctgcgattccaaattcgcagaaggtattgaacataatgtgatgttactaactatttcgagaagtgttttgttctgagttgtttctggacagaggaaattttgaattcctagggtgttttgagatcttagattaggaaatcttcgaatcgatagagagtttagatgaaggatctaatgcttgttgagtgtcttgttcttcacttgtagtgaacttgcttaatttcaaatgagagcttttttgaggtttcataaatttgaatttgttcatctattacaggcaaaagcatctgaaatgcaaaatggtttaggatctcctgaaagggaagacgagatcgaaaagttggaggaggaagccttaagtctcagaatgg

SEQ ID NO: 149885 - DNA, 1429 bp, Arabidopsis thaliana landsberg
atgaagaagattgagctcgtgttcataccttcgccgggaatcggccatctccggccaaccgtgaagctagcaaagcaactcatcggaagcgaagaacatctttcaatcaccgtaatcatcatcccttctagaaacgacgccggtgatgcaaccgcctatatcgcatccctcgttgcagagtctcaagatcgcctccgctacgaacccatctccgtcgaaaaacaaccaccaaccgcaaattttgagccgtctcaagtctacatcgagaaacaaaaaccacaagtgagagacaccgtctccagaatcatcaatccaacaagaaaactcgccggattcgtggtggacatgttctgttcttcaatgatcgatatagctaacgaatttggagttccttgttatatgatctacacatcaaacgctacggttttaggaatcacacttcacgttcaacaaatgtaaaacgacaaaaagtatgacgtcagctagttatgcatcctcggtgatcgagttggagtttccggctctgactcgtccttatccagtgaagtgtcttcctcatatcctcacttcaaaggagtggttacctctctctctagctcaagctaggcgtttccggaagatgaagggtattttggtaaatacagttgctgagcttgaacctcacgctttgaaaatgttcaatattaatggtgacgatcttcctcgagtttatcctgttggaccagtgttgcatctcgaaaacggcaatgacgatgatgagaagagattggaggttttgcggtggcttgatgatcaaccgcctaaatctgttttgtttctctgttttggaagtatgggaggtttctctgaggaacaaactagagaggtagctgtggcgttaaaccgaagtggtcaccggtttctttggtctctccgtcgtgcatcgccgaatataatgatggaacgtcccggagattataagaatcttgaggaggttttaccggacgggttcttggaacggactttggatagagggaaagtgattggatgggctccacaagtggcggtgctagagaagccggcgataggagggtttgtcactcattgtgggtggaactcgatgctagagagcttgtggttcggtgttccaatggtgacgtggccgctttacgcagagcagaagataaacgcctttgcgatggtggaggagttgggattggcggttcagatacggaagttctttagaggagatatgttggtcggagggatggagatagtcacgacggtggatatagagagagcggtcaggtgtgtgatggagaatgatagtgaggttaggaatagagtgaaggagatggctgagaagtgtcacgtggcgtcgatggacggtggatcctcgcaggtggctttgcaaaagtttattcaagacgtgacagagaatgttgtctga

SEQ ID NO: 149886 - DNA, 1820 bp, Arabidopsis thaliana landsberg
  unsure (1)..(1820): unsure at all n locations
cttaaagctcttgattatcttcatagacaagggcatatccatcgagatgttaaggtcagcttcacactgtactttgatagatcatccatgatccatgactatattcaaaacttttttgtgtgtcttatatattaggctggaaacatannnnnnnnnnnnnnnnnnnnnattaagttaggtgattttggtgtctctgcatgtttgtttgacaatggcgataggcaacgtgcaagaaatacatttgttggtactccatgctggttggttactgtagttttctcgtttcggtcttcttaagcttcacagtttctctctactcgatggttgacatgtcatatcttgtttctttttgtaggatggcaccggaagtcttgcagccagggagtggatacaattcaaagtgagtttatgctttaatatcaagtgccaactaatatactcaatttctctgcatggtccttgttaaatatagcggtttgttcaatttggtatatgtcatccaacttctcaaaatcgaaagccgttgattttagttgatctagatagtgtgtgattgtttcagccccgcagctgtttaaaagttactatcatttgagtatttttttgtcaaatgaaatgaaaaatctttagaaactgtttgcatcaaagaaatgcaataacagttattggttggtttgttcttctgtaccttccttacagggctgatatatggtcttttggaataacggcgctggagttggctcacggtcatgcacctttctcaaaatatccccctatgaaggtattcattattttccttatatgtattaagaacagatcttattccttttttcctggtaacaggtactcttaatgactatccaaaatgcaccacctggccttgattatgaccgtgataagaagttttcaaaggtacgcgtgttcttcctaggtatattcttattttatttgaatactttccatttcgaggattgttctaactagaagatgtccagctgcgctcagtcctttaaagaattggtagcattgtgtctggtgaaagatcaaacaaaaaggccaactgctgaaaaattgttgaaacactcatttttcaagaatgcgaagcctccagagatctgtgtaaaaaaattatttgtcgatttaccacctctttggactcgcgtaaaagctcttcaggtttgccatgcttatatcttcgtcgagcttgcagtacttgtcctgttctactctaattgatagagtcgttgtataacaggccaaggatgctgcacagcttgctttgaaaggaatggcctctgctgaccaggatgctatatcacaggtgacgaacgcacaagtttgagtatattacttaagactcaaattgcagaatgcttatataaaaagttgtttttcatgtcagagtgaataccaaagaggagtaagtgcttggaacttcaatatcgaagatttgaaagaacaagcatctttggtaagctatgctttgatagtatctcttaaatgatgccatttaagaaaccattggttttcgtcaaatattcttatagtttctttttttgtgtgcaatagctagatgatgatgacattctaacagagagtagggaagaagaagaatcttttggcgaacagttgcataataaggctagtaattcgcaaagaaatattcagcgaaatcatcttatatctcttcactctcttggtatctggttgtttgaacttattgggaaacacattgcaggtgaatgacagagggcaagtatctggtagtcaattgctatctgagaacatgaatggaaaggaaaaaccccaaatactgaagt

SEQ ID NO: 149887 - DNA, 587 bp, Arabidopsis thaliana landsberg
catggaaacgatccatttctccggcagtaccagccgtcggagcttaagatcgcttcggagtatctgacgaattggcttccttttttatcgaaagatctatgcaaggattgtaatcaccttctctccaatcgaatccgttctcttgacccaggtaacgattctctactttttcttagaggcgagagactttctggtttctatggatattgaaattctgtatagaaagcggagattttcttcattattgtacttgattctgcttttttgattgatgttctgctaaatgataaggttacaaaattagggtttggtaattggaacaaataggaggcgagagagtagcaagtacgtttctaaatttgtgaattaaattatgatgtggagttgcttatgagaaatcatgtttccatatgtgtagaacattgtagtaacaacactgaaaaagttaatggagagtgtaaaactggttcttgttcagtggtggaaaatatgggatcagaaagagctagtaacaatgtggatgataattatgatgagaagtcggaaaacggcgaagactgtgataatcattcgttaggtagttgaag

SEQ ID NO: 149888 - DNA, 527 bp, Arabidopsis thaliana landsberg
tgcatgttgatgtggcaaaaccaggggtggttgttgtaggagacgcaaagggaagtgaggagttgaagattaatgctgatgctgaaactcttgaagtggctaataagtttgatcaaattggggatgatgatagtggtgaatttgaacctgtgtctgacaaggccattgaggaggtagaagaaaaatttactagcgaatcagactctattgcagactcctctaagttagaatctgtggataccagtgctgtagagccagaggttgtagctgccgagagtgggagtgaaccaaaggatgtggaaaaagccaacggattggagaagggtatgacttatgctgaagtaatcaatgcagctagtgcagtagctgacaatggaaccaaagaggaggagagtgtgctcggtggcatagtcgatgttgcataagaaggttgttaagttatctatgttaggagactttgttgtggactcatctgctattgaagctgtgaaggtagatgtggcatagccaggggtttgttgttgttg

SEQ ID NO: 149889 - DNA, 1100 bp, Arabidopsis thaliana landsberg
atgatccaagcaatgaatgacgcaaagcagacgagaaataacagtgatacacagaaatttatcagacaagtacaaggccaacataaatagtatccaaggctagatttgtctgtcatgttaagagaatgatttgtgaaaacgaagtaacaatcactagtaatttataaaaaaaattataacactcgttggcctctgcttttttcaagtgaaaaaaaaatcaaacgaacggtttgatttagttaattaatcttatgttttgaaaaactattctcctagattataagtgttgatcttttatttaggttatgtttcattagtttccgtagttatctccttattagttccaacaatccatgtaaattttaactctggactatctttttaatgagactttcataagctttgttattagaatattagaaacatttaaataaatttaattattatgttaatttattatgtaaatttaaatttgagttaatttatagaaaaaatctgtgattattaataaatttaattattatgttattagtttaagaagtgctacatttttcctcacaaaataaagttgtatcatcaaaacaaagatattgtttgggaaactttacaaaattatgaacaaacaaatcaatatgtttatataaaaatttctagaaatagtttaaaatattttatttatttactttctttgattttattaaagtcatcaaaataatttgtaaaataggaattggttgttgaaagaaatagaaaaacattttacaataagattggttctgtttaatccggcccatatatctactccgttaaagtgggccaacagacggcccacaattacttcttcgaacaaggaaatagccggtgaggatcgcatcaccgttaaccagccaaaaggtcagtgactgacgaaaatggcgatcatgcgataatcgtgtagccgaagaagaagaagaagaagaagaaagaagatggtgttttgggagataactctaggaacagcttacttcttgggactgagacggacttataggctcgctctgaagatccagcgtcggcttgttactccgaaacatcccaaaatccgtcaatttcttcatcgg

SEQ ID NO: 149890 - DNA, 1938 bp, Arabidopsis thaliana landsberg
  unsure (1)..(1938): unsure at all n locations
aaactgctgtgctaggagtctcatgagagaagcgctattgagctggttacacgatctctaaccgtgaacgataatgtgaggaagaactttacacaatcttttttattggctacacagaacatacgatacttaggactaaaccacggggtgctataacatgactataaagaggtgactgcacaagcccgctctgtccccatcaatggaaccactagggatgttcaggctcctattgaaccaggtaggatgaaagttccatgttttttttttttgtttcctaccacacatagcacttatttatttcaagttagaatattaacatcggcttacttcttgtcagaacgtgttgttgttagtcacgagcccgaggtagaacccgagccagttgcttctatcgaggaagaagatcttgacaatgtggcggaagtgtatgatccttctgataaagatgaaggagttgttgttgacgttgagcctattgaacctcccactcaaataagtcataatgaaatcttatcagtgcctcaaggagatgctcctaagcattcttatgcttcaatcgtgagttgaaaccgctcactaacttaattcttttgttgtttctcaagattgtttttctgttgttagtaaaacttatgaagtcatttgtgtgcctcaacagctcaagcagatgaaaagcagtccagcaccaacaacacacgttgctagaaacaagccaaggccagctccagtcaaccagaagctgaccgcgcctcctgctgagcctgcagcaagacccgaggcttcagctcatgagaatgttccgaatagtagccatgttgatgtggaaggtctgtaaattcttttcattttgctgtttgaatacgcgcatttcccttggttattgatttttgttttgtctatttgttgttacagatgatggtcattcgatttatgttcgaaatttgccgtttgactccacaccaacacaacttgaagaggtgttcaagaactttggtgcaatcaagcatgaggggattcaagtcagaagcaacaaggtttgatatataaatctacaatctcctccaaaaaccctttgcttattggtcccttacacgtatttgtgactcgcnnnnnnnnnnnnnnnnnnnnnnnnnnnnnnnnnnnnnnnnnnnnnnnnnnnnncaaagtgccctcgaggtaaaaccatatatagccttgaaaattctcctaagtcttttcgagctcaggtgtctggtatatgtttcggttgaattagaaagtccgactctttgtgttggtacatgtaggcctcaccagttacaattggagatcgtcaagctgttgtagaggagaagaaaacaaatagtcgaggtaacaaacatgagagacctcatcaagaatcaagaaaaagatggttgatgaagagtttttgtgtatttaagatgtggctaatctttttttttgcaggaggaggcaacaatggaggtagcaggggaaggtacttttccggaagaggaagtttccgaaatgaaagcttcaaaggaggacgcggtggtgggggaagaggaggctatggaagaggaggaggtgagttttctggtagaccaaagagctcaaacccacgaaatggaggagaaagttaccaaagggttcctcaaaacggaggaggtggaagaggaggccgcggataaggaggtcgtggtggatctccaggcggtggttcatcttgactttgcttttaacggtcctctacaagagagtagttctaatttttgctttgcgtctttctttttgcctactacttgagttgatgtggtattggcttttttgtcggtctagtttttcaatattcttgctttttttcctctcttttttggttttcatctttcaatctttctttggggtaatgtactcttcataaacaaacattcaatttcataaggaatccatcataga

SEQ ID NO: 149891 - DNA, 1228 bp, Arabidopsis thaliana landsberg
gagattattactaaagttagctttacttgttgtatataggcttcatgagcttgataacaagtttctttaggaggtgttaaagagccagatcaagctttcagaagaggtaacttgtattgctgtcttactttggatccagaatgcgtttatgtgctgaatactttgcttgtgatagattttcttagggtggttgagagctgaaagttttgatatttagtcaactttgttccactgaaccttctaggaagctacctcaagtagacaggtgatcttaaagattctcttgtttctcttagatctcaatctttactgtttctcaagtttcctatgccaactctacttattcttgtcttccctcttcctcactttggcactttgttttgtccttagctttgttgacgggcttcaagccagtggtaaagatatgcttctgtagaagggttaatcttgagcattaaaggacatggctttctactctgaagacgacaagagcgaagactacctctttaagattgttctaatcggtgattctgctgtcgggaaatcaaatttacttgccagatttgcgagggatgagttctatcccaattcaaagtcgacgattggagtggagtttcagacacagaagatggatataaacgggaaggagatcaaagcacagatatgggacacagcaggtcaagaacgttttagagcagtcacttctgcatattaccgaggtgcagttggagctcttctggtttacgatatcagcagacggcagacttttcacagcattggtagatggctcaacgagctacacagtaagaaacctcttatcttttcttatctgctactaaacaatctcccatttgctaattgattcaagaataatgaaagtgaggggtgtcttcataaaactgttgcagcacactctgatatgaatgttgtgacgatcctggtgggcaacaagtcggatctgaaggacttgagagaagtgtcaacagcggaagggaaggcattggctgaagcacaaggtcttttcttcatggagacatcggctttggactcatcaaacgtggcagctgcatttgagacggttgtgaaggagatatacaacatactgagcaggaaagtgatgagctcacaggagctaaacaagcaagaccctgcttcactgagcaatggcaagaaagttgtgataccatcagacgggcagggcgagtccaagaaaggtggatgttgttcc

SEQ ID NO: 149892 - DNA, 1598 bp, Arabidopsis thaliana landsberg
ggataagccttttgcttcattctcacttccttcctcatccaaaaaagctcctccatttcaatggcgacagcatcagctctctcatcactctcttcactctcactccacacccgaacctcttctctcatctcctcttcctccacaaaacccatcgtctctttctcctccttcctcaaccgccgcttctcatctctcactctcgtcaaagcctcatcgaccgataccgaaaccatcttcttcgaagacgaaacaccagaaataaccgcaaatgtcgtcttcgacccaccaattgctcccgaaggattcgtctctcctccgtatttcgacgaaggaagcgacgagacagaggaagagatcgctaccgcttttgaagagctctatggacctgcgtatagtggtgagagtatgcttgggaaagatatttatgtgatggactcaaagcataagaagagttcaggtattggtgggaagccaaagaaagataagattagagatgggtttgaagagagagttgtgcaagttaggagagtgactaaggttgttaaaggagggaagcaattgaagtttagagctatcgttgttgttggtgataaacaagggaatgttggtgttggttgtgctaaggctaaagaagttgttgctgctgttcagaaatctgctattgatgctaggagaaacattgttcaagttcctatgactaagtattctactttccctcacaggtaatcaaagttttggacttgatgtttgtaatgtgtgttaattgttggaagaattggttttggatggtaaaagtcttacttggtgatgaactaagattttgggattagtattgtgcagtcatgtgttggatttgtgatgggtttgtttggtttacagattggtgttatggtacttgttttacgaaactgatgtttgcattgtgcacaaaagttaaaatattgaataatgccctaatgattagaagaatcggtttttgttaatcagtagacaatgagctaagattgtggggtttagtctttttagcattgtgttggatgtgatgatttgcttggtttaaggattgagttatggaagttgttactcagaatgctggttttatgagattgatctttgtgttgtgcacaatcaattagaagaatcggttggttaataggccactgagctatgttttggaacaattggagatgggtttaagttatgttttaagagggttttgtttggtttttgtattatagatcagagggtgattatggagcagccaaggtgatgcttagacctgcttcaccaggtactggtgtgattgctggaggagcggttaggattgtgctagagatggcaggagtcgagaatgcattggggaaacagcttggaagcaacaatgctctcaacaatgcgagagccactcttgcagcagtacaacagatgagacagttccgcgatgttgcacaagagcgtggaatccccatggaagaactctggaagtgaaaactcatcttcgctttaacattttcatcctcttttgttgagatttcttgtaatgatgtaattcatgagaaaatatgtttattttgaaatagtaaatcctttcttctccc

SEQ ID NO: 149893 - DNA, 257 bp, Arabidopsis thaliana landsberg
aggtgatatgtgcatttggaaggctcgggacaatgtttggctgtgacaaatacaacattaagccagatcttgtgaccttagctaaggtgagattttgcaagatgattagtagtttttttctgttggcaaatttcccctgacaagttgtaaatgtttccaatatacaggcactgtcttcagcatatatgccgattggagccattcatatgagccaagaagtggcagatgtcataaattctcatagcagcgagctaggt

SEQ ID NO: 149894 - DNA, 774 bp, Arabidopsis thaliana landsberg
  unsure (1)..(774): unsure at all n locations
ttgctttgttggatggggttgctaaccatgcgatgttagagcttggcgatgttcaacttgtgacctaccttgctgagaaaaaaccaacaggacaagtatttttcagaaaaggtaagttatcactttcctcatcctgctaagagcctacacgaaaactgagaagaataaaagcaaaagtcaatcaaaagtagactgaagtaagttgagaggatccattggaagaaaaaagtagtcaggatatgcttaaacagaatggttctaaaattaagtgtttgtacttaggaagtatattacatccagtaggtttgaacacttgagcattaaaagacagttccgtgtatacatttcacacttgttctattatagctatggtttatatttcagaaaggtgtaatgattataccttggggtaaaatgtgtggattttttctcatgttataacatcatattatgcaggccttccttcaatcttctctttccccccaaattgtaaaaccgcagactgcctcatcaggtagctcactgactgaacccttcagtttaacggaaannnnnnnnnnnnnnnnnnnctttattgggtcgtgaaaattttcttggaatagtcatttagatgagtttcttgcttcatttttcttattccagaataataattcaaatctttttatttgttaggtttgaaggagagctgtcagcagatgcaattaccgattggttcgcgaccactgtactgggtttacctagagtattctatcacacaaaagaaacactggtatg

SEQ ID NO: 149895 - DNA, 847 bp, Arabidopsis thaliana landsberg
agtcttcccaatcaaaaacctaaatctaaatttttcattcccttgttccggcgaaaacagtctcagtggcgacaaaccctattaccgagccaactcgcatattcctctagctttcgcaacgcctttcgctctctctccccaccggttcgtcctctcacaccttatatttgttcagcttgttgattctaccctaggttattgctctactccaacgcttctgctcgactctcgcctagggtttttctttagtccaacttagcataagcttctgctcgaatctctcctagggttttgctctagtctaattaccttaaatttctggttgattctagctttttcatggtgttctcttggacttggtgttgagcattagaggagattactcgccaatgggttaagtaaaatatgttgcagatttgctatagtaaataacccagatagatctatcgaaagcttgattttgtggtaatgcactcattcgagttttttgccgttattgtttatctgcactacaaaatcctgattgctcatgggattcttttttgacaggtttacataaagatggaaagtagcttgtatgacgagtttggtaactatgttggacctgagattgagtctgacagagatagtgatgatgaagtagaagatgaagatctccaagataagcatcttgaagaaaatggttccgatggcgaacaagggcctgggggttctaatggctggattaccactatcaatgatgttgagatggacaaccaaattgttcttcctgaggataagaagtactaccctactgctgaggaggtttatggtgaggatgttgagaccttggttatgggtgaagata

SEQ ID NO: 149896 - DNA, 409 bp, Arabidopsis thaliana landsberg
tgaacttcaggtgcttcaatctgtggttccgataagcgatgacgaggtagttcttggacaatacgaaggatatagggatgatgatactgttccaaacgactcaaacactccaacatttgccacaacaatccttcgcatacacaacgaaagatgggaaggtaccatgtcccacttcactcttcatattttcatctatcagttcagaaacaatctggaaattgacataaaatatgaagaaaaaaacagaggtttgatgggtcaacatgatcatagatagcatcaatcttttggttaaagcatgtggaaccaaaatccgacatgtttgcatgcacattctaacggtcaaggatatatctttcaggtgttccatttatattaaaggccggaaaagcgttaattcaagaagcag

SEQ ID NO: 149897 - DNA, 1815 bp, Arabidopsis thaliana landsberg
gcgaggatgttccacccatgcagctcaaagaaagtgttttccgatgtatcatgcaattgtttgattgtcttttaactgaagtacatgaacgttgtaaaaagggcttaagcttggcgaaacgtctgaacagcagtttggccttcttctgttatgatcttttatatatcattgagccctgccaggtctatgaactggtatgtttttgttctgtatctttcagattatcatacatggcggtaacgatttgcattactaaagcgcatctgagtttctcgagaagtctcctgaggattttgttttttggtgtacaagtatgagcatggtttcaagaattgttctctcaaaagagttaatattttatatgatatatatattttaaactggttgggtagctaatcaatcatgtgcatgtgtatgcttttcagttgtttaaatttgtatgctagtattgttcacgaaaaaatcctttaattcaaaaacgttatgcagctcagtatctttcaactgatgtttgggacaaatttttagtttagaacatgggaaagatctgtctttcaaatatttttgatagtgataaatttacttgtcctcacactcaacaggtatcgttatacatggacaagttttctggtgtttgtcaatctgttctacacgaatgcaagctcacgtttttgcaaattatctccgaccatgatctttttgtagaaatgcctggtagagacccatcagacaggtgctctcccctagatactcattacctgtttattcagtttagcattgtcaaacatttgcactttattagcacacttgagcacatagaaataaaacataaagaggccacttttgcagtaagcatatgagctcttgaaaagatgcagaaaatagaagcctaaactgaactacagtctttcaacttcctttttgtgtgtgcgcatctggatgactttatatactaagctaactttatttgtatgttctaggaactatttatcatccatattaatacaggagttatttctctcactggatcatgatgagctgcctctgcgggcgaaggtatatgtgattcaaagtgtttgtacatagaagatacatatcatgtaagaatcttactttgtgaatcgttttccttttttggtatcctttcagggagcaagaattttagtgatccttttatgcaagcatgaatttgatgcgcggtaccagaaagctgaagataagctgtatattgcacaactgtattttccttttgtcgggcaggtacgtcacgatggcctaataaaacagaatgcataaattctttcatttaggaagtcctttaatccacttccgctttgaaattttgtgtggttaatggttattttccaagaggcttaaaagcagcccagaagcttatactcagttgtaattccctcaattattgtgtcagtaagcatccattattacacgaaaataagaaatatgttgaaaggagttaaatggtgttgcaataacaaccttttgattgattgctaattttattcaattatagcgaaggcccagctgataaattttcttgacatttaatgtttttcttcctttttgcagattttagatgaaatgcctgttttttataacctaaatgctactgaaaagcgtgaggttttaattggtgtgctgcaaattgttcgtaatctggatgacacatcacttgtcaaagcatggcagcagagcatcgctcgtactcgattatatttcaaactcatggaagaatgcctcatacttttcgaggttcctttccacaaccgtttcttaaaattttggaaaaaggcttga

SEQ ID NO: 149898 - DNA, 719 bp, Arabidopsis thaliana landsberg
cctgtcttcatatccaacagagatctcttcatggctccaattactgtcggcgatgttgttagacggaactatctctttcttcgatgaaaatgatcagcttcagaccgtctctgttcactctatcgccgccggtaaaaaagtcattctctttggtgttcctggtgctttcactcccacatgcaggtacaaagtttcaaacgctttttcagatttatcctttgatgctaagctgatggattcttagattttgatttgagaattggcgtttttggtttttctgaggttagcatgacccatgtgcctggattcattgggaaagcagaggagctgaagtcaaagggtatcgatgagatcatttgctttagtggtaagtatgaatattgatatgttttggatctctactctgttcttgcctctatgagtttgtgtatagtgaccaaaaaatgttgaatgcatttgttgcagtgaatgatccatttgtgatgaaggcatggggaaagacataccaagagaacaagcatgtgaagtttgtagcagatgggtctggagaatacacacatcttcttggacttgagcttgatctcaaggacaagggtcttggtattaggtcaaggagatttgctctgttgcttgataaccttaaggtaactgtagccaatgtcgaaaatggtggcgagttcacggtttccagcgcagaggatatccttaaggctctctaa

SEQ ID NO: 149899 - DNA, 1447 bp, Arabidopsis thaliana landsberg
ggatttaccagctgcagagatcaaaaacttcgtgattcattcgaacaatctaattttaccagctgcagagatcaaaaacttcgtgattcattcgaacaatctaattcagatttattattgggtctggttatctttttcttaccatattttttgtttcctcgttaagacgattgtttggtaatgtcgtcaccagacattgtcggaattttggaaaacacgatggaacttgttcggttaaggaaagaccaagaagaagttttggttgagatcaataagatgcataaaaagcttcaagcttgtaagtgtttctatttaaacttaatttctcagaacaattttagtaatttatttttctgttctaacaaatttgtgatgatctgagactaaatttttgtttgttggggatatgtttgtgtttgattagttattaattattatcagtgaaagttttgattttggatcatgaagtaattaaagaaaattaatctagattagtgattaatttagatactgctaaattaagctttgttgtaatgttgatgtagctcctgagatagttgagaagcctggtgatatttcattagcaaagcttaagaatttgtacattcaagcgaaagagctctcagaaaatgaagtaacgtaagccatttcttctttatacttgttacaatggtgaatgaatgaaaaaaagttagagactttgaatggattgtggactaatgttaccaccaaatgacctttctgatgttttggactttgtgtttaatgcgcagcgtatcgaacattttgcttactcagttggatttgctgcttccatatggaccaacagggcatcaaagaagaaagttaggaggtacacacaagttactttaattgaactgtaatgttattctctggcaaagacttatgcttgtaatgttaatcacataagtggtggcagaaggtaatgatcagaagaggaagaggatgaaagttgattcagatgtaataagactttctccttccatgagaaatcaaatcgaagcatatgcaagtcttaagggtgaacaggtaatctttcttataatgcacctgctttcgatattgcgatcagttccattctcacaatgtctgatttatgcaggttgctgcaagagttactgcagagagtgctgataaggatgaatggtttgtggttaaagttattcacttcgatagagaaacaaaagagtgagccttcgaacctttcttctgtatgatgttatgcctaatttttgaatatcacacaaatgcatatctgatagtttagtagctgaaacttatttgttgctgccaacacacacaaaagagttgtgcttgttaagtgcaaaggcttcatctatgaatctaaatatgtttaaaacttttcatccagagttgaagtacttgatgaagaaccaggagatgatgaagaaggaagcggtcagag

SEQ ID NO: 149900 - DNA, 2129 bp, Arabidopsis thaliana landsberg
  unsure (1)..(2129): unsure at all n locations
gtctcatctgctagatttcatagtatttctgttgtccatgtctcacagatattatggtggcaatgagtacattgatcagttggagacactttgccagaaccgggctttggcagccttccgcttagattctacgaaatggggggttaatgttcagccgttatctggttcacctgcaaactttgctgtctacactgcgatacttagccctcatgatcggatcatggtaaagaacttttgcactcttcacctcagctttacttgtgtgcttgatatagactgaatataatggcttgttttatacgattagggtttggatttacctcacggtggtcatctgtcgcatgggttcatgaccgctaaaaggcgtgtatctggaacttcaatatactttgagtccatgccttatcgacttgatgaatcaacaggtggtgcatttattatgaaaagcgtctctgcagctactttttgtatgaggctatttcctgatgtctgaatatttgaacaggcattgttgactacgatatgctcgagaaaactgctacacttttcagaccaaagcttattatcgcaggagctagtgcatacagccgagattttgactatcctcgcatgaggaaggtagaaacacaacctgatccttgaaaacacctttcatgtttctgtctacttttggctttcaaatataaatctgttatttcattttcctcacaatttgtatgaatttctgaagatcgcagactcagttggtgcttttctgatgatggatatggctcatatcagtgggcttgtggctgcttctgtggtagctgacccttttgagtattgtgatattgttacaacaacaactcacaaggtatgtctgttccgaaatatgaaacatgatttccatttgtatttagacaaaaagcgtttccagattatctgttagtaacacacttttaccttactagtctttgagaggtccgagaggtggcatgatcttcttcaggaaggatccaattaatggggttgatcttgaatctgccgtgaacaatgctgtcttccctggtttgcaggttgagatattcaccattatttttagctctcttagataattcttctcccaacgtgattaaaagttgtctgaattgtatatttgaagggtggccctcataaccacacaattggaggattagcagtctgcttgaaacacgcacaatcaccggaattcaaggcgtaccagaaaagagtacccacccttttacttgatcattaagttcttctgcaccggataaagtttgtaaattttgcttctaacaagaatcttttgctgcttgtttaggttgtgtctaactgtagagctctagctaaccgattggttgaactcgggtttaagctagtttctggtggcagcgataaccacttggttctcgtcgatcttagacccatggtaagattacaaactgtattaatggcttgaataaatcaacttttttcttaaaccagaaaatcacttatgataatgcggtgtcagtctaacatttttgttgtggttagggtatggatggtgcgcgggttgagaaaatcttagacatggcatctattactctcaacaagaactctgtccctggtgagttcctcctcctactctcggtcttcttcttcccatttgaaaagtcaattctgagagaagccctcttactcttttacaaaacagaaatgaagtcgataagtagaacttgtagaacacaactgttaaagaaatgcttaattgttgttatagcaaaaatcatcaattgatatatttatannnnnnnnnnnnnnnnnnnnnnnnnnntgagacagtgttgttgtgtatgtgaaatggtgaaacaggggacaaaagtgcgttggtaccagggggaataaggataggatccccggctatgacgacaagaggactgtcagagaaagactttgtagtagtggctgacttcatcaaggaaggtgtggagataacaatggaagccaagaaagccgcgccgggttcaaagcttcaagatttcaacaagttcgtgacatctcctgagtttccattgaaagagagagtgaagagtctaaaggagagagtggaaaccttcacatctcgttttcccattcctggcgtttaa

SEQ ID NO: 149901 - DNA, 569 bp, Arabidopsis thaliana landsberg
tctcgggaaagatcatcctcttcttctcgaatctcacgataaccatctcaaaatctcagatctggattcgatttgtaacggaaacaccgattcatccgccgatttgaaacaaacggctttagcggcggcgaatagatcgtacgcgccgtatagtttatgtccatcgggagtttcgctggtggattgtgacgggaaagtgtacagaggttggtatatggaatcggcggcgtataatcctagtatgggaccagtacaggcggcgttggttgattatgtggctaatggtggtggaggaggatacgagaggatcgtcggagcggttctggtggagaaagaagatgcggtggtgaggcaagagcacacggcgaggttgttattagagactatatcgccgaaatgcgaattcaaagtgtttcattgctatgaagcttagagaatcatttaattatctgaaaaataaaggaatttaaaaaaaaaaggaataaaaagaaaatgagactttttaattcttaaaagtgttgaaattgacgacaaaaaaaaaaaaaaagtgttgaaattgatgtgatgga

SEQ ID NO: 149902 - DNA, 1366 bp, Arabidopsis thaliana landsberg
  unsure (1)..(1366): unsure at all n locations
gcattgaactagaacacggcctggtttgttctctttccttctttgtttcttcttgtgcacttttgttcagtttagtagagctaatttcttattanaactgcaaattctcaggtgaattgtggggcggacctagctattttgtttgttgacacactagttaaagccaaatctccttgcaacgatgaaactcttggttagttcaaatttgcatataatcgctttgacttattgcagttttcggttatactgagatatttccgtcagatcgtatcaggtgtattttcaaattgtttcctcgggttcctgtaccacctcatttggtagatgtgagtgacgatgaagatgttcaaaatcttcaagaatctcttggggaagccagatcacgagtagaaaacttgacttcgttcttgagagctgctatcaagtaagccagagcatgtgtattatttcacttattcaactggtattttccatagtttttgtgtgaacatgtcaggtaggtatttcatagtgctgtttcttctttcttttagatggtctgcagaatttggaggcccacgtactggctatcctgagttgcatgctatgctgggtgattatctctacactgagtgtcctgaacttgtaatcctcttgtggccatttttgattataaagttatacgttttatctttcttcattatttatatatttctcgcaggatatggtccggatatcccgacattttgttagagctgaggaccccgagaaatttgcatctatgctggtcaactttatgggaagggtcagtctctttgtttcaagttgtctcatctttgattttctattattcctaagttttagtgtagagtagtttttccactgggatagaatttcaagaaatgtctggatttcaatttaacctctcgtggccaaaaatatggggtttcttacttgaatacaaccttacagtgttatcccggagaagatgacctcgcaattgcacgagcagttctcatgtaagttcatgttttataattggatacagagatagcagagtttgaaaggaaccaaagaggttgatttttctttttttgcatgataggtatttatccatgggtaacatgaaagatgcaaactttatgatggatgagattaagaaacaagcagagacaaaaaatcctgagctttcagaatcggaccttatccaatttatctcatatcttctggaaacgttagttacctacttagatattctttttcctgtagtcttttctgctcgttgttgtttaccttaagaaatttcttgcccaatacaggttgcagagggatgcattacctcttttcaatatggtaagagtaaaatattagtcaagcctagatggag

SEQ ID NO: 149903 - DNA, 882 bp, Arabidopsis thaliana landsberg
taaaaacagatctcttgtttgaacccaattactatattatgacagtgatataaattctatctatggaacaggagggagaagaagaagcttgaggaagagcttatggagttgaacaaagagcttgaagagttgggttctgagagtgtagaagctgcaattgtgaggctccaggaagaagttaagaattgcaaaaacatcctcaaatgtggtgtatgttttgatcggcctaaagaggtaacaatgctcataacaatcctatatctcactgtcaaggcagacataatgattcgataatcctttctcatcactgtcataatcatcatcgatagtcatatatcatgcatcagaagatatcattttcagcgcatatcaacaaccgctttttgtttcaaacattatttgcaggtggtaattgtgaaatgttatcatctgttctgccagcaatgcatccaacgtagcttagagatccgacaccggaaatgtccaggctgcggtaccgcctttggccagaatgacgtccggcttgtcaaaatgtaactcaaaacattcacacaaatgcactatgtgttggtacataacaaacttaattaaggtccacacagtctcatcttccttcccactcttccataaaattgttagttagatatgtcatatatgtatcggttaaaacactgaatctctggtttttccagctaagagggtgatgaaaaattaggtgggttctttatggagaaagtgtaggttttaggtatgtgacagtcgtgtttgtgttacctccatttatgccttggttttatgacatggggaccgacatagacatcacaaatggacggagatagttggttttgtattttcctcaaaacaatatagaattatgtgaac

SEQ ID NO: 149904 - DNA, 2121 bp, Arabidopsis thaliana landsberg
gtgattgtggataatcctcttgatatgatgtgcaactgctatggttcgcatgtactacgaaggcttctttgtctttgcaaaggagtctctttagattcccctgagctttatggcacaaaatcatcaaaagctctggccaaacgtttgaatctgaagatgtctcagctagatgacaataatttagaaatccctcatcaagggtttccaggtatgctcacgtaccttttatctgggctattaagttgtagcagagaggacatgaagtatcttcaagtcgatcagtatagcagtttggtcttacaggtaggttttatgtccctgtctaatcgtttatgtcattttcaagcaatttctttagtattgactgttatttagtctctctccctgattcacggtgattctaactaatcttctcttgacagacggctctcagactaatgctgaaacaagatgagcagttgcttgaaatcattccgcttattatgcgctgcaactctactaataaaaaagtagaagggtttcatatagagactaatgttgccaaagaaattttagagtcgatgaaggataattcattcagtcatctggtggaggtaactgagtctaacctctggctgctctgactgagttgtttataccaagattctgtaccttgcataaaacaattgatgatggacgtattgcctgctttagaccatgcaaaatattatctataatgattgctagttctctgtttgattccatgctgtaattggagtgttaattttcttagtcatctctttaaatgcgtttgcatgccattttcaggttattttggaagtggcccctgaaagtttgtataacgaaatgttcaacaaagttttcaagaattctttatttgagctttcagttgatcggtgtgcaaattttgttattcaagcattaatctcccatgcaagagaccaagagcaggtatctttatcatacacttcatctttttctgtgacatcaaaatttcattccaggtcttcttaacttcgaatttatttgtgctatttccgtgaagccagtaaacttacgttcaattgattttgtttacaagatgggtattatgtgggaagaattagctccaagattcaaggatcttcttgagcaagggaagtcaggtgttgtggcttctctgatagcggttagccaaaggcttcaaagtcatgaaaataaggtttctatgttttctaaatttagatgaaattgatttcttttctagttcaaaattgtgtcttatacagctgattttttactgatttgacagtgttgtgaggcccttgttggtgcagtatgctccacaaatgaatcccgtatctccattcttccacggttgctgtttcttgattactactttggttgtcgagataagtctacatgggagtgggcacctggtgcaaagatgcatgtcatgggttgtttgatacttcaggggatttttaagttttctagtgtatgtttccttctcttcttgtgttgacaaaaatagcttcagtgcttttaacttccaagtttttggcttttcatgtgcattcacagtaactcccaactttttctcaatttcacaggatcatatacagccatacataacaagcttaacttctatgaaagctgagtatatcactgaaacggcaaaagattccagtggagcacgtgtcatcgaggcctttcttgcctcagatgctgctacaaaacagaaacgcagactaattataaagtatgcactgcttcttgattttatatggggatatgtttatctcaagactgatagattccacagtagcttgtttatatgatttccttcattctgttttttcttcattcagtctcttaggctgcttgtcagttttttttttcaagcaattcttcatattttgatgatgtttcttttcaccaatgatttcgtcacagattacgtggacattttggcgagctctcattacacacgtctggttcatttacagttgagaagtgcttcgatgcatgtaatttgacactaagggaagccatagcatctgaactgttggatgtgaaagttgatctctcgaaaacaaagcaagggccttatctgcttaggaaacttgatatcgatgggta

SEQ ID NO: 149905 - DNA, 398 bp, Arabidopsis thaliana landsberg
aggaagatgaaaagtgtagatagctatgatgatgataaggaagatgaggaagaggagagcaatgatgataaggaagacaaaaaagaagatatcaagaagtctaacaagcgagggaaagggaagactgagaagactcgcgggaagacaaagagtgatgaagaaaagaaggatatagaacctaagactccttttttctctgatcgccctgtccgtgagcgaaagtctgttgaaaggcttgttgcggtggttgataaagattcttcaagggaattccatgttgaaaaggtttgccaatagtttactttgtttggtttatatatagtgtttcacggttagatctattagtaatttgcttttgataatacagggaaaagggacacctctcaaagatattccca

SEQ ID NO: 149906 - DNA, 931 bp, Arabidopsis thaliana landsberg
cagattctctccaacgttatctatttcgattagctcaagcctcaaggtgaagcttgaagcccatcaatggcggatgggtagcttctggtctccttgaagatgaatcggatttcagctatttctactcttgtcactcctctccctcttcttccgtcgtgctcctttgttccgacacgacggtgttatcctcgcagagctactccttattccaggcgaatcaatctcaagcctctcacttctcgcattgttctcctcacgcgccgtcgtcagcttggtcagatcgtggaggaggtagaagccgctaagaaacggtatgggaggctcaacacaattgtgatgaactcagttctcgaagcttgcgttcactgtggaaaaattgatttggctcttcggatgttccatgagatggcggaacctggtggaattggagtcgactctattagttacgctactatcttgaaggtgattttggttctttcctctaattttgaattttggttctttcctctaattttgaattttgatttcgtgtgtcaacctgaatttgatgtcgaatcgtttgtattggttaagggattgggtaaggctcggaggattgatgaagcgttccaaatgctggagactatagagtatggaactgctgctgggaatcccaaattgtcatcatctcttatctatggtctgcttgacgctcttatcaatgctggtaagattcttaagctgtaactgtttctcgtgctcaacaggctgcagctaatcttgattatgtaatcttggtgttagtgaaatggcctgaagctgatgcaaaaacacttgatattgatctagtgcaggagatttacgtcgtgccaatggtctgcttgcacgatatgatattttgcttctagatcatggtactccgtcagttcttatctataacttgctgatgaag

SEQ ID NO: 149907 - DNA, 1534 bp, Arabidopsis thaliana landsberg
ttgtcctccatacacttagcacaactgataaatcttttgaggtaaaatcagctttagatcaaggtttttctagtcatctctactcataaagatcaaagcttttgctattctcattttctaccaagagagaatatcatgatgatgggaaaagaggatttgggtttaagtcttagcttgggatttgcacaaaaccaccatcctctccagctaaatcttaaacccacttcttcgccaatgtccaatctccagatgtttccatggaaccaaacccttgtttcttcctcaggtaagcttcttcttcaacaaagtcttgataacctttttccacaaggaaacaacacagatcttgaaataaccctttttcatttttcagatcaacaaaagcaacagtttcttaggaaaatcgacgtgaacagcttgccaacgacggtggatttggaggaggagacaggagtttcatctcctaacagtacgatctcgagtacagtgagcggcaagaggaggagtgaaagagaaggaacctccggtggtggtgccggagatgaccttgacatcactctagatagatcttcctcacgtggaacctccgatgaagaggaagattacggaggtgaaacttgtaggaagaagcttaggctatccaaagatcaatccgcagttctcgaagacactttcaaggagcacaatactctcaatcccgtaagtcattcatccatctctcggagcgtgaaagtattattgtaaaatactctgttttaacaagggctttatggtaaatctacagaaacagaagctggctttggctaagaagctaggtttaacagcaagacaagtggaagtgtggttccaaaacagaagagcaaggtgagagaactagagtgctcattattcttacatattagttgaccatttagcccctaaagagcaatgttatttacaatacaacccatttttttgtgcctaataggacaaagttaaagcaaaccgaagtggattgcgagtatttgaaaagatgtgttgagaaattaacggaagagaatcggcggctcgagaaagaggcagcggaattaagagcattaaagctttcaccgcggctgtatggtcagatgagtccaccgaccacgctttcgatgtgtccatcgtgtgaacgtgtggccggaccatcctcatctaaccacaaccagcgatctgtctcattgagtccatggctccaaatggcccatgggtcaacctttgatgtgatgcgtcctaggtcttaactttaatgctgcttctatgggttgtgtgtgggtcattgtactttttagattattgactctcagctaatgtatccttaaaagcctttttctactttaaatttactttaatctaattaaattagttattcttgtcttcttgataacaaacaaatttataataataataaaaaaaaaacaggataaaaagaacagtttttcttttatttgtttttgataaacccagctcttcttaaccaataaccattatacattcttgacataatcatgaagccatc

SEQ ID NO: 149908 - DNA, 2087 bp, Arabidopsis thaliana landsberg
atcatcgattcttacattcaggttggattttctcattcaaacattctgcgaacaatcgtccaccgtgcttgctcgaggtttccccatcttgattggtataattatgggtatagtcaattactccaaggttcaacaaccctggaagtctctgaggacccccagaaagtgtttgtcatatttggaggagatacttcagagcggcaggtgtccgtcatgagtggaacaaatgtctgggtcaatttgcaaagatatgtagatgtaagttgaaaagaacgcagacatcatttgaggtgtaatcatgtatcttatgaaatcattaattcctgtgtatattgtcattaaacgataatagtgggtgcaataggattgccctgactctgatgatcttgttctttacagcttaatgtaactccctgtttgctttccccctcacttagcaactcattaggcgcatcttcgaacttggacaatagagaagtctgggttttgccgtaagtatattctcagacatatgttgaaataatatattcagtagtctgtacacatagatacaaatgttgacctcccagacgatagaggggacaccggtataacatttcacatggatgtatgaaattattttagcttttctcatttgtaacgctatagacggtcaacatcactaatgagtttctttattctcagctactcggttgtgctaaggcacactgctgaggaagttcttgcagcgtgcttagaagcagtcgagcctgttagggctttatttacatctctgctgcagaagcaagtgatggaggatcttatggatggttttaagaatcaaagctggtttgcagggtttgatataacagacgagctgcccagaaagtactcattgaaagagtggatcaagcatgccaaggaagctcaagcaactgtcttcattgcaggttagtcttgtaagagagagactgcaatgtttccttttttgtactaacatgactacatgagcaaatataagattatgagaaaaagctatcaacaaactaaatcagaaaacctagttgcaagatcaaaaacaaaagccgggaatgttgatacattttttgtttaatattgcaatgttgatactcttcctgacgcacttttttttggtaagagagtgcttctgttctgcatgcaacacatgcaacattatgattttagttttcaaaatgctaactggcagtgcatggaggaattggtgaagatggtacactgcagggcttgctggaggatgaaggagtttcttatacaggttagttgctacttttgatgtagcatttgggcttctatttaattctccacataatatatgttcacggtattgtttaattttccttttctgttcttaaataaaggtccaggcgtactagcttcaaggacttgtatggacaaggttatgacatctcaggctcttagtaatgtatggaaaccaatcgatatactcttcaagccgatttggaaaccgtgagtattattgtaacaatttttgttgttgttgttgttgtgtgtttcttgtaatcaatagctttcagagtttggaattcataccataagcaaagatgtgaagagaacagaggatataatgcatgagaccttcccaaatgtttgggatgaattaatcaagaagcttcagtgtctcacactatgtgttaaaccagcaaaggatggatgttccactggcgttgcaagattatggtaacttgtatttaaaattcttttatcgttaccactaagttttttgggtgtgtgattaaacctttgtgtttttctgcagttcctctgaagaccttgctgtatatgtacaagctttgaaagattgtataccaagaattcctccaaacactctttctaaggttaaaaaaaaaataattttgttagtacaaccgtgaagcattcattattaagttaggattatccaaatccgtatcttcacttgtgtgtgtagacacatggaatgattgagatgccaaatcctactccagaattcttgatttttgaaccatttgtcgaaaccgatgaaatcatagtttcatccaaagccaagcagcagctctcttggaaag

SEQ ID NO: 149909 - DNA, 565 bp, Arabidopsis thaliana landsberg
acgtgaaagaaccagttttcagattgatgatcatgatgtgactgatgaattggaaaatgttatgtttggtggtgattatgttaaggaggaggaggagaagaaggtagaggaagagttgttgaaggaggattggtctgttggtgaaaaggagaaacaacacaggaaatctgtaactaagaatagaccggtgtttagattgtctttggagaaaactatccctccgaaatctttagatgagatctctttaacagagaaaagaaggtaatatggtttgtgatttcaatcatttcatagattcttgtttgaaaataacaatctttttctgattgttttgtttatgtgacacaactgcagcgaaagaccgatgactcaggtagaagaaaaaccggttcaccgccagagattcggtctcttgaggtaagtcagagtctttgtgttttctttctttcttgcattatcttgatttgttgttcctggttttgattatatgttgtttctttgataaaccaatagctgtttcataagtaatgctaaaactcaagatcagaaccagagcaggaataag

SEQ ID NO: 149910 - DNA, 504 bp, Arabidopsis thaliana landsberg
gtgtaagaaccgggtcgatactttgaagaaggaagtccatagcagagaaagctaaactctcgccgtcgacttggcgtttctataaccgcctcgatgttctaatcggtcccgttgtgaagaaatcggctggcggagttgtcaaatcagcgccttttaagaatcatctgaatccaactggatcgaactctactggaagctctcttgaagatgatgatgaggatgatgatgaggttggtgattgggaattcgttgctaggaagcatcctcgtgtggaagaggtagatctgagtgaaggatcaacgtgtagggaactagctacggcgattctcaagtttggagaagtttacgagagaattgaagggaagaagcaacagatgatgattgagttggagaagcagagaatggaagtgacaaaggaggtagagttaaaacgaatgaacatgttgatggagatgcagttagagattgagaaatcaaagcaccggaaacgcgcaagtgcttcag

SEQ ID NO: 149911 - DNA, 2579 bp, Arabidopsis thaliana landsberg
atgggcatatcttcattatttccagtgcaagtcgcagtttggcatgaaactatagggccaggtggttttgaaagagacatctgtgttaactctccaacaggaagtggaaagactctttcttatgctttaccaattgtgcagctccttgcatctcgtcctgtgagatgccttcgtgctttagtcgtattgccaacacgtgatttagccttgcaggtaggttctcacttatgcttttttgtctatatcgcaagcatatggtgtactgtactcaagtcttccgttttcacatttctaagtttaggttaaagatgtatttgatgctatagctccagctgtaggattatctgttggctcagctgtgggtcaatcttctatagctggtgaaatctcacagcttatcaagacacctaaacttgatgcgggaatatgctatgatcccgatgatctttctcaaaaccttgaaagtgctgtggacatattagtagcaacaccaggaaggctgatggatcatatcaacaacaccaagggctttacgcttgagcatttgcgttaccttgtatgcagaatttcctgatttgccttctcagttcttcttgttcttagtttccgtttgatcgatgaagctaattgtttcaggttgttgatgaaaccgacagattgcttagggaggcatatcaatcctggctaccaactgttctgcaactgactcagacatctgacgatagcctatttccttcatttacaccatttgttccttccgcttttggttctctgcagactgttcgtagacagtgagttccgtgttactagcttatttcttttcgtatgctaatagtagtcacataataacatgatcatgttaaacgttgtaatcaaaactgattaaaaagaactaatgtgatgtctgctttaaaatctcagaagtgtggagagaggattcaagggtaaaccatacccaaggctggtgaaaatggtactatcagctacattgacgcaggatccaagcaagcttattcagcttgacctgcatcacccgttattcatgacaactggaggaagccgatacagactacctgagaagttggaatgtcttagactggtatatatgtgcctttaatgtgtcggttttcatcaagtttgtgctttaacagaagatttatctacaaaagcttatctccacaactttcttcccatgtcttttaacagatttgcgaaaccggaatgaagcctgtatatttggttgctctcctaaaatcatgggaaggtgaaaagtgtatcattttcacatcttccgttgagacaactcgtcgtctatgcaagttactcaacttttttggtgacccaaaaataaaagcaaaagagtattcaggtggtcttaaccaatcacttcggaggtaatattcgaatcttgcattacttagtagcaccgtatactatctttggaacccagaactaacgaattcttctcatttattgaacaaaatttgcctgcagcaaagaactaaaagcgtttagaaaaggtgatatccaagttcttgttgcatctgatgctctaacacgtggaatggatgttaaaggggtaacaaatgttattaattatgatatgccaccatttgcaaagaccttcatccatcgtgctggacggacagctagagcaggccaggctggccgctgcttcacattgctgagtaatcatgaggtaaactgatattatgtactacacaaacacagaaacattctttctctatatgcttgtccacgttctctatatgcttgtccacgtatgtgtaaacacaagcttgaggtacctcagataaaagatactaggtaaagcattgtgtctgaaacagggaagaagattcagtttcataatcttgtgctcacctcactgaatcattaatctcttaggataaatgtataggaagactgctggaacccaccctctatctgatcctctgcgactttttatatactgaagctcttgactctagctccatttgctcattcggatatataaaaatttcaggtaaggcgtttctcgaagctcctgaagaaagttgggagtgattcatgtcctatctatccgatcccgcctacttcattagattccattcgtgccacttacacacccggtaagtacctagccttgtgtatatagctctaggaaacactctgcagatagacatgaaaaataggggagtaatgtggaattgagaatcagcactgctgcttagttgttaaacctcttaatgagcatgtgaatttagatttagagcattactttacgaatgtagatttagagttttatggaaccctgtcagtgcataggagacattagaggccattgaatctgttaactatattttggtaatgatgatgatgaagtcatttctcatttcagctctagagaagctcaaggagttggttgagtcagaagcacccaagaaaggaagacaagcttttagacataattcaagaacgggtaactcccaaaccaaacttaacaaaccaagatcagaagcatagttctcctgtgatgatccctcgggtgtgtcgggtcaagtacaagttattgggtg

SEQ ID NO: 149912 - DNA, 1217 bp, Arabidopsis thaliana landsberg
aatcttcttctatccacaaatgaaaatgatgcagatctgaagattgctgattttggatttgcaaggtattgtcatcagcaccccttgttactagatcaaagagtgtaatatgaatgaattagagaaggtttcaaatgggctcaagctgcttttgaatgtatattgtcgaatttctaggtaatttcattgttttcttgggggattatacttattatacgcctcccccattttgaacatcgctcttttcttgacgcagatcgttgcaacctagggggctcgcagagactttatgcggttcaccattgtatatggccccagagatcatgcaactccagaagtatgatgcaaaggtcagacctttctcttactaagctacctaggcccttctcttgacattatctccttacaatcctagctgaatacacaggcagatctctggagtgttggtgctattttatttcaacttgtgacaggcagaaccccttttacaggaaacagccaaattcaggttttgtgttctgtctcattgacttctatattatgtatgtgtttgtattctggtgcattaaactaatacgttctccatcgtgtgtttacagttgctccaaaacattataagatcaaccgaattacattttccaggggactgtagagatttaagcttggactgcatagacctgtgtcagaagttactgcgccgtaatccaggtcagcactaattctgcttgaagtagtggagactactattcttttgcatgaaaccatatgccccaggttctattggcatgtgtgttgatctaaaaatgtgaaattatattgaattgtggccacgttggattggcgattcaagcattttataatttgtaccgtgttcagagttttttgtttgattagcacaattaaaaacacaaattgtactgttgccatttcagtctgtcctaactttccgagtaactcatatcaacgggagttgcggagttttccagaacttggaattgtgatttgaatagcggtttatactaaactctagtcatctcctacagttcaccgcgtattttattcgagagagcatggtcctactctgtgtgtatccaaatacgattacaaatcattcttgaatatattgtcttttgcagtggaacgtttgacatttgaagagttctttaatcaccctttcctttcggacaggcagtcatatgatttctccaggtagatgt

SEQ ID NO: 149913 - DNA, 317 bp, Arabidopsis thaliana landsberg
caggaaagagagactccgttgatggctaccaccaccgtcgtatgcggcggaggaggagatgttgagggttgcgatggcgagagaagcctggatctgttaccggcggctctcttggagactattatgacgaaactcgatgttgcgtctctctgctcgttggcttctacttgcaaaacacttaagagctgtgtcactcgtgttctcaccttcactcccaacttccacatcttcgtaagtctccacatttctttaagggtttgatttggatttcgatttcaaactgaaactgtataaaaagttttagtctttttggattt

SEQ ID NO: 149914 - DNA, 306 bp, Arabidopsis thaliana landsberg
catctatctcctccactatctcctctctgcatctgacactctatagacattgttgataaaaatgagtgcaccaggctcttctagatccattccattcaaatggaagaaacgattggtgatggattcgccgtcttcgaaatctcaaaccgggaatccaaatccgtcttctgtagcatagcctacgccgaaaaaaccacttgagaacatgcttagtagatcgagaaaccgatctgtggctttatcagtgaaagaaattcgtcaagccgctggatctcgtcgcagatctgaagatccgaatgaaaaatc

SEQ ID NO: 149915 - DNA, 323 bp, Arabidopsis thaliana landsberg
tcttaaccaaacccaaagtccttcaacaagaagatccaatggctgatccggcaacgagttctccgttgttggataaccatgaaggttgggaagatgaaagaggaaggagatcaagatcatcaactttggttcaaaaagtgatcgacgtggaagaagcaaaagctcaaatgatttactctctgccaatgatactcaccaatgttttctactactgtatccctataacttctgtgatgtttgcttctcacctcggtcaactcgagctcgccggtgccacccttgccaattcttgggccaccgtctccggttttgccttcatggta

SEQ ID NO: 149916 - DNA, 706 bp, Arabidopsis thaliana landsberg
gatcttgatgacgtggtggcggcagctctgacatattatggtggaaagaatgtattagacagtactccgcttccaacacgtttggagaaagacagcgatccacgtttggccacgtctccgttgaaatttccgggaaagttggctattgatactcttaataacaggctattcatctcagacagtaaccataaccgtattgtatgtcctagcctctttctgtaacccttgctatctcttcttgttatctaatatcaatattctgtgtgattttcagattgtaactgatctcgaaggaaatttcatagtccaaattggcagcagtggagaagaaggtttccaagatggttccttcgaagatgctgcatttaatcgtcctcaggtacatatgatatactctcactttgtattagttgttcatcgatagattcgttgttgcatacatgattgtattttttcagggactagcttataatgctaagaagaatcttctttatgttgctgacaccgagaatcatgctttgaggtatgtaactatgtcttctaatgcaagtaggaatcttaaacttttggttcggcatcttattttggagtttcattaattgttgttggtagagagattgattttgtcaacgagagagtacagactctggctggtaatggaactaaaggctcagactaccaaggtggaagaaaaggaaccaaacag

SEQ ID NO: 149917 - DNA, 752 bp, Arabidopsis thaliana landsberg
gtcttatcatttattcatttctctcttcttcatcgatctttggcttttagaaaacctaatcagaaatggcaacggcgtcgtttaacatgcagtcagtgttcgctgctcctttccgtgtattgactacacgcaacatcagaaacacaaaccaactcttcttcaagaggaatgctccggtaggagtcagatgcatggctcaggtatatatatacactaacctcatagtccttccacttccctacgttacttatttgacttttaatcctgaccgttccttacattgactatttttttagggcgatcctatcaaggaagatccttctgtgccctcgacctcgacttcggccactccaccacaaatgccacagtctcctcctccaccagttagcaagcctaaggtatgatctaatgatcaaagtcattaatatatatcactagctaaaaaatgaagctaatgaataattttcttattgtctaggtgagtacgaagtttggagatttgctagcgtttagcggtccagcacccgagaggatcaacgggagactagcaatggttggattcgtggcggccatcgccgtggagttatcaaagggagaaaacgtgtttgctcagatctctgacggtggtgtcgggtggtttctaggaacaacagcgttgttgacgttggcatcgatggttccgttgttcaagggaataagggcagaggcaaagtcaaaagggttcatgacttcagacgccgagctatggaacg

SEQ ID NO: 149918 - DNA, 1705 bp, Arabidopsis thaliana landsberg
atgaatcttgacgttccagagccatggctggttgaaccagttattgccatgtatgtattttcccctggaaaagaaaatgggattatgctgttctttttggctcaaatttgtcatggcatttgcttgtttagttcacttatttttgcttatgcctgaccttctgcttttttgtttcctctctgctggatgtctttgtccagtcatgatcttgataatatattgcttgagaatctaggagataccactacactgcaggcagtttttgaggttgaatctcttgttcttacaggttagcttttctaaacttattcttcaagggtggatggatttgttcatgttattattaacataacccttgcacaggtcattgcgcggaaaaagatcatgaggctcctcgtggccttcagctgattctgggaaccaaaaatagaccgcatttggttgatacccttgtaatggccaatttgggttattggcagatgaaagtatccccaggggtttggtatttgcaacttgctccgggtagaagttctgagctatacgctttgaaaggaggaaatgatgggagtcaagatcaatcctcgctgaaacgtataactatcgatgatctgcgtggtaaagttgttcatctagaagtagttaagagaaagggtaaggagcatgaaaagttgctagttccttcagacggtgatgatgctgtgcaacaaaacaaggaagtgagtgctactttactcgaatagaagatttacaataaaactattggtccttaaaagtgttggttatatattctctaatgacgctcttttgttttagcagggaagctggaactcaaatttcttgaaatgggcgtctggttttgttggtggtcgtcaacaatcaatgaagggaggtcctgacaaagtgagtagcttttgtaatatggactaacttttatgattgttgtaaacctgttgcatctcaattctgcatgattctaacatgtgggctacctttgcaacaattttaatcaagttatttctatttatcatcttttcaggagcatgagaagggtgggcgacaagggaaaacgataaatatattctccattgcttcagggcatttgtaagcgctatcatttttctaacctgcttgaccgcacacattgacttaatataattacgtgcgttgaaccattttagaaaatctgaattactttaagtgcatcaatcatatgaaaagaaaatcatatttggtatttctacgtctatatgtagattggatattcgtgtgcataagagttttaagtgtattatgtgaacaaaaaaagtttaatatatgatttgctggtatcaattcatttctgacgctgaggcactgcttatgacagatacgagcgtttccttaagattatgattctcagtgtcctgaagaacaccaatcgtcctgtaaaattctggtttattaagaattatctctctcctcaatttaaggttggctccttgtttctttgcttccacatatgccttttgtgtttggatctatatatgtcttcttatctctagatgtgaacttatcttctagccacattaacttaatgtgtatcgcattctaatcttgcaggatgtgattccacatatggcacaaagaatacaactttgagtatgagctgattacatacaaatggccggcctggttgcataaacagaaagaaaagcaacgaattatt

SEQ ID NO: 149919 - DNA, 882 bp, Arabidopsis thaliana landsberg
taaaaacatttcttttctggtccactcgttttaacttccggcgatcgattttcacggcgagaaatgttgtcggcgcttggctttgctttactcagcatcttcgcgatcctcttgtcgttatcaaccttgtctaatggattacttcaacctcgtaggatttctcatggcttgacggaaagtagcaagtacttgacgagggatgagctctggttcaatcaaaccctagatcattactctccttctgtaatcaatcttcccgacttcgtttcttcttcaatttgaattttcttcttgcattatcgaattgtttctaatttcgggattcgaattgtttctaattttatctcaggatcatcgcgaattcaaacagcgatactatgaatatctagaccatttacgagttcctgatggacctatctttatgatgatctgtggcgaaggaccttgcaatggaatccccaatgactatataactgtaagattttatttgattgattaatctattctcatcgcatcgaaaaatttctaaatttgctctgtttttcttgataaacatgttcatcaggtgttagcaaagaagtttgatgcaggcattgtttcacttgagcatcgttattacggaaagagctcaccgtttaagtcattagccactgagaatctcaagtatctttcttctaaacaggctcttttcgatttagctgctttccgccaatattaccaggcaagtactagtcttatggtttttgtttctctaggatcatatgtttgagaagttgcgtttatagtagcatgttttgggattttttttgtggatgcaggactctttaaatgttaagtttaatagaagtggcgatgttgagaatccgtggtttttcttggagc

SEQ ID NO: 149920 - DNA, 280 bp, Arabidopsis thaliana landsberg
gatgggaaagttatcatatggacagtgggaaaagaaggtgagcaatgggaaggtaaggttctcaaggactttatgactcctgtgtggcgggtctcgtggtcgatgaccggtaacttattggccgtatccgatgggaacaacaacgtgactgtgtggaaagaggctgttgatggagagtgggaacacgttactgctgttgagccttaagcttttgatgctctgctatatctctgctcttgctttaaagaactgaatcaaacattttttctttactcttttc

SEQ ID NO: 149921 - DNA, 942 bp, Arabidopsis thaliana landsberg
attccaaataagggaaacatttattcggtgaatgaaggcaatgcgcagaactgggatggtccaactacaaagtatgtagagaaagtgattaaatctgattcaagtctagcttgcttgatatattcatggttttcgttttcggtttcggtttcggtgtaggtatgtagagaaatgcaagtttcctaaagatggttctcctgcaaagtctctgagatacgtaggaaggtattatataagatcctttatctattttaaagctctgtcatagtaaatagcatatgctttggtccctttttggttcatttcattttgttaacagtatggtagctgatgttcatcgtacactactttatggaggaatcttcttgtacccggctgacaagaaaagccccaatggaaaattgcggtaagcttaagataaagctagttcaaatacataatcactaaaaggttgttctggttttgagatcgataaaccgttaaaccccgcagaaaacttaacactgtttaggcttatatatgtggacagagtctcgtatgaagttttcccgatgtcgtttttgatggagcaagccggaggtcaggcctttacgggaaagaaaagggtatacattttcctctataccctgattttattgtcacttgacagaaatttaaagattttctatacggtttacgtttcctgatgcaggcgctagaccttgtcccggagaagatccatgagcgttctccgatatttcttggtagctacgatgatgtagaagagattaaagctctctatgctgaggaggaaaagaagaactaagcttctcattcttcttttattctcttactgtctctgtctctcttatttctatatacagtatcttcttctgatgagaagaacaacataactcatttacaaaaggaagatctttctttatctttaaatgcacataaaaa

SEQ ID NO: 149922 - DNA, 989 bp, Arabidopsis thaliana landsberg
gagagctaataaccgaccttatgctaagtttctttcaagtctccaatcaaacagccatgagagaaattgtgacgattcacgttggaaaatttcgacactttgttggctctcacttttggaacttccataatagagaagcaaaacctcctgttgaactctctgctccgattcttttaacaatggattctgggttttgtctgtctctgtttttcattacaaaagtgtttgtcttttttgctataaatcgattgggtttgctaaagttaagaacttttacttgaaatgtaggatgaattgctcggattggctagtgaccctgaaagcgatccaatctttagaaaccataatctcgacatggatgttctctaccgctccggtgagacccagcaggtgagagatgattgatatttcgttgactttgatcaatctcacttgtttttgcaaatctcaacatttgtgtggcggaaatttatacagggggttgctacatacactcctcgtttggtttcagtcaacttaaaaggtaataatcttagctttatctttcgattagaagattctggatttgatatataatggtggtttatatgtttacatctgaaactgtttcgtctttcaggggcactagggaccatgagctcacgcggtacactctacaacgaaggttcttcatcaagatcagattcttcagcaacctggtcagatttgctaagtttttatggtttttaggttaattcaatcttagtgcatataaaacttgattttagagtaatagcttgttcttcaattcaggtgatgtgaataatgtgatcttatctttaattttgtgtcttgtaggtttggagatgttgatactcagagatctgaacctcgaaagaggaacttgtttctgcaaagtttgtacgaggaagaacatgtagtggggaaagaaaaggcgaaagagattgaggacaaagatattgttggatgcttagatgaggaagttgaat

SEQ ID NO: 149923 - DNA, 3166 bp, Arabidopsis thaliana landsberg
acagcctctcatatccaacatagctccaactccatcaggtactcctgcaacaaatccaggtctgcgttctcctgcaccacacctaaactcatatagaccatcctcttcaactcccgtcgccacagctactccaacctcgtcagtgcctcctcaagctttgacatattcagctgtgtcaattcagcagcagcaagaacaacaaccgcaacagagcttgagcagtggattgcagagcaacaatgaagtggtttgtctttctgacgacgagtgacctaagaggagagatggttagggtcttagttattgatttttagagagttaataatagtatatatatatgtataagtaggttacctaatctctgtcgttaatctaatttagtgagtcaggaaccgactcgttggctaaggtctctccttttgaaacgcaacgttctactttcatgtatataaatacagtctgatcacacaacacaaattgatgattgaaaatactactgatttaactttatagaaaacccaaattatagagcgacaactttataaacatgtcaaacttcgaagttaaaatttaagaccccataattttacaattatagattttaatactccaactattttgtgatgttaaaagaagtatccgagtcttttctttccagtttccccaccgtcccatgactcccccagccagtagaaaaagccaaaaaagtaaacaaaaagtcgttaaaaaagttaaattaaaaaataaatagatagttgacgtttactaaagtgatttgaattgaacaattcgctttcttcttctttatggtaaccgcttcttcttcttcttcttcttctttttattcgtcttccaagtctttttgatcttatcaactttctccttcttctccatcttaatctctctacttgcgagaatcgaaatcggaaagtgtaacaatggagaacccgaacaacttgcgagaatcgaaatcgcatctcaacttgaacgagtgtctcactcttcccaaaacgctcgatccttcatctccttctcccagcgatgcctcaagatcatccgttgacccgaaccgtcccgattcttcttcttctcgccctggctctactccttcctcttctggcctccgtttctctaaggttctctctcttactcctctctaacatctctgtattatccaaaaatccaatattttctctttttcttatgtcggtgatgcgaaattgatgcaatttcatcatcgaattggtttaaatatataatcaacgtttgtggcttaagttttggtttagggttgacgcaattttatcgtttgtggccgaatgggttgtaacttttaattagtgttgatttctagttgtcccttttcctattaggtttctaggtctaagatttaaagattgtaaaatagagattgttttctttgaaaatttgcagggcaggtgcgcgatttgcttgtatgagattagaaaggaagacgggaaggctatttttactgcagagtgctctcattccttccattttgactgtattacctccaacgtcaaacacggaaacaggatttgccctttatgcagaactcagtggaaacaagtccctttgtgtgatgttgactctgtccctacctttgtggctcaaaggggttttgaagatgacgagcctttacctcaaggagatacccaaatccacagtgatggtcatcgttcggatcatcaagccctcgagattaaactcttccctgaagtctctgcactggccaaaccggtctctcgtgctgattttgctgttctggttcatcttaaggctgagggtgtgagtgatgatgctaggcgcgctcgagctcctttggatcttattaccgttcttgatgtgagtggtagcatggatggagtcaaaatggagcttatgaaaaatgcaatgagttttgtgattcagaatcttggtgagactgataggctttctgttatctccttctcctccatggctcgcagactattccctcttagactgatgtctgagacagggaagcaagcggcgatgcaggctgttaactccttggttgctgacggcgggacaaacattgcagaggggctcaagattggtgcgagagtgattgagggtagacggtggaagaaccctgtttccgggatgatgctgttgtctgatggacaggacaactttaccttttctcatgctggggtccgtctgagaacagattacgagtctttgcttcccagttcttgccggattccaattcatacctttgggtttggctcagatcacgatgctgagctaatgcacacaatttctgaagtctctagtggcacgttttcgttcatcgaaacagagactgtgattcaggatgcttttgcgcaatgcattggagggcttctcagcgtcgtgattcttgaacaagttgttgaaatcgagtgcattcatgagcagggcctgaaaatatcctctataaaagcaggaagctacagaagccgtatagcacctgatgcaagaaccgccacaatcgatgtgggagacatgtacgctgaagaagaaagggacttcctggtgcttctagaaattccgtgctgcgacaatgggtctggggaatctgaatctttgtctttgctgaaggttagatgcgtctacaaagatcctgttaccaaagagatagtccatgttgaatctggagaactaagcatccaaaggccaatgaagctaacagggaaagaagtggtgtccatagaggttgacaggcaactaaacaggttccttgtttcacaagctatgtcagaggctagggttttagcggatgggggtgacctgagcggggcagttgggattcttagaaaccgtgagagggaattgtcggagacaccgtctgctcaatccagcgacaggctttgtcaatcactgtcgtctgagttgagtgcgttgcaagaaaggatgactagcaggaggatgtaccggacatcagggcgagcttacgccttctcgagcatgagctcgcattcggctcagagagcaactgctcgtggagattcgacccagggttttagcccggtgcaggcgtatcagacgtctccaatggctcgtatggtgactcggtctcagctactggtgctcgaaagccctactaaaccgtcccctggtcgtggagagcaaagctgaattt

SEQ ID NO: 149924 - DNA, 1108 bp, Arabidopsis thaliana landsberg
atggtgtttgccctgtattgaggatacttctgctgatgattgttgtgatattgtaatggctgctggaaagagggctgggatcttcaagatgttagaaactgtgcaagcctcccgttaaacgaactccaaaagaacggactcaagggaaatcatgtacggaagtagatgagataagtgggaacatggatcaagaaatatggcaggaattccctcaagatctctttgaagacgttgtttccagactaccaatggctacttttttccagttccgtgcagtttgccgtaaatggaatgctcttattgattcagatagcttctccagatgcttcactgagcttcctcagaccatcccatggttctacaccataacccacgagaatgtcaactcaggacaagtgtacgacccttctttgaagaaatggcaccatccgattatcccagcactacccaagaagagtattgttttgccaatggcttctgcaggaggtctagtgtgcttcctcgacattggtcataggaacttctacgtgagcaacccgcttaccaagtctttcagggagttgcctgctaggtcgttcaaggtctggtctcgtgttgcggtaggaatgactctgaatggaaactccaccagtcatgggtataaggtcttgtgggttggatgtgaaggagagtacgaagtctatgattccctgagtaatgtgtggaccaaacgagggaccatcccgtccaacataaagctcccggtgttgctcaactttaagtcacagccagtggctatccacagcacactttacttcatgttaacagatcccgaagggatattgtcctatgacatggtctctgggaaatggaaacagttcattatacctggcccaccagacctgagcgatcacacgctggctgcgtgcggagagcggttgatgctggtgggtctactgactaaaaacgctgccacttgcgtttgcatatgggagctgcagaagatgacactgttgtggaaggaggttgacagaatgccaaacatatggtgcttggagttttacggaaagcacattaggatgaattggctgggcaacaaaaggtggccgatattattgaacttgaggtc

SEQ ID NO: 149925 - DNA, 1071 bp, Arabidopsis thaliana landsberg
aataatgctttgagcttgatgatttcgattttagtttcctgttagtgtttgttttcttctgtaaagcttggattttttttggtttcttcgatggcgaatgtggaagctgatttcagaacatcaggtgagttcaaattttgacttcaattttctcaagttttgaattttctttttctcttgggaaaaagtcaacatttttaactctaatcatgagccaaacaagcttagagccacttataatttctattataaagcttcaaattttgcaactttggttgaaattgatagctgttggttggaatttagggtctaatgatgatgaattgtacacggagctatggaaagcttgtgcagggccacttgtggaagttcctcgttatggtgaaagagttttctacttccctcaaggtcacatggaacaagtaaagaatccaaactcttaagattattccttgttttgtctttctcaagttttaagatttgaatgtttgtcttttggcagttggttgcttcgactaatcaaggagttgttgatcaagagataccagtgtttaatcttcctccaaagatactttgtcgtgttcttagtgttacgttaaaagcagaacatgagaccgatgaggtttacgctcagatcacattacaaccagaagaagatgtaagtttaaagaatcttgaattaatgtgataaattcagtgaatttgatttagattttgtgtgtattttattatgcagcaaagtgaaccaacaagtcttgacccacctttagtagaaccagctaaaccaacggttgattcttttgtgaagattctaacagcttctgatacaagcacacatggtggattctctgttcttcgtaaacacgccactgagtgtttaccttcacttgtaaatgcttttatctttccatcttcattttacagagtttggcctttcttagctgaatttgtcactttatgttttgattttgattttccttacctaggatatgacacaacctacaccgactcaagaacttgtagctagagatcttcaccgctatgaatggaggtttaagcatatatttagag

SEQ ID NO: 149926 - DNA, 1879 bp, Arabidopsis thaliana landsberg
taacgcaccggtgctccttccaattcccttacggacttctcctttccttccccgtctccgctcatcgggtctgagttttgtctcgactcaccggcccgagtcacgccgagtcagctcaatttcctgcaacagttcccagattccgtcactgtatacgcctataggatctaacacaactaacaattccttcaatgggtctcccaaatcggatgaatcgaaacctaatcccggatttctcacacggatcgcgacgtcggcttctgagcagcgaaaggtattcaatttcacgttttgttcagtggtaattagaaatctctggatgcctacgtcgatgcttactaaatgtttcaatttccacattttcgtatagttttggggacgagcttggcttacattagatttggggtttatgggttttaatggggtttgatttgattcaggaaacatatgaaaagtttgtatatagtctgctcgagaagaagattccaagaattacaaaaagttccaattttgtaggggtacatatgttactatccattagctttgaatcatggaatcatgttctctctgttttaggattcgggagctaattcgatattgttgacattgaacttgctttttcatgttagatattgatactccctaatttcaagctccacacttgttggaacaatagaactcaaatcaatctagtttcttttttgtttgattagtctgtgtgttggaattgtgcttgttcgctgtcctcttatgtagtctcatggatgtttaccagatcaatatatatctgtatttctttgcagacgttatctactggaaccgttatactaatctctgcagtagctgtgcttttgcttaacccgcttcttgcaccacctgctttcgctagctttcaaactgcagctaaatccggttggctaacaagtgcgtggaccggtttccttgctggttgcttgcacacgctctcaggacctgatcacctcgctgctttagctccgctttcgatcggacgcagcaaaatggaaagtgctgctgttggagctctctggggatgtgggcatgatgctggtcaagtcatctttggtttactgtttctgctacttaaagaccggcttcacattgaagtattacaaacttggggtacaagaattgtgggattgactcttgttattatcggtgctatgggaatcaaggaagcttctgagattccagaaccttgtgtcgctttagaaaccgacatcagcatggtatcaacagagaaagaagccttaccactgcccaaaaagaagaagatcgggtttgctacatttgcaactggagtggttcacgggttgcaaccggatgctctgatgattgttttacccgcattggctctgccatctcggttagcggggtctgcgtttctgataatgtttctggttgggacagttatagcgatgggaagttacacagcgtttattgggtcttgtagtgaggctttgaaagagaaagttccaaggatcacagagaaactaacttgggtttcgtcacttgtggctattggtcttggattgggaattgtcatcagccctttctttggttttagcctctactgagaaagtaaaagcttcttcaggtaaatgagacaagttgaaatctttgtagttcttatagaagaaagagaggtttttttgggtccattcactcgtattattgttacctttgcgaacaaaatctcgtaatcttgcttcagaaactcctctcggagaaaaccatttggtgattctttttattttccttattttaagagaagtttggttttggttctggattatcgatcaactgcatgtgaccatactttgtaatattatcaaattttaacttaaatgtttatatcatt

SEQ ID NO: 149927 - DNA, 1715 bp, Arabidopsis thaliana landsberg
tgaagccatatatcaattccttacatatttttctctttctttcatccccaagaaaggtttctcattagatcggtatcgatggctgctgccgctaatacctccgccgttttcgcctctccgtcgcagcctttatcctcgaaacgtagtttttgtaagtattttcactcaaattcttgattcatttatgtcaatctataatactagctatataacgagttaaaactaaagctaatgaatgatacagtgtacagttcaaggattggtccaatactaaggagatttccgaggaagaaacttgatctccaagttaaagctgttgccacgactcttgcacctctcgaagagatcaaagagtctgtctttattttagttcatcgtgttgctttggtcgatataactatatgaatataataataaacatagttcatgattgattattttgatagatacaagcttccttcatgggccatgttcgagatgggtactgctcctgtgtactggaaaaccatgaatggtcttccaccaacctcagtaagtttctctagctattttcaagtgttgaggctctttaactcaattaacttcttacaaaacttttttggattagggtgaaaagttgaaacttttctataatccagctgcaagcaaactcactcttaacgaagactatggggttgctttcaacggtgagtttctcataaaacatctaattaaattaacttgtattccgagttgtcccaacgagttggcgcggttagggcggctgtttaatggggctaccacatactgtataattgttttcgtacaagtacttatagttagcagtctaatcgtggggtttagtcaagtaattatttctaagtgtggcttgcaagtgatatattttcatttccaaattaaattagtagaaagctacatagaccagtcttatggagtacttataacaaaaaaaaaaatgaaaatattcaattggttactaaatggtgcaggaggatttaaccaaccaatcatgtgtggtggggagccaagagcaatgcttaagaaagatcgaggcaaagccgattctccgatatacactatgcagatttgcattcctaagcatggttcgttttcttttataatcaaaaatcaaatcatggtttgtgaccaaatagttatttgtattaatttgacacttttatctttcctatgaatcattatcagctgtgaatttgatattctcattcactaatggtgtcgattgggacggtccatacagacttcagtttcaagtccccaagcgatggcaaaacaaacctattgagttcttcaatgaggtatgtaatgaatttcttttcaaattttcacaactacttatcatctatatatgcaatatgcaaaacttatcatttatcaattggtgcaaaaagggtctagcgaacgagttgagccaagatggagcctgcgaaagagcaatatttcctgactcgaacgttgttccaactcgttgcacgatgatcgccaacttgacggtcgaaggagtaagttctcgccaaactatgtcctataaaatttgaatacactaaattttaaaatgtatgaacaaatttcagggagatagatgcaacttggatctagttcctggatgcatggatacaaattcagaacatttcaacccatatgctaatgttgatgatggctcttgtcccctcgagttatccgattctgatgaatag

SEQ ID NO: 149928 - DNA, 3288 bp, Arabidopsis thaliana landsberg
agatgacggttatgattgccggcgggattgggccggtggaggaggagttggtaacttcgccggagacgcaaaagtgaaactttataggattataaagaaaggaagcttttttaatctctctcatacaacaaagtcagatttttgggtaagtttttatcaaaagtttcatactttttcctaaatttctaacacttttttttaatttttggtttaacttgatgattaagtaatgatcacattttattggatgtttccggattatgaagattaaccttttcattggaatgttaatttttttgcaacaacaaaaagaaaaattattgtcaacatttttataataagcgataaaattttgtgtataatatacttttttttgggtacgtgaaggaagtaatagtgtaacacaattattccatagttaaaaatgcaggcaagggtttacgaagggtttaagcaagtgatcccatggaagcgtaagcaagagaatcttccacggatgagttcttccaatatttaaatcaaatctcttcgatttcttttataaatcattaaatctttagttaattttatagactaatattaatatccatctgtatacatattaccacatggtttacagacatgaggaaaagtttattcttaactttttaccaaattaaaccctgaaactacactgttcctctagataaataggattattgtaaatatacttgaaaaaggtaaaagaatagggaacatcttaattcttaaatgaaggaggacaagagcattatgcaaaaccaaaaatttattatacaaaacataactacatgacctttctatttgcagttgctagcgacagcaataatactttcctgaaaaggaaagctataaaagttgattgatcacgatttgggcctaagcccaaaacttataaagtggaccgttaagttagttaagaagcccgcgttgatttctcttatcctcagatatttttttacgaaaatccacggccactaaccgtaaaagacactcttttgatttttctcttcttctacttaactcgctttgcctgactcactgagtcatggcgcttctgaggccgcatcttcatcgctttcactccaacactctccgccactcagcctatccttccgccgacgctggcggtggccttgtcgtctatcccacgtatggtcgtcaccgttgctccgcgattgcgatcgacgctccgtcgtctctgactggcgtgacgccgattcgttggggttacacgagtgttcaaggattccgagatgagatggaagacgacatcgtaatccgttctgatgctgtcgatagcttctcctacgcagcggtcttcgacggccacgctgggtcgtcctctgtcaaattcctcaggtaacttgtgttgcttctcatgcaagctctgtcttctagggtttaagtgttgacgatggtgatgatgattgatagggaagagctgtataaagagtgtgttggtgcattgcaagctggatcgttgttgaatggaggcgatttcgcagcaatcaaggaagctttgattaaggcctttgaaagcgttgaccgcaatttgctcaaatggtgaaaatgagcttaaatttctcagagcttgaatgaattttgatgattttgagtgaaatgaagtgattcatcatgcgtttggatccaggctagaagctaacggtgacgaagaagatgaatcaggttcaacagccactgtaatgttcatcagaaatgatgtttccttcattgctcatattggtgattcgtgtgcagtaagtcttcttatttataaatggatcattgtaacttggtcatgtctaaagtcttgttaatgcattgaaataggtcttatctcgatctgggcaaatcgaggaattgactgattatcaccgtccatatggaagcagtagagcagctattcaggaagtgaaaagggtcaaagaagcaggtggatgggtgtgtcttcttattttccatgtttcaaattcctcaagtatcattggatttgcttatctatctctccgagaatttggcttaaaaccgattcattgctttttgtataatcagattgtcaatggaaggatttgtggagacatagctgtatctcgtgcttttggtgacatccggtttaagacaaagaagaatgagttgggttctttctcttctcacaacggctcttctatttttataattgttatctcattgctcataagggtttcatacacagtatgttaaagaagggtgttgatgaaggaagatggtccgagaagtttgtttccaggtaacgaactacttggaagctgtttctacttttgctcgtctctcctgttattccatttcaaggatatctgtttctcatgagataaattctcagaatcgagtttaaaggggacatggttgtggcgactccagatatcttccaagtacctctgacatctgatgtggaattcattattttagcttctgatggattatgggactacatgaagaggtttccttttctttttcctctttcccccattcagtcatatgctttttaattgggaaaagtatagagcttacagtgatcaatgttttgccaatacagctcagatgtggttagttatgttagggatcagctccggaaacatgggaatgtgcaggcaagtttttatttcatcttcttatcaaattagtttcaataatcatgtatgactttaaggcttaactagtttcctaactgtccatatgtaacagcttgcttgtgaatctcttgcgcaagtagctttggtaaaatagctaataccctcctcagcctttcttttgattaggaatcaaaacttacaaatgtacgattttgttccaacgttacaggaccgacgatctcaggacaacattagcatcattattgctgatctagggtaggggttcatctaaacaaaagttccactgctatatgaaacctctgtatacattatctattagctattcaatctatatactcttaacgtgttttggtttcgatttttgcataaacagaagaacagagtggaagaatctccccgcgcagcgacaaaacgtagtggttgaactggttcaggctgcaacgactatcggtttagttactgttggcatatggatgtcttcacatctatcttaagtgaattgaacattctatctctttcgttagtgtatataaaacctgtaactatgtctaacactctagtcttcccatagaaatggagatatgaagatacctcacaaacaaaaccagctttatattattatatatcccactttcac

SEQ ID NO: 149929 - DNA, 2592 bp, Arabidopsis thaliana landsberg
atttgagcaaaattgaaaatcgctctgaaaccaaaaatggagaatccgtcatcatcggaaacttccgagatttcctccgtcgttcatcccaatgacggcgttcatcccaatgacggcgttcaacgccaggatcacgccgtccttcccgaagttcttgagcatccgtatgtttgcttccttctcttctcgttactctgatatctttgattttcatcactcttgcttgcttttgcgcttaaattatttcaccaatctctgttaagttaatgctagtagttcatatattgttattcttgaggcctgtgtgcaaaacgattggtttcttgaatatatatttgagtttcgaatcgatgagccaccttacgcttctgatgttgtttttaggatctaggtgtgttcttccgtttgcagaacttttacttaacgattttagatctgatttaggaggataatgcaagaacgaacactcaggtttatttttggttttccatagactggttggttgcagatgaggtcacgaggtgttaagtgtctcatttcatagtagatggtttctgtgctttaagattgatctttcttttgcagtggagctgagcagatagcagatatgtctgaggaagaagtaaagcgcacattagaagctgtagcatctactgggaagttctggtaatattaattttctatacctatgagtaggcattgttgttatgcacttaaactgggatcctatcttatccttcccgatatgtattcttctatagagtttcgatgtgctgaatgaatgggtttctttctgagtaattctagggtttagggtctcatctctgtattgctacatctagttgagtactttttttaccttgtaatattacaggcaggactgggagatactaaagggaacgctatcgtactggttgaagaaggtatgtgcaggtataccaggagtgtgaatatatattaccattccacatccatcctgattatttcaatgtttaactatctatgtggtttgttgtaaaggttctatcggaatattctgaggcaaaaatgacggatgagcaacaaaaggaagctcttggagaaccatattcagagctggttagtcgattggatgaaggtctatatctactcacttgttagttttgttactttgattccagaaagtttatgtagatgggagtttgaaactgtgagaaagggtttggtataagggcttaatcaaggggtttagtatctcgtcaatcattatcaatctattttctaatagaccagctataactctacccatcatcgtttcctcaaaatggctacaaaaaagaatctgtgagaaattttaagaaatgacctttgtaaatgaaataaaagtgcctttcttgtacagtgtgggaaccatatgttgagaattgtgacaggggctttgcacttcagttatttaagctgctttatgtttttttctgaccttttccagttttatttatgcttttacaactctgagtactcttttttactcagagacctttctaattggtttcttttgttcctgtcttgttttgcagcccttcttagattcgatgatggacctccatttacattgcagagactctgtgaggtaagtagatgagttttctggtcatgatttactccaatgtcagagatatcattttttattagcttgcattatttaatataaaaatttcacttgtatagtatagtgtaagagtgtaagagtcagttcaatccataccttcactctgttgttcaacattctcatggaatcctaaacaaacttatttccttaaatttatgatatatcaggattttccacgttttaaagtccaggatacataaatgctacatttgcaactcttggaaaagttgtaattatcaaagcataccattcaagtgtcttataaaaactgctctcttatattgtttagaggtataagcttttaaaattgtgttgacatcataaccacaaagctttttggataatatgtgttcacagatccttttggctgcaaggagcatctacccaaagctctcaaaactcgctcttgcattagaaaaggtacgaatttgaaactcttacctctgtaactttgtacttgatgtacacatttcttcattgattttgtggaatatatgcagaatctgttggttacttctatgttagccatcagtacagagccacaatcacaaaccactgaggatccaaacacagcaacctcagagacaataacatctgctgcaagttgcgatccaaatgtaattgactcaatgggaggcgataaggatgagataatgacagaggtagaagaagcagatgttgatgacgcaatgactgttgacatggaaacaatcgatgaaccatcagagacaatgacgaccacgagtgagagtgagactctaagcgaaaacagttgagtttctgatttgattgttactttcttctacagttccatcatttcttgagcatgttttggtttattcatcgtgcgttatcaacttccttctgtagctgctgcacaaccattatcggattcaatggtggcagaggaaggagattcacggttgcctacaacgtgtgcctag

SEQ ID NO: 149930 - DNA, 2600 bp, Arabidopsis thaliana landsberg
aaagttgtagaccgtggacaggtatacacatacgcggatgatccttgtagcgcaacgtacccgttgattcagaagctgagacaagttattgttgaccatgctttgatcaatggtgagagtgagaagaatgcagtgacttcaatcttccataagattggagctttcgaggaggagcttaaggcagtgctaccgaaagaagtggaagcagcaagagcagcctacgataacggaacatcggctatcccgaacaggatcaaggaatgtaggtcgtatccattgtatagattcgtgagggaagagcttggaacagagcttttgaccggagagaaagtgacgtcgcctggagaagagttcgacaaggttttcacggcgatttgtgaaggtaaaatcattgatccgatgatggaatgtctcaacgagtggaacggagctcccattccaatatgttaagagtatagtcctctgtttttttcttaccataaagtctttttttttttacatgtctgaataattttaccaaatgattgtctgtgaagtggttttatgtctgtctaatttaaatttgtgtgtaaaactcattgtaagttctcaaatgaacaatttttcttttacaaattaatgtgtgaatcataccttcttctttttatctcaatatccataacaaacatcggataagaaaatgttatcaactctaactcaatcatctaaacttaattagtcttactctaatggagttatttttcaaaatactagtaagtcacacactttagccatctagggttatagaattctttactaaattatgaaattaaaagtttaaaactattgttatgatagaaaaacataaatacaagttacaaccgaaatcatacattttgttgttattgtttggtagcacttttaggagtttacataaaaatcacctaaaatcactcaaggttagtaaatgaactgaaacaactcgaaatatatttgaactcgaatctaaactctattttcatctaatatgaaattgaaaagtgaaagatcacacaactatagttctgtagtaccagagtagtgagtgcaaccagccaaccagaaaaaaaaaaaagaaaagagaatgagagagtacacaataaaggcccaaattaaagcccataaagcccataagagtaaatacaaacaatacaggttcttcaatacgttaagacaaaatagaattgatctctcttcttcattctctctcttctcgatctacccaaagtagcgggagcgaatagtaaaacaatgaccgatcaccaccaccaccaccataaccaccacgcgcggctgagccgcctccgtacaacaacacagctcctccgtcaaacaacatcttctttctcttcccaccctctcactttcatcttcctcactttcctcctcttctctttccattctctcgtcgatcattgctctctcctcttaacatctttcgtcgacagtgacccttctcttcgctctctcctctctcgactccctcttaactctcgctcccataccccgacgcgcttcaatcatcaccgacgtgctccgtttcttcagctcacgcgccttggtaccctcgacgacgacttcttctccacagacgaacacgatcctcatcgccgatcgcttcaaggctcttcctttcgttcacccatcaacgccaccactgtattcctctccggatttgagagcatttctggcttctctcgtcctatcatcgataacggacttctccttcctcagatcattcgctccggtgtcgttttgcggcagcttgagaaggaagaccatggcggcgatgaagacgagacggaattggatgaatctgagctcgatcgtgaaagtgagaagaaagataaagactttgagagttttgtggatctgaagatgatttttaaaggattggagctaggacgtagtgacgcagcggctctgttcttcttggtgagctttttatcagctgcgtatggatgggtgattctagggtttacaactgtttactcattggtgttggcgattatgtttgttactgtaatcaacgatttgcttggtaggtttccttcgtttcttggggttgtttggagaggttcaagattggggtttaagagagttacaggatttgttttaatgagatgggcagtgagagatgctttgacacagcttcttggtttatggtacttcggagaggttgaagatcagtactcgtttttcaggctctttgtgaggttaaagctgatgcctttcactgttatgccgccatggattagaggttttgagaaggagatatctggtttcttgttcgcttggtttctacttgatacacttgttggtttgatattagctgttgatgcgtttgttgctattgtggattcgagaaggagaggaagggagatagtgaaggaaggtttatatttgatatctcttttgttgcatcaggctgtgcagctgaagtgtcttgaagcgattctttgtgggtctttcttcagatgggttctgattcgaatggtagggaaaagctttgcttcagtgatccaatctgcgttggaagtttacttcatggcggcttggttagtgttctacttagcagctaa

SEQ ID NO: 149931 - DNA, 2137 bp, Arabidopsis thaliana landsberg
aaaaccctagatttattctactcttcgaagtcgatttcaatggaaggttcctcgtcagccatcgcgaggaagacatgggagctagagaacaacattctcccagtggaaccaaccgattcagcctccgacagtatattccactacgacgacgcttcacaagccaaaatccagcaggagaagccatgggcctccgatcctaactacttcaagcgcgttcacatctcagcccttgctcttctcaagatggtggttcacgctcgctccggtggcacaatcgagatcatgggtcttatgcagggtaaaaccgagggtgatacaatcatcgttatggatgcttttgctttgcctgttgaaggtactgagactagggttaatgctcagtctgatgcctatgagtatatggttgaatactctcagaccagcaagctggtaagatatctcttattcatctctcgctgtagctacttgtttaattagctagttgctacttggatcctttatgcaagattttgcgagtgtttgattgattggttatgactgtaactttgaactataggctgggaggttggagaacgttgttggatggtatcactctcaccctgggtatggatgttggctctcgggtattgatgtttcgacacagatgcttaaccaacagtatcaggagccattcttagctgttgttattgatccaacgaggactgtttcggctggtaaggttgagattggggcattcagaacatatccagagggtcataagatctcggatgatcatgtttctgagtatcagactatccctcttaacaagattgaggactttggtgtacattgcaaacaggtatgtataattcttatttattgattttaaaacttgggagggttttaatcatcgatcttatgattcattttttttgtatgtggcagtactactcattggacatcacttatttcaagtcatctctcgatagtcaccttctggatctcctttggaacaagtactgggtgaacactctttcttcttccccactgttgggcaatggagactatgttgccgggcaaatatcagacttgggtaaattcttgtatatatgaaagagcaagttaatttacttttcatccaggtcgtagtttgatatatcctcttttcttaccatttaattgtttacatgatgaagctgagaagctcgagcaagcggagagtcagctcgctaactcccggtatggaggaattgcgccagccggtcaccaaaggaggaaagaggtttgtctaaatggttgctttagcaaaattatttgttatgttctcaatgtttattgactgtctgagatactggaccatgatcttgagctcatacacttgccacttttcaagcttgttcctgtgtagaaacttttcatttggctaattaactgctactatcaacatctagcaacttggattaaatttgaactttttattcttaggcattatgttgactggatattgactaatagaaactctacctgcaaaacactatgttttaccttttctgggtttgaaatttcacaattgagtgtatgtttagtcaaaaatatacagagctattaaagtttgaactagtaaaacagggagactttgatgtatcaatttgtcaacgagttgttgccaatagtctatgtctgcttcctagagttctgttatctctggctgtgtgactcattttgatattgttttaatcttctttacataaaaacatttgttttggagattacattacctaagtatatgtgttgtggaccactttcaggatgagcctcaactcgcgaagataactcgggatagtgcaaagataactgtcgagcaggtccatggactaatgtcacaggtgagtaaaaatattaaacgaaatggtacatatctcccttaaggttcgtgtatttcacagactcaaaatccatcattgttgtacttgtaggtcataaaagatgaattattcaactcactgcgtcagtccaacaacaaatctcccactgactcgtcggatccagaccctatgattacatattgaagttgctcttcttttggtttccagttttggattgacccatcattagtgacctttcatttaataactgttgtgtaaagaattaataactg

SEQ ID NO: 149932 - DNA, 1280 bp, Arabidopsis thaliana landsberg
gtcttgctgcgctaagaaagaaaagaagaagaaagatgccaggagcaattgtggaggaagagaaatctcagattgaatccatcaaagagcaattgaaactcgaggttcgtctttttttttcttttcctccgagcgattttgtttccgatttgttgttgtcgtctaatttgataatggtttctggtggaaacagaaggaagatgatgttgttgtggaggatgtgaaagacggagaggaagaagacgatgatgaagacgatgaggacgtcgaaggtaatgtactctctctttcatttcattttccttactctctctttcatttcattttccttccggtttgatttatttcggttaaccggaatttactcgtttgattctgattcatgctttgatttcgagtggtctatgtatgtttctagaaacgttagtgtatagataagatttgtcttttaggtttgtagaaaatcagaaaattgttgaacttgaggttcataagccctagattaagcttgagctatagctcttaaatgtgaatttgtttctctatggaacactaaaaagagaaacctttgttaatttcgggttttgtttcaatgttttggctgtgtagttgaaggggaaggtggaaatgagaatgcaaagcaaagtagaagcgagaagaaaagtcgcaaagctgttctaaagcttggcatgaaacctgtctcagatgtccgcagagtgacaatcaaaagagccaagaatgtaaacaaatcttctaacaatcaataaactctcatgtctctggttataagtaacataggtttgatgattgtggaaaatattgcatctatgtcaggtgttatttgtcatctcgaagccagatgtttacaagagtcccaatgcagagacttacgtcatttttggagaggccaaggtcgacgatttgagctctcagctacagactcaagctgctcagaggtttaagatgcctgatgtgacatccatgctacctaacgccggttctgaagctaccatggctccactagcagaggaagaagacgaagacgatgttgatgacactggtgttgaagccagagacattgatcttgtcatgacccaagcaggtgtctccaaggccaaagccgtcagtgctctaaaggctaatgatggggatatcgtttcagccattatggaactcactacatagagttgagtagtagagccacctaaattgtgcttttgtttcattgtttcttgtctcagctaccattttctttgaacattattaattatgtctcccct

SEQ ID NO: 149933 - DNA, 313 bp, Arabidopsis thaliana landsberg
caggagcatcatgtcaaaacttgccatggttcagtttcagttgtagtatatggagatcaagagaaaccagcattgatcacttatccagatgtagcactaaactgtaagagtggcgaatatacatttggtacatgatttgttttcattttaacatcatttggtaatctgattttagattcttgtatgtttttatggctgctagatatgtcttgtttccaaggattgtttctatgccctgaagcagtgaccttactgctccataatttctgcatctaccatattagtcctccaggacatgaggtttcagaattat

SEQ ID NO: 149934 - DNA, 629 bp, Arabidopsis thaliana landsberg; identical to SEQ ID NO: 12844

SEQ ID NO: 149935 - DNA, 1454 bp, Arabidopsis thaliana landsberg
atataacgtttggtctataccgaatgataataaatatcacttgttaaatggcctataccgaaatccgatccacaatgattttgctacacagaaactagcagctataaagaaaagtaagtggtcgaccatcgatcatggaccagcctcacgcgcttctagtggctagccctggcttgggtcacctcatccctatcctggagctcggcaaccgtctctcctccgtcctaaacatccacgtcaccattctcgcggtcacctccggctcctcttcaccgacagaaaccgaagccatacatgcagccgcggctagaacaatctgtcaaattacggaaattccctcggtggatgtagacaacctcgtggagccagatgctacaattttcactaagatggtggtgaagatgcgagccatgaagcccgcggtacgagatgccgtgaaattaatgaaacgaaaaccaacggtcatgattgttgactttttgggtacggaactgatgtccgtagccgatgacgtaggcatgacggctaaatacgtttacgttccaactcatgcgtggttcttggcagtcatggtgtacttgccggtgttagatacggtagtggaaggtgagtatgttgatattaaggagcctttgaagataccgggttgtaaaccggtcggaccgaaggagctgatggaaacgatgttagaccggtcgggccagcaatataaagagtgtgtacgagctggcttagaggtacctatgagcgatagtgttttggtaaatacttgggaggagttacaaggaaacactctcgctgcgcttagagaggacgaagaattgagccgagtcatgaaagtaccggtttatcctattgggcctattgttaggactaacgagcatgtagacaaaccaaatagtatattcgagtggctagacaagcaacgggaaaggtcagtggtgtttgtgtgtttagggagcggtggaactttgactgttgagcaaacagtggaactcgctttgggtttagagttaagtggtcaaaggttcgtttgggttctacgtaggcccgcttcatatctcggggcgatctccagcgatgatgaacaggtgagtaccagtctacctgaaggtttcttggaccgcacgcgtggtgtggggcttgtggttacgcaatgggcaccacaagttgagatcttgagccatagatcgatcggtgggttcttgtctcactgcggttggagttcggctttggaaagtttgactaaaggagttccgatcatcgcttggcctctttatgcggagcagtggatgaatgccacgttattgactgaggagattggtgtggccgttcgtacatcggagttaccgtcagagaaagtcatcggaagggaagaagtggcatctctggtgagaaagattatggcggaagaggaggaagaaggacagaaaattagggctaaagctgaggag

SEQ ID NO: 149936 - DNA, 657 bp, Arabidopsis thaliana landsberg
tatgcatctctctataatagttacaacttgaaaccccaatgaaatccataacaaaacccacatatagcttatgaaattcttaagatcaaacatagaaaaaggcttaccaactgggattttcagtctctgaacatacataaatcgctacggaatcactctgcagtgtatcccacggtaggacacgactcacatacgcgatttcataagatggtaaactactacttatgcataggtacgacataaacacatgtatttgtattcttacggtacataaagtgatggacattgtatgattgattctccactgtgtctaggtattgtagaaaacggcttctcatctaaggctcaaaaccggccatgcgccaggcgatggtagagcagggcggatcacagggacccttcttacctctgtgaacacttcattgagtcgagcagcctgactcatcacccgcgacgccttctgcacagatcataaacaacccaagacgtgataatgatagaagtaaaacaacaccaaacaaataccaaccaagcaaagagatgtgcgctaagggaaaatatcaaatcacagcattttcagcggatgatgcctcagtatttttgtacttaattcagacagattacaagaacatattaactacaaaatctatatcttag

SEQ ID NO: 149937 - DNA, 1124 bp, Arabidopsis thaliana landsberg
atggacgaaaatgctgtaggaacctgtgctgaacttatatttgttccaatcgacgcttcgtttgcggatgatgcacctctgcttccttctggttttcgtattatccctcttgattccgcaaaggtaaaaaaaagttatgttttctgtccaagtcttctattattcagattcttaagcttttcttgaaccaaaaaagcaggaagtatctagcccaaaccgaaccttggatcttgcttcggcactggaaattggttcagctggaacaaaagcctcaactgatctctctggaaattccacatgtacaagatctgtgatgacaatagcatttgagtttggtatcgagagccatatgcaagaacatgtagcatccatggctaggcagtatgttcgaggtatcatatcatcggtgcagagagtagcattggctctttctccttctcatatcagctcacaagttggtctacgcactcctttgggtactcctgaagcccaaacacttgctcgttggatttgccagagttacaggtataaaccaaactatcaaatatgttctaattttcccaccaaatcaacaatttgtagttactaaagatgactcattttacccgttgataataggggctacatgggtgttgagctacttaaatcaaacagtgacggcaatgaatctattcttaagaatctttggcatcacactgatgctataatctgctgctcaatgaaggtaacaaacacaatgttaaacacataaatgtgtattcgataggaatacttggataggaatacttgactcgtgtattcgctgatctgttttgggatttgaacatcggttaggccttgcccgtcttcacatttgcaaaccaggcgggacttgacatgctggagactacattagttgctcttcaagacatctctttagagaagatatttgatgacaatggaagaaagactctttgctctgagttcccacagatcatgcaacaggttcttagaaacattttctgatcttcattcttatcacatatgtttagttttatcgacttagtaggatctattttttcagggcttcgcgtgccttcaaggcgggatatgtctctcaagcatggggagacaagtttggtata

SEQ ID NO: 149938 - DNA, 343 bp, Arabidopsis thaliana landsberg; identical to SEQ ID NO: 30160

SEQ ID NO: 149939 - DNA, 570 bp, Arabidopsis thaliana landsberg
atctctcatcttctttcgtctctctttctacggttcaaacattaaaaagatagatggagaagaggagctctattaaaaacagaggagtacttagattaccaccagggttccgatttcacccgaccgatgaagagctagtggttcaatatttacgtcgaaaagtaaccggtttacccttaccagcttctgtaataccggaaaccgatgtttgtaaatccgatccatgggatttaccaggtacagaaattgaaaaatctactctagggtttcattcaaattcaatatttgatggtgtatatgcatgatgatcacaggtgattgtgaatcaaagatgtatttttttagcacgagggaagctaaatacccgaacggaaaccggtcgaaccggtctaccggttcgggttattggaaagcgactggtctcgataagcagatcggtaagaagaagcttgtcgtggggatgaagaaaactcttgttttctacaaagggtaaccaccaaacggaaccagaactaactgggttcttcatgaatatcggcttgttgattcacaacaagattcattatatgt

SEQ ID NO: 149940 - DNA, 1595 bp, Arabidopsis thaliana landsberg
atggatgataatcggagttctgaatcaatcaaaaggtatcgctgttttgccttaaacccacaaacaaagcgtttgattttgaagcagtgttgttgaatatttagtggcttgttcttcgatctgtctctcttataggcatgagattgagaaagatactattgcgtcgaggaagctagaagatactaatactaagttaatacaagatcctgaagaaatggtactggtgctgatttaagaatcttatgatttctagttcttgaatcaaacttagattagcttttgaaaattcaggcactcttatgcgaaagtgagatcacaagaagaggagattcatagtctccaggaacgaattgctgctgcttgtttgaaggtatatactattatgagaacatgatgctcgctcatatgaatctttctaatcaacttgagagtgaaattgcatcttttggttacaggatatgcagctgctgaatgagaagtatggactagagagaaaatgtgctgatcttcgagtggtttgtcttttgcttttctataaagattgattcatggaattgaaagtcttcatctttggcttctgggtttgtttgactaacagcttcttatttccttaggcaattgatgagaaacaaaatgaatctgttacgtctgcgttgaatgagttggctcgtagaaaaggtgatcttgaagaaaatttgaagttggcacatgatttaaaggtgaattgtcttgcctcaaattatgtagtaacctcaaatatttgattgccttttacctttccgtctttatttctctcactttctatctttaggttacagaagacgagaggtatatattcatgacgtccttacttggtttattagctgagtatggtgtttggcctcgtgttgctaatgctaccgctatatccagcggcataaaggtatttgtttttcacttcatctttcttcaaatttatactctaaacaatctcaacatatattccatatttctttgtatgcagcacttgcatgatcagttgcaatggaagactaaagcttgcaatgtaagctctctatcctgtagtttcccaatcgaacaaccgctagaaattcttaattttagtgtttatacacatttccttggattactgttgtctgcatatgtcctttggccttattagacctctgctggaatgtgaatactcttcatggattcctttcgaacatgttgtgacgaaatttttaaatcacaggataggattagagagttatcatctattgtggaaaaccaaccgggaacagattttattagtaaagacaaccatgatcccagaaattcaaaaactcaagcttcttatggatccacggtagtctcagcaagtaatttgctaaattaattatcatttgctctttaagaccttttacaaaatgtgtgacatcttttcagaagaaatcttactttctgttttcatatgctacccttgatacaggatcgtggtaatgattatcagaccaatgaacaactcttgccaccaatggaaaatgttacgagaaacccgtatcataacattatgcaagacactgaaagtttgagatttaataatcagattggtg

SEQ ID NO: 149941 - DNA, 792 bp, Arabidopsis thaliana landsberg
tgtcgaggcatcggacgttgattcctgtggctccgaatgcttctgtgattggtgatgttcagatcaataaaggctcgttcatttcgtatgcaagtgttcttcgtggtgagcctcctaatttctttacgaatgcgttttgtagatacattgattaggtgttttgagaggtctatttgtgcgtgcacttcgtaattgactgtgaaaatacgcagatttgcagtatcctcgtgcaatgggaatgggacaggtgcggagatttagcgaagatgtttctcacatgcctgaaatggaagactctgatgttttgaatgcattcaaagacttgatggctgcagactgggctgagcttccttctgctgttgttaaagaagctaaaaccgcgatatcgaaaaacacagatgataaggcagggcaagaggctttgaaaaacgtgttccgagcagctgaagctgtagaggaatttggtgggattctcacttcgattaagatggaaatcgatgatagcatcggaatgagtggggaggtttgttgtttgtttgcttaactaaaccatcttcttgatttctggtttgtttgatgttttagttgtattgtgtgcagggtgtgaagcctttaccaaatgatataaccgatgcgctgcgtactgcttatcagaggtatgctgagtacctagactcctttgaacctgaagaagtctacttgaagaagaaggttgagatggagttggggacaaagatgatccacttgaagatgagatgcagtgggcttggttctgaatggggaaaggtaatc

SEQ ID NO: 149942 - DNA, 1654 bp, Arabidopsis thaliana landsberg
tttaatttgaacaggccggtgattgatcagaacttatactatatcggtctaaaactcacatcaccaacgttttcctccgccgttagcaacatcgtgcctgcaattaccattatccttgccacacttttcaggtaacatacaaaaagcaactttgttattatttacatttattcatttaaccaaagaaaaagatacgttttattatattttggtacgtggatatgcaccaattcaaaagtagatgtatagtagtacaattagtgtatgacgatcgatgtcataaattatgaatattgatgtgtgtgttttatgtaaatgtttgttttaaaggatggagaaagtggagatgagaaaagtaagatgcctggtaaaagtgatggggacgttagtgacagtggttggatccatattgatgatattctacaaaggtcctttcattaatttcttccggtctcacctcacggccgcctcttcgccgccgacggctgactatcttaaggctgccgtcttcctactcctcgcttccctctcatgggcgtcgttctttgttcttcaggtatgtatcaattatatattgatcctgtctataatataactcacttcttacatcactaaaaaacgtataatatagtttttaggattagttttaaatttccatcaacataggaaaatatagtttatgcaccaaaccatgtaggggatacgtaaaagtaatataaaaaatttgaaattttagatatagtattaataatgttactgggatgttgtttctaatttttaatgttatataatttttaaaaaaataattgggttaactatatctaaaataataatatgattggaattttttttcactgttttcgtaatatataaaaatatagatttaacgaattaggcttttatattttgttaaataggctgcgactttgaagaaatactcagcccatctctcaatgtcaacaatggtgtgtttcatgggaacgttacagtctttagccctagccttcgtaatggaacacaatccttctgctttgaacatcggttttgacatgaaccttctcgcttctgcctacgcggttcgtcctttatttcatcatgccactttcacaaataacaaaaagatcagtttacaaaaatattgatactaacattgtgattggtaacggttacagggaataatgtcgtcgagcatagcttactacgttcaaggacttatgatgcagcgaaaaggaccggtctttgtcactgcttttaaccctcttatcgttgtcattgtctccatcatgagcttcttcgttctcggtcaaggaatctaccttggagggtacgttaacaacaaccggttaattatgatatattcccggtttagtcttggctctgtcttgttaattaatcaaaccgaaatttgttttcttttttcagggttattggagtggttgttttgatggtaggagtctacgccgtgttatggggcaaacatgtagatgatgacggcgaagaaacacgccatgaagataacgttgtagccgttaagtgttgtagtggcaataatggtctaacgataatgccgaaaatcgacgaagctgatgaggaggatgttgaaaccggaaaggctacgtcggagaaggagtcgtcagttccggaagtggtggtg

SEQ ID NO: 149943 - DNA, 373 bp, Arabidopsis thaliana landsberg
tgaagatgaagaggagaatgaaacatctgatgatgaggctgagcccaaggccctgaaattgagcaactccaactctgataatggtgaaaacaattcatctgatgatgagaaagagataccaatatcgaagatcacctcaaaaaagattaagagtaaaaccgctgatgaagaaaatggtgacaatgaagatggggaaaaagctgttgatgaaatgtctgatggagagccgttggtgagcttcttgaagaagtccccagagggaattgatgcgaagaggaaaaaaatgaaggggaagaaggaggaagaggaagaggaagaggaaggagaagaaaatgctggaaaagatacgaaagcggaagaagcgtcgtcgtag

SEQ ID NO: 149944 - DNA, 1629 bp, Arabidopsis thaliana landsberg
atgctccgaataattgaaatctgccatgagctaaaggtgaatagaaaaatgcgtggcagtggctcaaattatctcattacactgtttttctctttcttacagcagcctctctgtgtctatgtactaatcatggcttatttatttcagattctctctgttgtcttagaatcagttccagtctcatccagtatcagattggcagtccttgcctcattgagaggtcttttggacattgagaactggttgcctaactgcttgtatatgtataaggatctctttgctgaggtaacatatcgtttcacaatcatagttctatttctaattttctagagttgagaagatgctaatctaacattttttttttctttttctttttcatatttcaggagtgcctcaaatttgtcaaaaatgtgcattttagcgaatcagacgatttcagggccaaaatttttcatccttctgatccattatcagatcttcatttggaagcaacaacttcccttttaaaagttagttagtttccctttttggtttggttttcggctcgtccttaacttcatatctactgaattattttgtttgataatgtattaaaggttttgaaagctcatgataatgcgattacttcatctcaactggtcgaggagattgaaaaagtcaatgcagctattttggattgtaatcctaagctgcagaatggtgaggctaaagattcatcagctcccaatgcatatggagatgatgttgaggcagaggcaaacgcatattttcatcaaatgttttctagtcatttgagtgttgacgcaatggttcaaatgctttcccgatacaaggaatctttggttccaaggtttgatattgacaaactatacatatttgagaattttaatttttctcgtcatgtttgtcatgctcctcatgcataatgaaaataacgagattgttttttttttgggcagggaaaaattaatttttgaatgcatgattgctaatctgtttgaagaatatcggtttttccccaagtatcctgagagacagctgaaaatagcctccatactctttggtgagtaggatattttactttgatatagcgggtggcttttgttggggagggggagaccatcatatcttctatgctattgtgtagcccccaacatttcttactgtactatttgagcgtctcttcagatttgtattgttgtcgtgacattctcttgaatctactgcgacttatacaaatttcaggttctgttataaaacaccagcttataagttcgctcactctggggatggccctgcgtctagtgttggattctttgcgtaaacctgcagattcaaaagtatggattcttttgtaatttatttctgtctcccggcttttcctgtgagagatctgtcatcttctttctttcctgattcgtgcagatgtttctgtttggaagcaaagctctggaacagtttgtgaatcgtctggttgaattgcctcaatactgtaaccatattttgcaaatatctcatctgcgtagtactcacccggagttagtcactgttattgagcaagcactttcaaggatatcatatggcccctttagaatcagatgcctctgtttcacaccatggtccctcaca

SEQ ID NO: 149945 - DNA, 481 bp, Arabidopsis thaliana landsberg
agaagtagttcgtcaacgatatgcccatgttaatgacgacattcatgttactttgatagaggtttgtttctactctttcgattcctctttaggtgtgtttatcacgttaggaattgtttttgaggtgagtaattttttacaggccagggatattctttcatccttcgatgatcgtctcagacgttatgctatcaagcagttaaacaaggtgaactcattttgaagttagaacatgtaaaggttttgagcctacttttatggagcgtttcttcttaagaactactggttttgatttacattagtctggagtacggtttgtgcgagggattgtgaaagatgtgcagtctcagaagttaatacttgacgatggcacagaggttccctacggactcttagtgtggtccactggtgttggtccttctcctttcgttaggtctcttggtcttccaaaagatcctactggaaggttagttcgaccact

SEQ ID NO: 149946 - DNA, 1871 bp, Arabidopsis thaliana landsberg
atgcagcccctcctaacaaagccggaaatcccaattttggcggtaaattccctaatcttcctcaaccgttccttgtacgtttatgttctgagtttcaccatgagcgtttgcgtttttgcatttctgcgtgtgtgaataggtgggaatagaggggaaccgaggaatccgaatgcaccgagatcaggagctcctgcaaaggttttgcccatagagatcccttctgttgcattggatgagttgaacagaatggcgggtaacttcggaaacaaggcactgatcggtgaaggttcttatggacgtgtcttctgcggcaagtttaaaggagaagctgttgctatcaagaaacttgatgctagttcttctgaagaacctgactcagatttcacctcacaggtacacacatacatattacaataacgattatcttctcttcaaactataatttgttcaagcttcttctcttcaagctataatttgttcaagcttcttctcttcaagctgtttagattaaactactgttattttctaatctaattaatttctattcaaaatggctaagttatcggtggtatcgcggctcaaacacgaccattttgtggagttgctggggtactgcttggaggcaaataatcgcattctcatttaccagtttgcaactaaaggttctttacatgatgtattacacggtacgtaaattttaactctcactactcatattttagtatatggtacatgaaatatatatggaccaattgaatctttagggagaaagggagtgcaaggggctgagccaggaccggtgctgaactggaaccaaagggtaaagattgcatatggagcagccaaagggcttgagttccttcacgagaaggtccagccaccaatagtccatagggacgtgaggtcgagcaatgtcttgttgtttgatgactttgtggccaaaatggctgatttcaacttgaccaatgcttcctccgataccgcggctaggcttcattctactcgtgttttgggaacattcggctaccacgctccagagtattataccataaacccgttaattcatttgtttaaaacaacctgatagttcttgataacgtaagagttttgttgtcttaggtatgcaatgacaggacagataacgcagaagagtgatgtgtatagttttggtgttgtgctattggagctcttgacaggaagaaaacccgtagatcataccatgcctaaaggccaacaaagtcttgttacttgggtacgtacacaaattaaagcaaacattctggaatgactccatatatatgatcattataagaccccttttaataacctgtgtattgttgtctcaggcaacccctaaactaagcaaagacaaagtgaagcaatgcatagatcctaagcttaacaatgactttcctcccaaagcagtcgccaaggtccgctcttcattttcttcttcaaatatcaaacgatatcttcatttactttgcttggttaaagatattttgatattagatgcatctagatatcatatttcgaaaactagggacatatgattatttggtttagctttgtaattttgaaaagtttctttgcgtatggtcgaacagttggcagccgtggcggccttgtgtgtgcaatatgaggcaaatttcagaccaaacatgagcatcgttgtcaaggcacttcaacctcttctaaactctaaaccggccggtcctgagtctacgtcctaaactaaacaatataccatttctcttgtttttgttcatgttgttgttattatggctattttctccctcttttctgttccaagaactatgattattggttgtaagatgttgttatttaagcgaatgtaacttatatttttc

SEQ ID NO: 149947 - DNA, 983 bp, Arabidopsis thaliana landsberg
agcttttgttatttgcccttatgattctgtattttgttccattttatgagatatctaacatttgggcctctcataaaccgagatgagacttgtgccacatgcagggcgtatccagacatatgcaggtgtgcatttgcaaagggaccttttcaaatttcagaaaaagaaagaaaacaataacatgctaattttagagtccaaaatcaaaattcaacataaacttgcaagaaaaatattcatctaaaaaagatgaaaagttttgaagtggaagtaaagtccaacctatttcaacaaagcgacaagcaaataaaaacatacttcaaatgaaacaaataaagaagaaaaagaaagaaatcgcacaaagaaaagaaacaaatgatttgctatgtctatggaaattaggaaaaaaatgatgattttcattagctattagaacaaaaagtagttcctacaagctaatatttttagaatgttattttgccaaagttaaaattggtttacttttacaaagattttattttatttgacaaaagggaaagaatccattttgttgatgttctctagtcacggaaatggtttcacacgtctctgtacataatctcacaagcaaaacaacccaagtacaaggcatgtagacaaaatctcaacctcatgatgttccttatctcgttcgaaatattgtaaccctcatcgttgttgtcgtcaacatatagcttgatcgtcttccccttatcagctggttaatcaataatcagctctcgactattttattgagagtgaaagagaacacaaagatggggagttcaagttacttgctacaagcgtttaggccttctgctgctctgctgtaccgtcgcagctaataaagtaccactcgcaaacgccaagtataaggacccaaaagagccactgggagtcaggatcaagaacctgatgagacatatgacccttgaagagaaaatcggtcagatgatcaggtgaac

SEQ ID NO: 149948 - DNA, 6316 bp, Arabidopsis thaliana landsberg
  unsure (1)..(6316): unsure at all n locations
atcggtttcaatggcggatcggagcaaaggctttatgagagctgaattcgtgacctatgcttacattcttctctatatcgctctttctagtggtcaaatcttcttcaataaggtttaccttaaatctcacaatctatatttccctggatctatgttctcgcatcgtattgttttgtgctctttcgatttgtagaaaccgatcgctagttttcgtaaggaattgagctggtatgtgcaatgtactgtgctagtttctaggaagttgactagcagattttagaatccctcggttgtgtagaattcaacatccgtttgcttttgtttgatcgtgttgtgtttgcttttgacctctctgttattgcttatgcatcagagttcaccgttttacaatctgtagcaagtaacgattcatagattgtggtttctctcttttcgtcatgactaacgtttttgtctttgaattgctctgctgcagtgggttttgtcatctaaggaaattaatttcccttatcctcttggattgactttactccatatgatcttttcctctgtcttgtgctttcttcttaccaaagttcttaaggtaatcttgcaattaatgttctttctgtttttgttcacaagtaaagactgcctaacttttggtcccttctctgttctctatttatttctccatgaagattgtgaaggtcgaggaaggaatgacactagaaatgtaaggaagaaagagacttcgtaaggaatttgattttggagtagtcgaaaatacccataacataaatatctttactaattttatcaatgtagcagtattaactcactttatgtactcagatatgttacgtcagttattccaataggtgcaatgtttgcaatgaccctctggttgggaaacactgcctacctctacatatcagttgcatttgcgcagatgttgaaggctataagtaagaaactgttcatgctcttggttcctcataagtcttatgtttacttcttatatctgactaacaatgtacagtattcttcaaccatacttgcagtgcctgttgctgtgtttattcttggagtagctgctggacttgaaatgatgagctgcaggatgcttttgataatgtctatcataagttttggtgttttagtagcttcttatggggaattaaacatcaactggattggagtggtttaccaaatgggtggtgttgttggagaagccctgaggctaatcttcatggaacttcttgtcaagaggaagggcatcaagttaaacccaatctctcttatgtactacgtgagcccatgcaggtaagtaaaatcgaagaagaggaagccatctcatttctctcattatttaagcctaagggttacttttatctttttgtacctcctttgcagtgctatctgcttgtttgtgccgtggatctttctagagaaatcgaagatagatggcaatggcccatggaacttccactttgtagtgttgacccttaattccctctgtacatttgccctcaacttgtcggttttcttggtgatttctcacacgagtgctctcactatccgagttgctggcgttgtcaaggattgggtggttgtcttggtgtcagctcttctctttgccgacacgaaactcacaatcatcaatcttttcggttacgccatcggtaagacaaaacttctcacatacaaattggctaacaagaaaaaaatttgcttctcatacagtgtgctctgtgttcacacacagctattgccggtgtagcggcttataacaaccataagctgaagaaggaagcatccaaagttgttaccacagaaactccaggagatgctgaatcaataccgttggtgtcacaaggtaatactaatacagagagatgatgatgtccgagaaaatgtagtttctcatcatcagtctttgaggtaatctttgattgtttgttttctcatttgtaccgtccgaattatataacttatacaacaaactctgtaccagggaaaggaaaaaaaaaagatgaatcaatttgttcaattctcataaattttattcacattttgtaggttattatccgaaaatttatcatccacataaggcagagaaagaaaaaaaaagagtaaatttagttttatttttgtcctttccaagaagtaaatattttctgaatatcatcagcttaaatttaataattaaaaaaatatggctacacgtacataactcgtgtatcgacttttcctattggcataaaagatgggcctaaaaagcccagtaacggtatttccttttttgtttacctacctggaaattatattttttttaaaataaaaaatgggacgagggtaaataaacatcgcgaagggattgtggggtttgttgctgggcgggtctcttccctcggcagttaccttcatcgaattcgatcttcatcttcttccttccccaactctttcaaattcgtgaaaatcttcctttaatttcgactacaaattgattggaggaagcccccaaaacgtgaattagaagagaaagagaaaagcgaggaaaacgcgtggtgacaaaagatgcgatcgcagctgttggcttggccgcggcggcgagtcagcgatgagcggttgcttggttggttttctccggcggagaataaccgattttgaatgggatttaaactgcagatgagctggatgccgagtctactgagtcaaaagcgtaggaatggtcctcccttagggttacggaatctcggcaacacctgttacctcaatagtgtccttcagtgtctcactttcactcctcctctcgctaatttctgccttactcacaaacactcctctcactgtacgttttctcctcctcctttcacactttagggttatcgaaacttttttcaattggaagttgatcattagcttctaatagggtctggaattatagtttcttatagatacacttgttgttttgtatctctgacgcttttgattggtgttctctctgttcgagattttgataggcgacacatatgtggatggagagaggaaaagggattgtccattttgcatagttgagaaaagaatagcaaggtctcttagtgtggatctaactaccgatgcgcctaacaagatttcaagctgtctcaaaatttttgctgagcattttaagcttggtcgtcaagaggatgctcatgagttcttgcgctatgtcattgatgcatgccacaatacgtctctcagactcaagaagttgcgatacaacggtaacgagccctttaatggcaatagtgtcgtgaaggagatttttggtggtgctttgcagagccaggtcaagtgtttgtcttgtggtgcggagtctaataaagccgatgagattatggatatcagtcttgagattttgcagagtagctctgtgaaggagtcattgcaaaagttctttcaatcagagattttagatggcaacaataagtatagatgcgagtcgtaagtgatttctcttctagtttgtctttctttcagtttttgtggttctgtttttaactgaaattttcaatttgatttagctgtgaaaaactggtgacggcgaggaagcagatgtctatactgcaagcgcctaatatccttgttatccaattgaaagtaagtgtatcatgttctgtttacaaaaggtggcaattattttagttatataataattttaatggatttgcagaggtttgggggcatttttggtgggaagattgataaagccatttcatttggtgagattctggttctctcgaacttcatgagtaaagcaagcaaggtacaagattctgacactttcaacttaactttaagtgtgttgccagtttctgttagttgtgcaatggttctacatatccagttagatgcatatcagaatgttaggggttttagtgcaggatgaatagtttactgcagcgtttaactggattttcaacctgattaagccttttgacatgatttgcatatagaatatcgaatgaatttgcaacgttcatagtttttaggttggctaagttttatcctttgaattattgaggcagaagtctgacatcactttcaagtattgctttgattatatctgattagttaagaatgagacaagttggaaaaaaaaaagttaaggttgagacaagtttggtcaagcagctaagtttgatattatgcttctagtctatatcatgttttgtcataggctgttaaatattttgatttattgcttccaagttctcttacatgaaattcaatatgattattagtccctgcatctacctattgaatcatcatagtgctctagcttgtgaaaattttcttgctctatgtaactgtacttcccaattcctactttttgcttattggtttactctattaaaaactgcaggaccctcaaccggaatacaagctctttgggataattgtgcactcaggattttctcctgaatctgggcactattatgcatacgttaaggttcttttatgtccttttttaattttcaagcaacttgaactctcgaactacttgctgatatcttaactgtcttgtgtaggattccttgggtcgatggtattgctgcaatgattcgtttgtctcgctctccaccttgcaggaggttttatcagagaaagcttatatcctgtttttcagccgttcaaaccagaggccagcgtctgctaaaactctggtaacatccaatgggactacatctcatgaagttaatggctgtgagacatcaaatccccagaagtttattgggccccttaatggtttcaacatgaaacctcaagccgagcagtccttccagaagggtaacctggcttcttcaaagccccataaatttattaggcccaaaccacgagccgagcaggccccactagaggataacctgctttcttccaaagttgaaaaggcgcctttaaggccacatgcgaaagtcagtatatctgtcaaccttggtgccaaaagggtctctcctgtcaatggtagactttctttccaccaagatgagaacatagctccaaaggcaaacaaagagaatagtgtatcagttttgccgactaaagttaactctggtacggagagaaagtttggtactgaaaatggtggcaatggagttaaagaaaacggcagtgcaccaggtagtagtaatcataaagtggcattgcatcctcatgagcggagtaatggctccagcaatgggggtgatcaccacaaggataacttacatccatgtggaagtaatggctcacaaaatggaactgctcaccccgaaactgagaggaacggtgttagtaccacccaatccaaaggcttgtgttcttcaacaaaggaagacccctgcattttgctgagaaaagacgaatcatctcggaatgaacttgaagcaataaaagagaggtaacttcggttttgtgcctttgctaaatactcgctattatattctgacgccatagctaacctataattgattgtgttgcacatttccacagcctgaaaaaagacgcgctgtcacatctacgttcatgcggatggtatgacaaggttctcatctccatgcatgccaagaagagattgcgtacagagcaatcaggtggagaagatggtagcgacttgaagtaagtgaagcacgaattattcctgttccctatgatcttctcatacattctcttcctcttacttgagtataatagctagaatctgcatatattgcatttggacctcttttggcttcatgcttcattataatcgtcatatttaaattcatgttttggatggttggacctttgtgcagaaggaggttgattgaagatgtgaaatcaagtttgaaatcacagattccagaggagttgaaagcagatctggtaaatcgtatctgggagattagcaagaagaagtactcgtgaaccattgttttttgcttcaacaaaaatgactcgaatctctggaagcatgaagcctctacttggtcccttcacacacacactcctcattcctcatttcatcattgcttaacccatccggctagtctgattatnnnnnnnnnnnnnnnnnnnnnnttttcctgcgactgtgatgatggtgaagtgagtttttttcttttctattattattacatttttggaagagagtaaaagtaattaccggaaaaaaaaagaaaaaaaaaacagatctcaatctgtataatataacgccttcttgttttttgcctcttatcgatgaagctttacacaaatatacaagtcctgtggaaatttttagtataagaacgttcttgaatttgtgtattgtatttgtggtttttcgttaaac

SEQ ID NO: 149949 - DNA, 729 bp, Arabidopsis thaliana landsberg
taacgcggcagtcatcagaggtgcattgagagcagagagaccagagctgcttacagtaattttaccccaaagtttgaaaaaacaacctcctgagagccaagaactattgtctaaagtaagcaaaaactgcttgttcaaaagtcagaatcttgttgcatctctgatctattacatctgaaactcttgtcttcattgctatggtcattttacaggtacaaaacgtggtagagaagccacataatgaccatttgccattgttagaagccagcaggtttgtgaataaaaaaccgttgatatacgttggtgaagatggaaactgaacctttttggttaatatatatttatgtgcaggttgtgtaatatggacatcatatcacaagttcaacaagtgatctgcttcgcgtttcatgacagtaagcttcttatggagacatgtcaagaagccaaaaatctacgcaagattgtcactctcttctacctcgattgattcacattcactctttattttcttctcgttacaaaacagagaagataatcctccttgtaaattatgaatcttgattaaacaaacacacacaaccacaattatattcttttgtccaaattttgatacacatcagtgctatttttataggattatttctcaactactattcgtcagtttacatctctgtaacaaaacaatttagctccggtagattcccattaaaaaatatgacttttaatata

SEQ ID NO: 149950 - DNA, 418 bp, Arabidopsis thaliana landsberg
atgatcgaaccactcgatattgctgaatattacctcgagggtcggaaagagtatcgaactacgggaaggtctcaccactatgttatgcttgagaaatggtttggaatggaatcgatattaatagaaaaggaaagatgcaaaaagagagatttgagtgatcttttgacgtttgattcttgtttttgggctgaagttgaggattcgttgattgtaattaatcagttgaatacaactgtggggatgagagacgatgtgagagaggtattgactagaaaactcgtggagtttgagggatacgtgtgggagataatcacaaaacgtgaggtttcgccggagatattcttagaggaaagcagtttcatgaagtggtggaaagagtacaaaaagatcaaaggctttaattcttataaactagacc

SEQ ID NO: 149951 - DNA, 1163 bp, Arabidopsis thaliana landsberg
gaaggttgtggctccggttcagactgctaagtctggtaagatgccgactaagccgcctcctccttctcaagtctggtaagttctattctagattagagtttggtagattcaatctttagttggatgtgttaggactcatagttttgactacatagtgattattgtcttgtttagttaagtttgacttagtatggtagttgtagatttgggatatgaatctcttagattgctttaataaccagagatgttgttactttgttgcctttgtagttgatttaatcagatgttacattttctttgatttgagtagtgagggaggcaaggaacgctcctggtggaggtcgtggtgctgcacgtggagggagttatggtcgtggtggacgtggtggaatcaatagggattcaaggaacaatgatggtcctgccaatgaaaacggatatggtggaggctacagccgctcagaagaaggagatggagctaaacgtggtgggcctgttggtggattccgtggtgatcgccgtggaagctacagcaatggtggtgattcaggtgactctgaaagaccacgcaagaactatgaccgtcacagtagaacagcgtacgggtaagctagctttcttaattgtttgtttagtcttgtactgattgagttctgtctggttttcctaattgtaaactcattgttgagtaggaatgaggataaacgtgatggagctggccgtgcgaattggggaaccactcaggatgatattactccgtaagtattcttgtaaaaactagttcttttctttctagatatgtgttttctgttgtgtttgtgtttgataaattaactcgtgttcttcgaatcactagggtgactgaagaatccacagctgttgtggacaagaatttgactgttgagaagcaagatggtgaaggtgaagcaactgatgcaaagaatgaaacacctgctgagaaagcagaggaaaagcctgaggacaaggtacagtattacctcttgaactcatatctgtttatattaacagcttaagaagaatgtttggttatatctaataccaatttgctgtttgtaggagatgactttggaagagtatgagaaggttttggaggagaagaagaaagctctgcaggcgaccaaggttgaggaaaggaaggttga

SEQ ID NO: 149952 - DNA, 1153 bp, Arabidopsis thaliana landsberg
agattagtatttcccgattcctcgccgccgttcatcaatctctccgtcgtgtttctgccactagctctccaccaaactttctctctcgcattaggtatttatcgcctctttatggcatataatcttgtgttttggaacttattgatgaagctaggttagaatctcctttgtctttcttatctccgattcgtgaagctctaattcttatttattcgatttatgtaatgtgttgctgttacacgatgtttgcttgtgagattcgattgaaacttgtgttgttgcaacatcaattctgtataagaaaggttcttaatttgactctgtagctttactttttttttagttgtttagggataaacatggcaggagaaggtgaagaagatgtacctagagatgctaagattgtgaaatctctgcttaagtcgatgggtgtagaagactacgagcctcgtgtgatacatcagtttctggagttatggtaccggtatgtggtcgaagtgttgacagatgctcaggtttactcagagcatgctagcaaacccaacattgactgtgatgatgtgaagctcgctattcaatccaaagttaatttcagcttctcacagcctcctccaagagaggtatgcattgttgacgattccatgtttcttcttcttcattgtctgagaagagatgcgatatgatcggtcatttggtatatgtgaatcattagggaattatcactcttacttatgacttatgaactgtgtgtgaccctcttgcctcataaattgtatcactgagaacctcaagtttttgtctgtcacatccatgccttttggttcctgaatcttgaagtttctgtttttgatgtttgatttaggttctgcttgagcttgctgcaagtaggaacaagatacctctgccaaaatcgatagcaggacccggtgttccactcccacctgaacaggacacattgctgagcccaaattatcagctcgtgataccgaagaagtcggtttcaacagaacctgaagaaaccgaggacgatgaagaaatgacagatcctggacagtcctctcaagaacaacaacagcagcaacaacaaacctcagaccttccaagccaaactcctcaaagggtctctttcccactctctagacgacccaaataa

SEQ ID NO: 149953 - DNA, 373 bp, Arabidopsis thaliana landsberg
accactccattgcccattgctctgtgtactttgcttctttaggagaaagaaagcacaaggggcaaaatcggaaagattatcatggccgacggtagtactagttcttcggagtccactaccgcctgcggtggaagcggcacaagaagagagattatgctgttcggagtcagggttgtgcttgacccgatgagaaagtgcgtgagtttgaacaatctgtctgactatgaacagacggcggagactccaaagatcgacggcgaagatagagatgaacaagatatgaacaaaaccccggccggttacgcctcggcgagatgaagctcttcccatgtcttcttctaacggcaaaatcgagaggaaacgaggtattact

SEQ ID NO: 149954 - DNA, 2893 bp, Arabidopsis thaliana landsberg
gataaaagatgatcgtctgaattagatacgcactaaaacatcaaagagtcactctaaactcatctctctcgccgaattctccccaacaatttccgccggaaacaaattctcagattccggtaactctaaaactatgtcatcggatattccgtgctgcggaaccacgttctcgctctacgtcgtgataatcatagctcttgtagcgttcgctggcttgatggctggtttaactcttggtctcatgtctctcggtttagtcgacctcgaagttctcatcaaatctggccgtcctcaagatcgaatcaacgccggtgagtgcttcaacttgatgacgattctgttgaattttgaagattctgttgtttagctgattttatgatttttaattgtgcatagcaattgaagaacatgtgtatttgattgttaggtaagatatttccagtagtgaagaatcagcatctgttgctatgtacacttttgatcggaaactctatggctatggaggtgatacttgattttttggtttctatgtatttgaagcagagacttgtatatataatggtgttgatgatctctttttattgtaggctttaccaatatttttggataaaattgtgcctccttggttagctattcttctttcagtgactcttatactggtgtttggagaggttttacatctgttacctatagttttgatatacttttgttttccatttttacagtttgtgattatagtttctctgctgttgagtatctgcagataatgccacaagcagtttgtactcgatacgggcttaaggttggagcgataatggctccttttgttcgtgttcttcttgaactgttcttcccaatttcatatccaatcagtaaggtagagagtcagattttctgttttgaaaaatcagcttgtgtaatcccttttctggcttgattgaaatgctcggttaaatcttgatgtttctctgttttggtaaacattgttgcttcaggttcttgattggatgttgggtaagggacatggtgttctcttacgaagagcagagctaaagacatttgtgaacttccatggaaatgaggtatgcagctagtgatgtttgctatgaccttggaatggaaaactgaagctgtgttgtcctccataataaatagttccagatgtgtcgctgaaccgttgtgtctcttagagccaacttttctgacagacttttgtatataattcttgtttactaggctgggaaaggtggagatctaacaaccgatgagacttcaatcatcacaggtgcacttgaattaactgaaaagacggcaaaagatgcaatgactcccatatcgaatgcattttcccttgagcttgatacacctcttaatttgtgggttcttttttttttgttttgcttccatcatcttctatttactcttattcagtttacttaaatattttgaccttataatctgctttcatcgacaatacagggaaactttaaatacaattatgtcagttggtcatagcagagttccagtttatttcagaaatcccacacatataattgggctcattctggtacctatctttcatatggactttgtttttgtattgtctagcttcacagcatgtaatgtccccttttgctgatgcaggttaaaaatctattggcagttgatgccagaaaggaagttcctctgagaaaaatgtccatgagaaaaattccacggtaaatgactctctaaagctaactttctttctttacgacgaggatttaatgcatacacagagttcatgtttatactatttatttcctccagtgtctctgagaccatgccactatatgatatcttaaacgagttccagaagggtcacagtcacatagcagttgtttacaaggatcttgacgagcaggagcaatctcccgaaacaagtgaaaatggtattgagcgcagaaaaaacaagaaaacgaaagacgaactttttaaggacagttgtaggaaaccaaaagctcagtttgaggtatcggagaaggaaggtgtgtctcggcataacttagcgacgttccataaataaacatgagaacacatgttagcctaattttctttggaattgtagtattcaaaattgaaaccggagatgcaaaatccggcaagagtgagaacggtgaggagcagcaagggtcagggaaaacaagtctattggctgctccagctaagaagcgacatagaggctgttcgttctgcattttggacattgagaatactcccatacctgattttcctaccaatgaggaggttgtaggagttatcaccatggaggatgttatcgaagagcttcttcaggtaactcaaaccgaagcatgagcatctgctttagttattagcattagagaagaaaagaatcatggccattcgtttttgctctgattttccaggaagagatccttgacgaaacccgatgagtatgtgaacatccccaccaggataagagtcaacatgcatgcttctccagagaatctacctagcgtgataacctcaatcacgcaatcatcatcgggttccactagtcccaaccaaacatctcatatggccacaccagattcaagtcctacaataaacccatcaaattcaagtcctacaagaaaaccttcagtatcgagtcctacgagagagccttcagattcttcacactccatggctccaaaacatgaagagtccacccaaactttatgatgatcatatatgagtgaagatagattagctatgtatccttaaaagatgacttctttaacagaatcgtttgagtgtgtttgagattaagactggttaatagtttctttgtaatgaaaaggatggatcttttaccaaaagaaagaaaaaaagctaatactaaactacaaaa

SEQ ID NO: 149955 - DNA, 920 bp, Arabidopsis thaliana landsberg
tggattcgaacgtgtggatcgctggaaaaaataaactttagggtcgctagattacgattgcttcgctttttagtagtagtaggctacaatcgattggcaaacatctctatatcggccataactccgtcaagctctgcagaggctgcttcatcagtattgagagacttcctggtgattgattctcatgtctatgtctgagtttggcattgtctacgccatccatatcatcaccgtccaattcggctccgtcgtctcggtaaattgagaaacccttctgagacttgtgttgaatttataatctctgtataacgaatttggttttggttgcagaaagtttgtgaatgtcttctacgtaaaggacctctttcctcacgagacatctctcgtttagctgaatcagatatcaaccataacaaagttaaagatattctctatctcttgattcagcacaattgtgttcaagctttctccattgaacctcctggttagtctctatattggttgattagtagcaacacacagaaatagagaactcaatgaaagtaattttggatgttctttttttttactttgtagatggatctgagagcaaagctatcgcacagtgtattgagttgtttaacaacattctgcatcgtgtgaggtataacaagttttcgcggattgtaaacgaagaacttgactccaaggcttaatcgggcttcttcttctctctgtacagggttatgattagttggttcatgcttcaagactctaatgctaatcttatacttttgtttgatttatatgtttagtgcggtgcagatcttgatggcttacttaattacggtaggcttaccttgggacaacttatcgaaagagatagaggcgaaccgtgatatcatatgtgcctcctatggtaaggaaccacagttcacact

SEQ ID NO: 149956 - DNA, 390 bp, Arabidopsis thaliana landsberg
gcatttacctattcagggacacaattgatggtgagtgcatggaagattcacagggatccaaatgtttggtcgaacctcgaacagttcgagccagagagattcttgacatctaatagagaattggatgttggcgggcagagttacaagttttttccatttgggttgggacgaaggtcatgccccgcaatccccctaggtatgaggatggtgcactatctcctagccaggtttttgcacagctttgacttggcaagaccatcgagtcaagatgtggacatgaccgagagcaatggattggtcaatcacaaagccacccctcttgaagtcaatatcattcctaggcttcataaatctctatatgaagtggatcatatagggactgataattag

SEQ ID NO: 149957 - DNA, 363 bp, Arabidopsis thaliana landsberg
acagattctatttccttctgtctgcgttgacgagcattgacctggtggtatacattgcatgtgcaaaatggtacaaacctatacaactagaaggaaaagatgagatgcaagacatgagtgatgatgactatgacaccgagagtgaagaggaacgagagaaggattctaaagtctaacaaatgtgtgtttggttttcagttttccggtgatgtaacagcaaactgattcataaataaaaggctaaatcggatcagtctttttcgtcgaaaagacttcttctttaaactcctaagctctaaagacttaactgtaatgtgttatatgggttactcttaccaataagtaatcagatgagatagacag

SEQ ID NO: 149958 - DNA, 4891 bp, Arabidopsis thaliana landsberg
ccctctgacagtcctatcacagtcctcgttgtaattgccatctgattgagcaaggttctcaaccaattcccagcctttttcaacatccttgttctgaaaattcccattgctggcggtagcctgaagcattctgatgcgtggtaggactcctctgtaaagagtgctgagcagagaggctttagtaaagccatgatgagggcattggttggtgtaacccttgaaacgctcccatgcttcacagaagctttcaccattcttctgtgagaaaccagaaatctcatttctgagtcttgcagttctggcattggagaagaactttgacagaaaagccttcttacaatcatcccaggtggtgattgagtcatgggacagattcttctcccagatgtgtgctttgtctcccaaggagaatggaaacaaacggagcttgaatccgtcttcactgacaccattgatcttcgttaggttgcagagcctatcgaattcatctaggtggtcgagtggatcctccattggcagaccatggaatttgttcccctgaatcatcgagatgagaccactcttaatctcgaagttgttattctggatagcaggaggtgcaattcctttcctctgacggtgatcacgtggtgcatctccagcaccaatgttggcagggccattttgtttattctgttcttcagccatttcgagtggttgctgaggtacagggttgactgtggttctcctttttctgagttcgcgagctgtgcggttgatgttgtgattgaaaaggaggttctggttgcctgttgatcgagttcgcatacaacagaggtgtacctggatcaagaagacaacaagaaaaacagacagttagtaactgaaaagaaaattgaaaaagaacttgatctaagcaagtctgaaatctcaaatgtaacaaacaaacacccaattggcaacgacgccaaattgataataggtttttaagatcaattaatcctaaagcactatcatgtcattgtagtactgaaggttgtcaatccaaatgggtgtgatgctaacaatcaagatgtgatcagaagtcactaagtcaagccaagtataaacaggttttggtgcgttctagcagtcctaagtgaacatgcagaaaacagaaaatcaagcagaaacaaataaacactcgaccaacacagctcgttgcagagcactgggtgtggtcgagtgacaggtcgagaaacagacagatactgtaacagggatactcgactgcacagtctgttgccagacaactgggtggtcgagtatcaggtcgagtaacagtaaagaattgcagaaactaagcaacagatgacaggatgcagtacacagcagtagagtaaacaataaaatcaatcagataaagaattcctaaggatggggtaattgagtagtttcgtttcctcagtttacaggtgattgacatgctcaataaggatggggtaaagagaaatccggattacaaaaagtctagaacacaagttctgcggaaataaaactagataaaaacttcttgtctgcgaaaatgtgaagtacatgctacttatagccaaatatcccgaaaccataatactcaaaacgacgaagtattgggacggattaagaactgtactcgacccatgtggtcgagtgagaggtcgagtgaatagctggagtcttcttttcttccttgtgctcgagtgtctggttgagtgcggaatgaagaaggctctgaagcttgtcatcgagtatgcagtcgagtggtgtgatggtgatactcgacttccaggtagagtgatgaggtcgagtagaggtctggcaatgggatgaagtcactcgacctgggggtcgagtgatgtaatccagtgatggccagaagatggagatgaagtcactcgacctgggggtccagtgatgtgatcgagtggttgtcaagagatggagatgaagacactcgacctgggggtcgagtgatgtgatagagtggtggtgttttcttcttgaccaaggggtcgagtggtctcttgagatcttgaagctcctactcgacctctgggtcgagtggtttgtcatgatcaggtccgcttcttccagttagctcgtcgacagctccaaatcacctgaaaacaacacaaatatgcaacatgcatgcaaaactatcctaaacatgtaaagtgatgacaaatgatgtgaaatggtataaaacagtgatgatatgatgctaaaatgatgacaaatggatgctcaaaacatgaaaaatacacacttatcaactcccccaaacttagtctttgtttgccctcaagcaaacaatcaagaacaagctggaggtgaggtttgaaagcggggactcagagccaaagcaccagataaaccagatgaaatcaatgtccaagttgaaagttctaatctacaagatcgaattctacttaaaaatgttagtcatgcctcatcatcaatcaatccgactcatatgctcgacctacacaagtttacaaatctaccaatccctttaacattcattagttctggaacgtgaatcaagcaatgcatcatcaatgaactcattaggctaaggtaaaaggtcaagagacaaagatggtcccttacagaataggcttcagtaataggggatctctcaaaaaatgattaagctttagtagaattctaaaggtaagtcccaagctatgcatacagagataagatcccatctaccctgaatatatcaaatgaagctctaatggtaatcacatctccaatcccaatataagaacttaactctaccctttgcattcatgaatcttttaagccttttttctaatcattcttttcttttcttttaactctaggagaagctttctcaacactttgatacatctagcggatttggatttctttaacaactaaggttcctgtttttaacattttaaaaccaagggcttttgcccatcttcaatagctaacaagaactctttcttttctttacaaatcccaaaacctttactagactttttctgcttctttagcttacttcacctagagtcctttactttttctcatcaatgaatcaacccccctttttttttttttttttttttttttttgggaaacacatcccaacccaaagtataagcacccacctagtcctatctagtccgaaaaatgcgaactagaactacatgagacactatttctgtcgttacaaacctaacactttctaccaagcttaatcggaataagacctcacaaacactcacaagtgatatagagcttgaaagaaagtctaggtttgggtttgggttaactgctctaataagaagagtcagctacttggattaacaagagtgatcaaaatgaataagagaatccaagtattttagggtatccatgagttcaaatttgatgcagacatgataattaaagatcagattcaggttcaaattgatagggaatggtatcagatcatgacagtgaggtcgagtagagcaatctaggcatggttcagttttatttcaaattcatcgactatgcaacagacaactagcaacaagggcactgagtttatccggtgaatcaaaatgcttacaaggctatctcatcatcatcccctatgcatatgcaacaatcctaaataaaacactctagactcgatcctaaatgtgatgcaactacatgaacactctttttttttatgaaatcattttctgaaatttttcaaattttttggttttttctatgccttagatgaatgcagactcaaaattatacacaatgcaacacacacttcctgagccctcccccaaacttaaatcacacagtccactgtgtgaataaacttggaagagagtactcaggacaaatccaatcacagaaacaaaaaaaaaaaggaagaaacaaatcacaacagacggtataatacaatggtgaagtgaggcgcttacctcagtcgaagaatgaacgtagttgctcgtcaatggctgcctgtgattgctcccaggccatagacgaaccaccttgttctgtatcagcttcagcaggtgggtactcgacctcactgcctctatggcggccagcaccgccatgagtatactcgacctccattcttctgctgcggccaccaccgcagtcgagtgatctcctgccgtggataagctaaaacatggtcgagtatccttcattgctctgtggtcgagtattgtgttgtactctcagagccagaatccacttcactcagctctttatacttatctcctgaaaacactaaccaaatgcatcaaaaacaacaaggaaaaataaagatatgtacaaagattgacaagggatttgctcccaagtgagcttattttaactctctaagcttgacttctcatacttattaagcttagggtgggttgtgagaggaaatgaggtctcctctccttctttagtagagtgattatcatactcattagggtttcttgacaggtctgcaattgggtactcagtgatcatgtcctcacagtaagcttctttttttatcaagatagtcttctcctctagaccattccgacgtgaattcacagccttctttgctgaccagaatagtggctccatcctcaggggcgttcttgatgttgagtggtatttggttggcttttccactgagaaccttgatttgatccttcagctcttttacaatatgttttagctcatgtatggctttgtcctgccatttagatctctccttgagttctaaccaatcaattgacgtgtaagtgcttcccttaagttgtttggtcgagcatgagctttcaggacaagttggaggcttcttcgagttgttggtggaatcagttggtcgagcatgtgttgaacttacttcattagctttcataacctttgtgtcagaccccat

SEQ ID NO: 149959 - DNA, 1091 bp, Arabidopsis thaliana landsberg
actgccagagttttctgtatgagatcatatctggtcttcgttcggcatgtatcgatgttgcaagttcttcttctgcacctcctgcccctctaaccacaaagccaacgaatgagctcctttcagaagctatgcccatgatagatacagtatacctgttctctttcttgctagaattttcttcccgttgcttggtctatcccttttgataatctatcaataatgaaacaggataccgtgcttgtggaagataatgatcacaacgtggacgaccctgaaaacttcgaggtaactggagcatgtgtaaaaaccataataaatggtgaagtagtagtagctcttaactatgtttccatacaccagttttgaagcttctgttaaagaccctcaagtattgccttaggagccctggtcacagtatgtattttgattgttatttggcagggaaagcgtattgatcagtttgaagaaggctgttcatttacaagctccaacagggaaagctggggcagatgctcttcactaggaggcactgaagaagatgagagtttgacagctggcgagggtgatcaggttaatgttctttgaatctgttttatgaaacattttgatatttggtgagatggggtttcgtttctgatatattacattccaggtcgagaaaactgctgatgtaaacacggaacgaaagccaagagattctagtagagaagaagaagaagaagacagtaaggagaagaagattaagaacggaggtgaaacagatgcaaagaagcctagacacgaaaaattggaaagattggaggcctttagcaaaagactgcggcattacatcctaaagcgagtaaaccatagaagacatcgttcaccttgacaaacaaagttgaagaaaatgctctaattgttgtatatctctgaatcttgtaatgtacacttctccttcgacttggcaaatggaatcacacgtggccagtttaacctcaatcatatccttaccattgtttcaaatgccatgcaaatgggctacatttcttagaaacgcaaaacacatcttcattttagatatgtgaatagacaaaaacatgtattgtcaa

SEQ ID NO: 149960 - DNA, 3021 bp, Arabidopsis thaliana landsberg
  unsure (1)..(3021): unsure at all n locations
tccgggaatcacgccggagtttgatccgaagactatgcgttccaccaaacctggattgaagcgtctcttcatcaccagctctgtactcttttcattccttttaggtattattctttggtcttcttaattccttgagctccgaattttcgatttcgcttcctttgctttatccctttccggtatcggaggtttcaggtgtgccatttctgtggaagtcagtggaaatatatcgctctccgttaccgttccacgacatcgattctctctccgatcaacttgagtcgacccctttgcgtttcccttgcaatttccacgctgttttcgtcggttttcgatcgacggatccggataacttacgatctcagatacaagatggtataaatcagttaactcatcaaagttcacaatgtggntcttgtgaattttccctctctgtcaccgttcaaaaccgagaagaccagtgctctgatcacttgcgcatagttctaccacgtgctcttaccgttgtgaagtgatcaaaaaaaattgttttggtgttggattggatgatacagtggatgagtcactgaattatgtgtttagtggctgttctgagaacagtgggaaaatgtacagtgttgtcgtggtgaataaagagaatgccaatggtggagatgaggtaaaagctgtggtggggaagcgaaggcatgcgtggattgtgggcaatggattagaagagaggtatggtgacattgtggctagagtttctgagattttcgttcaggcgtttatgaatggtggaagagaagaagactcaattcagggagagtttatgcctgtgggatcagatgggaagattgttctttcgttcagtcttttaaattccaatccacgtgattgggtctacgattggtaatgatccaagtattatgctttctcaccatttgtttttgtatatgtatacacctgaagcaattttcgaaaatatgtgtttacttttcttttaagttgtttgtgctctacgttgacagggactttcagaggatagatgaggcattgttggctccggtgactaaggccttagcacctatagctaatataagtgttgaaagtcaggtagcattcaccacgggatccaaatctttggcatctttgctattctctcgagctactgatttatgttttctctgtcattaggttttgtatcatacaccgaagtcttcgttttcatcttgggataaaaaacttcagagctacatctttaggaccagtgatcttccgttttttgtacgtaccgttttctcacaatctccatgactaatttggatataactgattatttaaaagatcatcttaaatggttcttccaggtgaattcaaacgaatggcacttggatacttctgctggagccagtggacggtccaaaatactgcaatttgtggtgtatattattttattatgcccatccttgcttaaaatgctacttgatgctgtgactactatactgtttcctgataaactgagcagaaatgtttgcacagaaatatctcaactctatgatctttcctcatcttgtcagatatattccatccggaaaagaatgccctcttcttttgcagttgccaaatggggagatatctaaaacaaatggcttcatatctccggttagtttccttgcgtcaatatgttctttcgttctcctaatatgttggtcagtgacatcttgtcattttgttctatagatgtggggtggtgtgattgtgtggaacccgggaaattgtgacaaggactctgaaagcccaagtaggaacacgatatcgcttcaggtcggttcacttttcatagtcatattatgcttcacaccaattatatataggttgatattttcacactcacttttcatttttcatagtcacttttgacttttcattgagtatctgcagaaccttggaagatcacactgaagtatcatcattgattttgcactttctgaaacaggatctcgagcaaatagtcgaaattttcttgggacaattccgacaactatttggccttaagtctgaagacaattataccagtggattgggcacttacaagattttacctagtgaaagaggctttacagagtggtaagaatgtgataaaacctaaaatagatgtgagcttatggatcaataaggtttcaaagcaaagcaagggatgctatgaggaatggatagtgatgggtgttgtctttactggtgtatcatttgcagggaattggatgtcttgtcacggaagcacacatgcttcaatctccattcttgttcaacaaccctcggttctctctctagattggtgtgtcattaactccacatgtatatttatagcatgctctgctgcatcagccatttcaaatttcatcacttggcacttgcaggttcggtcactccccaggatgattatcaaggatgaaattggagaacaagtatgtttctcaactagaatccatttctgggaacctttttactgttctgatcattccattgtgttcccccaaaccaggtgaaatattctctgaaagcagcaaagttggctcagtctaatgcttctttgggaggatacagttcttcagccagtatgttaagcttgacctatactcaatatactctgttctaccttagtgttggtgaatctaacaagaaattgcggttttgtataccataataggttcatcaagagaagcaaggtccttggccgagaatgccttcttccatccatccatcatgtccgtcagctacttctcttatgaacattgctttgcagtgtactcagtaagattcattctctactactgttattattattagcatcttcttctttctctgagtctcatgtgagtttgctttcctggatagccgtttttcctgccggtgataggtcacgttgtccttgctgcagtacgagaatggaagagatacaaacaagagaaggcaaagtacttgacatggctaaccagaaagaagacgacctagccctctttagcatactacagattctaa

SEQ ID NO: 149961 - DNA, 534 bp, Arabidopsis thaliana landsberg
atccaactatctcaaatcaaacaaatcacatttccactctccttgaatctgatttctccgcaaaaaaactacatcgatcatcgataatagatcgtactgcaatactatattctcacaacgatggtgtttccggcgtgtgtacagtgcggaacaagacaaaacccctgtcggtgcaaagtggttggaccaactttagggttcgtggcttttctgataaccggaatcatcgagtggccagttggtgcggtggtttatatctttaaacacgccaagggtcgtcgtataatgggtcatccggccagaaaagtttatcccaaagtctctcgatctattcccatttgactttcttgtcattaattataatcatgctttgtatttgcttgacaaataatgattccactttttagatatatgtgatcacataaggtatctaagtccagaattagtatccgttataatgaccaaataatgttatgttaaaattgatactttgtaaattgtaaattcaatttgatttacttgatgtgtaccttt

SEQ ID NO: 149962 - DNA, 1078 bp, Arabidopsis thaliana landsberg
  unsure (1)..(1078): unsure at all n locations
atgtcatcttccagaatattcctagtcggtaattccatattccgacctcacaaaccatcctttcctctctctttcaatcgttttccatctgtatctctccgcttccgatgcttctccagtgacgccgccgccgcagtagcaaccaccgtggattcggattcgccgtctctcactcctcatccatggccagagtggataactttcgtcgatcgcttaaagacgaaaggatatttcaccaaagacaccgaagatgatactgtttatcaggaaatgattctcgttaaagatgcttgtctcagcttcgctcgtgatcgttacgacgttctcaggtatacaattttctcaaattcatcaatcttcagtgttgaaactgatgattttgtgcctcttgatgcagatccttatcatcaggagatgtacaagctcttgtggagcgtggatgccctaatctcttcagaaaaactgtgaattcttccaaaaggattcgagctcatgttaagttaaacgaaggagatgtatgttgttgcattagctatggaattgtttaaaccttgataatagagagatctttaactcataagaaatgttttgtttttgaatcctaggtttgtggttcttgtgatcttcgtagctcgtgtgatagagcttatgtgatacttaaggatacagaagctgatgctcgaactgttgatgttatgcgtttactattgttcaatgcgcttgattctatagttatctctcgaggtgaagttccacctggtaaagaacttgttcatgagtctgcaagaagacttcttttagagttggttgagtttagtgagaagcctttaatccctgctttaccaaaaccttcnnnnnnnnnnnnnnnnnnnnnnnnnnnnnnnnnngcttttaagtcgaggaatgatgagccttctcagcgtgtggcttttaaatcgaggaatgatgatccttctcaacgtgtggcttttaaatcgaggaatgatgagccttctcaccgtgtggcttttaaatcgcggaacgatgagtcttctcaacgtgatcgacctctttacagtgcagattgggcttgtcctaa

SEQ ID NO: 149963 - DNA, 690 bp, Arabidopsis thaliana landsberg
tctcgtggacatttgacctagacgggatcgctgaactttaccagtcctacgaagacacaaatctatggtaatcttctaacctccctgtgtttagtggaacaaacttgtatgagctcttacctaattatacgcaaacttgcttctacaaaataaaggaactttgttgagaatcttccaagaggagtacatgtgaattttctgaaagcggaaagaagcttgcaccgttgggccctagaagaccttcagcgaatccacgccgctgaagagctagcctctgaagaaggcggtggtgtagaaatgcatgtcttggaagatgccggtcattgggtaaattaaactaactatgcatctgcttctacattgcttcatctttgttattctattactgaacccgtaaaccagtattcgggttgtgtccgttcaggttcacacggataacccggatggtctcttcaggatcttgtcatcttctttccaggttctcagagcctagaggtgctgaacggtcttggttcggctctttttctgtgtaatacttgtggagaagttaggtctaaaaacagttgacagatacaatatcatatacatcaacactgtgtccgtgtaatgttctgtgtgacataagtaattcagaagtaacatcatatggctgtatcatccggtattattcttgacttgatgtcctttaca

SEQ ID NO: 149964 - DNA, 622 bp, Arabidopsis thaliana landsberg; identical to SEQ ID NO: 56555

SEQ ID NO: 149965 - DNA, 761 bp, Arabidopsis thaliana landsberg
gaaaatggactatgactttccctaaggagaagtctgataagagctggctctacactgtacggtttctattcttcttttattttgactcgtaactcctgcgtcatcatccaattgaatctcaccggtttttctttttacatgcttggtttagttgcttgcattgattggagagcagtttgatcactggagatgaaatatgtggagcagttgtcaacattagaggaaagcaagaaaggatatctatttggactaaaaatgcttcaaacgaagctgctcaggtaaatagaaaagacctttctcatcaaaactcatcaaacagtctctctgtgtaaaaataagactttaattctcgtctgcatcaaatgttgcaggtgagcattggaaaacaatggaaggagtttctcgattacaacaacagcataggtttcatcatccatgtaagaagaaagcttctcatgattctaattcaaaagtcttcattttcttcagatctctcattgtttggtttggtttcttttctttcaggaggatgcgaagaagctcgacaggaatgcaaagaacgcttacaccgcttgaaacctctcaaatctttgcattgtttcaattacagttttgtatgtgagagatctctatttatctaaacatgacttgacagtctgtctttgctagtgttgattgttcacgaagctctaacatttcatttagtaatatattagtatggttcttcataatatttacgttggtgcccttgtataaaacca

SEQ ID NO: 149966 - DNA, 1058 bp, Arabidopsis thaliana landsberg
acggacaaggtttcggttctcgacaagaccatagagtatatgaaaaaccttcaacttcaacttcaggtctatatttaactttattcactatttttatttcacactttattcagtgttcttcttccatatatttgaattattgaggcttgaggttttaagtgtttatctaatagtctgagtttttttttggttaatttaactagttgacataaactgttcttggtattcgatctgactcgccaacttatgagatatggattattgttttacaatatgggtttcaaattgatcaaacaaatatagccactttttggtgtttagtgacgaaaaaaatggaatgatatatagtaggcagtagataacctagatggtgaagtctatagaatttctttaatatttcgaattcatctcttttcatgtgattatttagtgccaactaaatgttttatattttatagaactatgtacccattttgatcattcgaatatgtatatgtgctatttatattcagaaactaagttgtaatcaaagttgatgttataattgcagatgatgtcaacagtgggggtgaatccttattttcttccggcgacattaggatttggaatgcacaaccacatgctgacggcaatggcttcggctcacggcctaaatccggcgaatcacatgatgccatcgccgctaattccggcgttaaattggccattaccaccgtttactaatatttcattcccacattcatctagtcaatctctatttcttacaacatcatcaccagcttcttctcctcagtctcttcacggtttggttccttatttcccaagtttcttggatttttcttcccatgcgatgagaagactatgataagtaagtagctcgataaaagtttatgtgaaatgatcgttgactaattaagagagaaaagagttccaaattaggacagtttgtgtgaaccatttgtgtcatatactttttttttcgggtggttttgtatattaataataatcaataagttaaaactttttgtataaattcttgcatgtaacaattttttcat

SEQ ID NO: 149967 - DNA, 2908 bp, Arabidopsis thaliana landsberg
  unsure (1)..(2908): unsure at all n locations
ggcttccattagtagcttacacagatgggcatctaatcaacactctcgtcttcctcgaatcacttctatttctgaggctgaccaatctcgacccattaaccaagtcgtcgccttttcggttcctatatccacaagagacgcgagtattattcttctcagctcgattccattgacaagcttcttcgttctaacaccgagctcttcccaagctagagagagacgtagcagaaaagttatccctctcgaggaatattccactggccgttaagtccctcgctctcttcttagctatcggttcgtcttccgcacaaatttcacaattagtgtttggaattaggtttctttgttattgcacatgattactctcttgtttaattgggttttgagagtttctgattcgacgaaattctgaattgggggacataaaaggatttgcttgacttgtatgagaagtttctgggtttgtaaaaacataaactttagcttgttattaacacaatgtttgtgttactctgttcttgcagctgaagggttgaaattctatgacattgaggaaggcaaaggtccagtagcaacagagggatcaactgctcaggtctctctagctaatgattcacattttaatttctctatatcgaaatcgagttctcgcttttacaatgtaatggtgtctgtattttccacatttaggtgcattttgatttccgttacagaagcatcactgcaatttctacccgagaatccaagcttttagctggaaaccgtagtattgctcaggttacttcaccatctatcccttttgattagattctgcataatttttagtttgatggtggcttacttctttctggagcagccttacgagttcaaggtgggatctacgccaggaaaggaaaggaannnnnnnnnnnnnnnnnnnnnnnnnnnnnnattctctgcacaggctgcaccaaaacctcctccagcaatgtatttcattaccgaaggaatgaaagtcggaggcaaggttagaaacactactgcattttcgctctcttcttcttacaacatgtagttacatataagtagttttgacctatgttgttcttgcagagaacggtgattgttcctcctgaagctggttatggtcagaaaggaatgaatgagataccggtgagaacctactacaaattgtatatgaggaaagctccgttttttgctgaaaactaattacaaaatgtagtataatgcttgtttcgggtttaagagataataaaatcatgtatgttgttgcagcctggagctacttttgagttaaacatagagctgcttcgggtgactcctccaccagaagagaagtgaacgctaataagagaagtttgaagcttcaagcattgtcccaacatttgtgtaaagatgacaaaggagaaaagagagaaagatgtaaattttggagtttttagtttgtgtctggttggttatacaccaaactctggtacagtgaaataaccggtatatttgttggactaaaatttgttaaaagtatataattcttacgtggcagcttctagttggctacaatatcttaaaaccaaatcaaatcaaaacttgaaatgatttgaaatcatagaaccgagaaaaccaaaccgaatgtcaaaccataacaaatttggttttagttcaaccgataataaaccaaaatgtctacagctacctactaggtgagaatttggttgctggctctgcttgtgagctttggtagcgatatctccggtagcttcttttcccgagaaaatctagtgagaaaaatggagacttctctgagatatgctactaattccaggtctctgaaaattcatgccaaggagaagtttccggtgaactccaaaactcgcctgcaggtgaatttcttcaaattattggctgttatggtggattttagcactattcttcaatttgattgcgatatattcttttgattttcttccttaggattatttaatgcacaaagcctcttacttatttataggctaatggttttcagggtttatggaaattgtaattattttctatgtacacaggctttagagtcttttagtctttagcagaaagagctgtgtaggcttaaagaagaatcgatagctttttggaagattatacttaacttgttttttggctacactctatccccctgtcgagattatggagcagggaatgtttgtgttcttactttcttttgttggttttacatttgtgattagcttcatggagagctagatacaggagctggagtgccaagttacttctgtgcaatgataagatacttttttcatgaggttttgatcttgaatttgtgcttgagctctttgaaccttttaccagaccattttattgattaccatgaatttgtgtataggcttcaacaaaccttggagttggtttgcattatgataaacgcgaaaagcttcggtgtcttgtacgtgggaaaaagaagtttcctgtgataactgatgaggttgtaacctttaatatcaaaggaagatgtgattttgaccaggacttagttcaggtttgcctcttttgtttttcatcacttgtgtttctttgatggtttttaaaactttagaatggactgaaattttgtgattttgccacagaggaacgcaaaaggagctgctgaatttgattggaacatatggaagtttcagaaagatcaggatttacgcctcagaattggctacgaaatgtttgagaaggtacgactttagcttaccgtttaacaaagagaacaacaatggttcttattggatcattgaacactatgtgttggctttctctgttacaggtaccttatatgcagattagagaaaacaattggactttcaacacgaacttgaaaggaaaatggaatgtgaggtatgatctgtaa

SEQ ID NO: 149968 - DNA, 1952 bp, Arabidopsis thaliana landsberg
atgaccttttcccaattgattggcagtgctctgaaggttctagcagaaaaagcatgttgggatgttgctgaaattaagacaaaaggtgatagacagcttctgaagtatctggtaagcacttgttgtacatataatcaatgtctaaagacatttttcattttcctaggttgatattttctgtatcaccgtctgttttgctgaaattttggtttggttttaaggtatactcggcagtccaagctggatacttggagaaggttgatgaactgtgcgatcgatattcactccaagggctgccaaaagcacgaggtatatattgctgcacggaaccatgcctagtgtttcaaaactatacgacgcttacagtggtattctttattttgttcagaggctgaggttgcttttgttgaaaaaagctttctgcgtctcaacgatctagctgtagaagatgtagtttgggttgatgaagtcaacgagttgagaaaagcaacttcttttcttgaaggatgtagagttgtgggtattgactgtgaatggaaacctaattatattaaaggcagtaaacagaacaaggtaacaactcgtagtctcttctcattccttacatgccatagtattcttaccgttgttgttcttgttttcaggtttcaatcatgcaaattggatctgataccaaaattttcatattggacttgataaagctttacaatgacgcctctgaaattctggacaactgccttagtcacattttgcaatcgaagagtacattaaagctcggtatatatgaaatctatcttcttcttttttttgcctgccttattaagagtctctctgactgaggattaccctgatcataaattatcctcaggttacaattttcaatgtgacatcaagcagttggcgctttcatatggggatttgaaatgtttcgagcgatacgacatgttgctagacattcaaaatgtttttaatgaaccatttggtggtttagcaggactaacgaaggtgagctcttcttttgtcaactagctcttaatattacatccgagtcacaccatttcgataggaatatcttaacatcatttcttgttcgatctctttgttctgtatcagaaaatattgggagtgtctttgaacaaaacaagacgcaatagcgactgggaacaaaggcctttgagccagaatcaggtatataatcgtattcattatctgtttacctagaacctcgagaaaaaaactgttggagaacgtaattgttgaatctgatatttaactgaattgtgcagcttgagtatgctgctcttgatgctgcagtgttgattcacatatttcgccatgttcgcgatcatcctccacatgacagtagttcagagacaacccagtggaaatctcacattgtaagtacctcttataaaagcccttatctttcatctgataattcaagacgataaatctttaggcttcaaagcgtacttagaaatatgagtttgacaatatcttaaccagtggaccatttttggggtgatatgtgatttgagtggcctttggtctgaatgttagaagtgaacttggaatctaacatgagagtatttgtgcaggtctctcacatggagagcccaaagaagttgaagaagaagacgcctaagagcaatcccacgcaaacatcagcctcgacatttaacaagccatcagacaattggaacaaatggagctagtgtaaatatttgctcaaactctaaaatatttaggatttatgtagggatttgcgttgaaaagatgaaaaagaaatatttgtttcagagtaacaaaaaaagaaatcttaatgagggggaatctcatttacataatcttgtatgatttgtgaaagtatcttcacaggatcagtggtacaaacccgagaactagtacaatgaacagtccaggcagctttttccctgccttgccgaaataga

SEQ ID NO: 149969 - DNA, 2266 bp, Arabidopsis thaliana landsberg
atgggtcacggaggagaagggatgtcgcttgaattcactccgacgtgggtcgtcgccggagtttgtacggtcatcgtcgcgatttcactggcggtggagcgtttgcttcactatttcggtactgttcttaagaagaagaagcaaaaacccctttacgaagcccttcaaaaggttaaagaaggtaccgtacacacacacacaccaacgtaaaacaaaacatcaaaatcccttcttttctttttgtttgagtgggttccacggatcttttgagtgagattagtattgtttttctgggttataacacagtgttttactcttttaattatggtttctagtttacaaaatctgcaaattgttcgataaatccttcaatcaaatgtagctatgtcagattttaagtagcttgagtctttaaagtttaactctttactccttttggtgttgctttggttcgaatttattgatctatgacaaatctttaaggatttgcagagttgatgttgttgttaatagtggaccaattgtttctttaaagcttaagtgagatgtgactgtgtctgattataagcagcgctttgagtatttaaagttcaaatctttcactttttttttttctttgtgttgctttagtgcaaatttgtggatgtatgatgaatcattttggtgaattgcagagctgatgttgttagggtttatatcgctgttactgacggtattccaagggctcatttccaaattctgtgtgaaagaaaatgtgcttatgcatatgcttccatgttctctcgattcaagacgagaagctggggcaagtgaacataaaaacgttacagcaaaagaacattttcagacttttttacctattgttggaaccactaggcgtctacttgctgaacatgctgctgtgcaagttggttactgtagcgaaaaggtaaattcaaataccttcagggcctcattatagtcatattaggtgttgctcttgctattacttgattgaatcagtacttacttctctccctcttgttttcagggtaaagtaccattgctttcgcttgaggcattgcaccatctacatattttcatcttcgtcctcgccatatcccatgtgacattctgtgtccttaccgtgatttttggaagcacaagggtgagcacaaaccaatatagaaattttctacattcaatgtatatataaattaagttctcaggtgtgaaacctctggtttatctatgttaatgcagattcaccaatggaagaaatgggaggattccatcgcagatgagaagtttgaccccgaaacaggtactaaatcgattatatgctagcggaacattatgcatattgtttgattatttattgtgctttgttgcagctctcaggaaaagaagggtcactcatgtacacaaccatgcttttattaaagagcattttcttggtattggcaaagattcagtcatcctcggatggacggtatggtatctttaaattacattactagttttatattggttatttgtcctttggaactacccgatgttgttagtatgttgtttgcatgacagcaatcctttctcaagcaattctatgattctgtgacgaaatcagattacgtgactttacgtcttggtttcattatggtaaaatcttgattacttacaaaaattgagatttggtaatcaagaacatttgctttgatcttttagtctaacaatctatatggtttaaatacagacacattgtaagggaaaccccaagcttaatttccacaagtatatgatgcgcgctctagaggatgatttcaaacaagttgttggtattagttggtatctttggatctttgtcgtcatctttttgctgctaaatgttaacggtatgcttttcacaaaactcaaatctttttcttatgtctagtttcaatagaaatgaaaagaaattgttattacgtttcctttgatatcgaagctacaattatgtatcttgcaggatggcacacatatttctggatagcatttattccctttgctgtgagtcatttgtttttgtcctcattttacttcgttggaatgtgcttaaatcttctttcagttgagctgaatttgttttttttaatgtaaaatttgaagttgcttcttgctgtgggaacaaagttggagcatgtgattgcacagttagctcatgaagttgcagagaaacatgtagccattgaaggagacttagtggtgaaaccctcagatgagcatttctggttcagcaaacctcaaattg

SEQ ID NO: 149970 - DNA, 1173 bp, Arabidopsis thaliana landsberg
acgatcaagagcgtgtgcgtgaggatatgggtaggcctccatgctgtgacaagatagggatcaagaaaggaccatggactcctgaaaaagatatcattcttgtttcttacattcaagaacatggtcctggaaaactggagatcagttcccaccaacactggtcattatcttttctcaacatgttttcttctagtgtctttcttttctttgtttgtatatgtgtcctgatgtttgtatcttaatttggcttttaaaagggttattgagatgcagcaaaagttgtagactgagatggacaaattatctgagacctggaattaaacgtggaaactttactcctcatgaagaaggaatgatcattcacttgcaagccttattgggtaacaagtaatctcagacaaaaggatctacatctctttatacttgaatgttttgtgtatatattttgatgatgtgaaccctaaactggcttatttgtttacatatggttgtggtaagatgggcagccatagcctcctacctccctcaaaggactgacaacgacatcaagaactactggaacacacacctcaagaagaagctcaacaagtctgacagtgatgagaggagcagatcagagaacattgcgctgcaaacttcttcgacaagaaacaccattaatcatagatctacctatgcttcaagcaccgaaaacatttcccgccttcttgagggttggatgagagcgtctccaaagagtagtacaagtactactttcttggaacacaaaatgcagaaccggacaaacaatttcatcgatcatcacagtgatcagtttccatacgagcagcttcaaggttcttgggaagagggtcatagcaaaggaatcaacggggatgatgaccagggtataaagaattcagagaataacaacggtgatgatgttcatcatgaagatggtgatcatgaggatgatgatgatcataatgctacaccaccattgacatttattgagaaatggcttttggaggaaacaagtactactgggggtcaaatggaagagatgagccacttgatggagctctctaatatgctttaattgtgacattttctcctttattttttctttatccttgtgaatcttataaatgagactactaattttatatacacaaataaagaaaccagaaagac

SEQ ID NO: 149971 - DNA, 780 bp, Arabidopsis thaliana landsberg
cccttttcggcttctctccgtcgattcaaatcggcggcagtttccagcgacattaatctccggcgagacagtttactcggtgagtttcgcgtctacatagtttttttgaacttccttgaattgttcattatttcgggatataaacggaatttgcttttccccgatcgtcgtatcactgtagagattccgatacttgattggttcttcacaatttttgatgtgaaattcgatttttgcactcttaaattcataatcctagtttgtatagtactctatctcgtgaaattctctgcttttattgattaaggcgttgttgcgtacattgcagtgtttattgaagctatgcctaaaagaacagcagaagcgtgtccatcatctgaaatccaaagaagcagaggagatacttttggtagttacagatctctagtagctgaggttttgtctcaaggtgagaggatctcacatcatgatcaacaacaagaagccaatgagagacattctgagagtgttataggagctgggatgtcaaatgtcgagaaagagaatctgaatgttttgttaaggcagtgtgtgaggaatctaactccagaagttgatgaggtacttcatagttctacttctaatatcgtatgatgaaagagtattcaatattattgcaattcgtttgcagatgcaggaatgtgtacgctctctgtatctgatttctcagctagggaacaaatgtcagtcatcgtcgccgagcgattttgttcctgaagaatccggaggagcgagagtatg

SEQ ID NO: 149972 - DNA, 3036 bp, Arabidopsis thaliana landsberg
cccattcagtatactcgaccgaactactcgatcacaacccctcctctgaagccaacttagtatccgatgactggtctgaactcaaggcacccaaagtagatttgaaaccgctaccaaaagggctaaggtacgtttttcttggactaaactctacttatcctgtcatagtgaatgatgagctaactgctgatcaagtaaacctgctgataactgagctcaaaaagtataggaaagctataggatactcgttagatgatatttaggggatttcacccaccttatgcacccatagaatccatcttgaaaatgaatcctactctagtaatgaacctcaaaggagattaaacccaaacttgaaagagattgtgaaaaatgagatacttaaactattagatgctggggttatctaccctatctctgatagcacttgggtctctccagttcactgcgttcctaaaaagggaggtatgacagttgttaaaaattttaaagatgaactgatacccactaggattataactggacatagaatgtgtattgactataggaagctaaatgctgcttttagaaaagaccatttcccattacccttcattgatcagatgctagaaagattagcaaaccatccttactattgctttttggatggttatagtggatttttccaaatccctattcacccaaatgaccaagagaaaaccacttttacttgtccttatggaacttttgcttacaagcgtatgcctttcggtctttgtaatgcacctactacttttcagcggtgtatgacttccattttctcggatttgatagaggagatggtagaggtgttcatagatgatttctctgtgtatggctcttccttctcctcgtgtttgttgaacctatgcagggtactcaaaagatgtgaagagacaaacctggtgctgaactgggagaaatgccatttcatggttagagaaggcatcgttttgggacacaaaatttttgaggagggaatagaggttgataaggttgacgtgatgatgcagttacagccaccatagactgtcaaggacatcaggggttttcttggacatgcaggattttacagaagattcatcaaggatttctccaagttggcaagaccgctcaccagactgctgtgcaaggaaaccgagtttgcatttgatgaagaatctttgacaccctttaagttaatcaaggaagctttggtcactgccccaatagtccaagctccaaactgggacttcccatccgagatcatgtgcgatgcttcagatttcgcagtaggagcagtcttgggccagcggattgataaaaagcagcatatgatctactacgctagcagaacgatggatgatgcacaagtaaggtatgccactacggagaaagaactattggccgtggtctttgaatttgaaaaatttagaagctacctggtaggctctaaagtgacagtttacactgatcatgctgctctaaggcacatctatgcaaagaaagataccaagccaaggttgctgagatggattttgctgctccaagaattcgatatggagatagtggataaaaaggggattgaaaatggtgtagctgatcacttatcgcgaatgagaattgaagatgcagtccccattgacgacaccatgcctgaggaacagcttatggccatctgggaagtgaacaaaaaattcaaaagcaaccagttttgggatgagatgcttgcagtagaggagaaacatccgtggtacgctgattatgtcaactacttggcatgtggtgaagagcctccgaatctgtcagggtacgaaagaaagaagttcttcaaagacataaatcgcttatactgggaggagccgtacctctacactctctccaaagataaaatctataggaggtgtgtctaagaagatgaaataaacggtatcttgcagcactgtcatggttctagcaatggcggccattttacaacgttcaagacagtatctaaaatcctacaagcaggattttggtggccaaccatgttcaaagacgttcaagagttcatttcaaagtgtgattcgtgtcagagaaggggaaacatcagtagaagaaatgagatgccccagaacccgattttagaggttgagattttcgacgtatggggaattgatttcatgggtctgtttccgtcctcgtatgggaataagtatatattggttgcagtagactatgtgtcaaaatgggtggaagcaatagccagtcctacgaatgatgctagagtcgtcctgaagttattcaagagcatcatcttccctagatttggagttcctagaatagtcattagtgatgaaggcacgcactttgtcaacaaagttttcgagagtctacggagaaagaatggggttaaacacaaagtagcgactccttaccatccacagacaagtggccaggtggaaatctctaatagggagataaaatcaattctagagaaaactgtcgggatcaccaggagagattggtctctaaagctcgacgatgcgttatgggcatacaaaagagctttcaaaactcccattggtacaaccccatttaatcttctttatgggaaatcctgtcacttacctgttgaactggagtacaaagctatgtgggcagtgaaatttttaaatttacatcaagacttctgaagagaaaagattgatacagctcaacgaccttgatgagctccgcctagaagcatatgagagttctaaaatttacaaggaaaggaccaagtcgtttcatgacaagaaaataacttcaaaagattttcaagttggtgatcaagtcttgctgttcaattctcgcttgaagctttttcctggaaaactcaagtctaggtggtctggccccttcagtgtcactgaagtaagaccatatggagctatcacgttgtctggaaaaggtgacgacttcacggttaacggccaaagactaaagaaatatatggcagaccaaacaattctagaaggaacttctgttccactggaagagccgcccaacgcccaataa

SEQ ID NO: 149973 - DNA, 1957 bp, Arabidopsis thaliana landsberg
cattatacgtcaacaactgacaaacactgaagatatacggcgcgtgcgaaagaaggcaccttgcaccgttcctgaaatcgtaatgcttcaaaggcaggctttggaggatggactctttaaggagccaatatttactggtaagttcatgacactaaaatgtagaccgttctatacacgttctgttgattgttcttataatctgcagttatatagctaatatgtttcactgattttcaggtatgtcagtggaattagtatctctgcacactgagccgtatgatctaagaggaatcatgataattgagaatgatgaccgtcatgcttctgttggagcggtggaagataatgaatgttctgttacggccgtggaagaaaataaaacggaagaaagctctgatccgcaagctcacccaaatgattgtgacgagcaacctggtacggctcatactcactcgcaggaggaacaaaccataaaccaacaggaagagctgaaagatgataatgagcttgctgaaaaatctgacttggaggttttgaaggaaggcaatggagctgctgatgaagtaaatcttgtagtgattgacgatgtcagtcaaataccgtctgaggaaaaactcgaccgtgtagaggatttacaggttgaagaatcccatgaaaaccatgatggagaaggcgggcaggatgtttgtgcggatcctaatgaaaaaagttgcactgacgttattgaaattgctgaaggcgatatagatatcaaccccattttcaatgagatggacttgaaagttgaagatgaacttccacatgaagatgagaaaacggatgcatcagctgaagttagcgagcttgggagagacgatcagactccatgcgataacacagttgggtctactgaaactggatgcctagaagctggtgatttgagtaacatggctttggaaaattgcaatgaacctctggtggaagcgaatagtgatgggttgaatccaaagacagagtcttataccaaatacgacccgcataatgagatgtctaatgaggaggcgtctatgcaaaatgcattagatggagagcatacttctcgtgatggtcttatgggagacaatgatgtaagtttctttgttgcgtcatatccttattcaagtaagacatgtccctgactctcttgttatcttatggtgtaggaaatggataccatggaaaatgcacatgacacaggttctaagccttttcgaatttcaattcttttcttttccaaatggtctgtatcctcttcatttgatcaatgggactgatactctggtcatcatatcctggtttaaaactggactcaacaagcttaaacttggagcataatttggatacgagatgctgctagtgctattcccgatgatttctcaatggttcttcttattaatttcttgcattcgtgtcttcaggatttttgaacgtcgatgatgatgaagtagatgaagatcatgaggaggatgacatacaatatgatgatgaaactcgtcttctagagaacagtggatggtcttctcgtactaggtctgtacagtttatgacttgctcagattttagcttctatcatgtgagagacgtaagttatgggcttgaattatgaaagcttctgattctctttacttttagggctgtggcaaggtatctccagacgttatttgataaagaagccgagaatgggaagaatgttcttgtggcagacaaacttttagctgggaaaacccgtaaagaagcatcgagaatgtttttcgaaaccctggtatgtccataacacaaccgtaaactaaaaaaaaaactctgatcttgaatctgtcttattgttttgccaattttgcaggttcttaaaacaagagattacatccaagtcgaacaagggaagccctatgaaagcatcatcataaaaccgcgaccaaagctcaccaaatccatcttctag

SEQ ID NO: 149974 - DNA, 315 bp, Arabidopsis thaliana landsberg
  unsure (1)..(315): unsure at all n locations
ccctaaagattgaanctttaagaggtaaaggaaactcagtgaatgaagaatgtggatttcaaaatatgccaagatttgtgagagaagtatagagagagtggaagaagacgaaaaagaggacctttggcatttaagagagattgtgtcgtttgtacgaagaaggatatgggttttagaaatggaggcacgtttcagtttatgttgctctcgtcgtctcttggtgttgcttggctacttatttttctatatttgttgtttgaatgttcagagagagagatgaacgtggggccgttgattggatctgaagtcaccgag

SEQ ID NO: 149975 - DNA, 1460 bp, Arabidopsis thaliana landsberg
atggccccagatgaagcagcaaagtattgtgaggagaacaaactgcaaaggttaggaataaaagaacagcaccttgcgaatgaatagttgctcctgaagatgatttttctttatgaatctgttaaattgaatcttatggccattgctgctttgacagtgctcttccgaggatcatcaaaactggattttcagcaattaacctcatatacttctttacagcagggcctgatgaggtattaacagtcccactttacttggcttcactacacgctttagtctctagttctctgtgaaattcttctaagcataattgttctgtaatgagctatttggtagtgcatgatcagtgttatgtgtcaagtagtgcattgttactggaatttgatggtttataaaatacatccatcaatgatactttgatttgcaggtgaagtgctggcaaataagacggcagtcaaaggctcctcaagctgcaggggccattcatactgattttgagagaggatttatttgtgctgaggtaccattttctcatttctcttgaatcttggtcaattcactagtttattcctacctaaaatttacatgcgtaaagcctttcccctccagattttgatgatttgttctgttatagagtttatataatctttcttatgttttcactgactaaaacaaatgcttgcttgcatattcttatattcatcttggtgttgatttcctagtatcgatgcaggcctgtagatatcaaagcagaatcctaatgcaaaccatatctaatcaaatatttttctgttttgaaattcaatgtgatttattccaatgttgttgttgatgtcacaggtcatgaaattcgaggatctcaaggaacttggcaatgaacctgcagtcaaggtatttgtctataacttcttttccttctacaatctcttaaggtctcggtggagtaagtagcctctaaaaacagacatgaaaatgttaaggaagctctccactgtgcaagatatcctcgttgaagaggcatgattatatttataatgttcatggcgatgacacttggtctaatttataatcccttcaactaatgcaggccgcaggaaaatacagacaggagggtaaaacatatgttgttcaggatggagatatcattttcttcaagttcaatgtttccggtggtgggaagaaatgagatccatccgtctgtccacctatccgcggtgtcctctctggatcttgaagctctatccatttccgagaaaggaaccaagctgtattttccgtttttgagtggctttaccaaacaagtatttgtaactctttacattttgcagttagctaagacatgtctttgcctttagacagagcattaagcctgctgtatcgtttagaactctttcaataagtttttctctactatttggaaagaaccttgagtaattgtgcgtgagaatgagttgaagaaa

SEQ ID NO: 149976 - DNA, 1171 bp, Arabidopsis thaliana landsberg
ggtggaactgtatcagctatgacgattaataaagggatccttcttggttttgttccatcgggtgatactcaggtgtgtattagttatcatgattcttatgtgttttggtatacctctgcgtttcttataagtgaacttgtcaatcaaattcatatgtttgacatgcttggattcttgcgcaaataagcaccattctaatttttagatgaatgtctcgttgatggtataatgcaattctcttaagtagcattccgtattctgggcttggttcagcttaagagtagatggagattctaattgtgtacaatatagtatcctggtctctttttgtttctcacctgacctgagaaagcattaaagaattggataatttaaaatgaatgtggtttgtagacaggagacaaacatatatttcggagctgggaaagttccttgtgtctgtgtgtttcacttgagccttgaagtctctgtaccgtttattctctttctaatttatatgcaggtccagttgcgctctgcacaatttgaaggagaagtatgtttcaggtgtgcatatctttcatgatctctcatcttgtcgttagtgttttcaaacttttatatccatcctcagacgtgcataagcttgttactaagccccgtatagggtaaagtgcaccttggatattgtggaagtatttcgatctggccagcattccattatatctcattttagtatgaaaatgaacttatctttcacttaagtcttagacatttatcagattcaacctttaagtttgctcataattccctagaattcattggaaattgaagacccttagcgctgtaagggatacaaaagtatccgttttggatgagcttgcatgattttctagtttctgtttcatgcattctattttaccttttctaaaggtatttttgttttccttagtgcatttcaattttgtactcgtcatggtggtaaaggaattgaagatcttctatgcataatgctaatagcttttcgggttctgaaattatagagtagatgaaatccagcacccaataggcctagcaaacaagaatggtgcaagcacgccatctccatcgaaggaaaaaagtatctggggtacttatgccagaggagcagtttatgcgttacagagcagcaaaaagaatctcaaacaggtaa

SEQ ID NO: 149977 - DNA, 1080 bp, Arabidopsis thaliana landsberg
caggtttagggatgaatcgatcaacgatgatgattatgaggattgaagagtcggcgattgttttgtctctgctcaaatcggatctccggccgatggaagacgttttatcggaattcgactctaagttcgaaagcgctcgttacctcagtgtctgcaattctctttccatgatgttgcaggcatgctttgttcctcttcttactcttttttgaactttctctcgatgcttggcttcgtgtttgtgtgggagagtagcgagttttaggggtttttggattgtttcactcgaaatgatttgatttgaatctagggttttctttcgaggtttggtttcgtgtctgctgaaatggtctcttctgtgctgtatattgaattcgttgatgaaatctagtgttaagagtgttcttctactgattgtatacacaggggacaattcgaaagtgatgataacaaatacttttgaggcgtgtttacatttgataaccatttctaatttctttgcggaactaattgaatgaagtttttttccatttcaggatcagcagatgtttaagaatactgaacgtctaattgcatttggtatcatataccagtgttattcttcacagaagccatctttcaacccgtttttatctgaaatgataagtgtaagcacccttcattgtgcctctaatacattgtacaaatgcaaatttctttactttctcagttttgttgagaatcccaattctggttgattgtctcctaacgtcgtaataagtgtgtttttaatcctggaaaaaaatcgtaggtactgatataatttggttttcgtaagcatatttaagtgttaagcttggtagatagtatcagaccatttgtttctccaagttgcatggtatttgagaatgttgagtttccgtgtattagattgatttaagccaacatgttttgtgtcttagcatgacgtggtcttatcgtttgaaagaataacaatatctatgccttttgcaggctgcttgtaatgaacagctggaaaagtctgaaagggcatttcttctccacctgttacaatggaatagttacaacaacgtgaaagag

SEQ ID NO: 149978 - DNA, 401 bp, Arabidopsis thaliana landsberg
attttggttataggatgagcaaccagaagtccaaggaccggctgtgatggtttcagctgaaagagcagcaaccgatagtcccatcggtatgcttcattgttctcttgtcactcttttaccataaaatccaaataatcaagatgtttttttttttattactattctgtagaatatagtgacgtcgctgcataccggttgtctctatcagaagacacaaaagctcttaaccagctggtatatggctattcttcttcatttgcctcatcttagaaagactgattaaattacgatttgatatttttacggttattttgtgttaatcgtgttatatttgaatacttcaagtaagttttcaaccaattgtatatatgcagaatacacttatacaagaaggaaaagag

SEQ ID NO: 149979 - DNA, 946 bp, Arabidopsis thaliana landsberg
gatccgtttcaatatccacaaaccacaaccaagcaaattctttagctttctcacaccatccatattcactatcacttgtatgcatgtacatagatatcttacttcctagttctaatttgagttacaaaaatgttgaaatttccactttgttgcagtgagttatctttagaaccgaagattctagcttttgaaagtcagcttgtttcggggcgacgcgatacaatcaaagtttctgcgggaaaaatcggaaatttctctcttggttcggtaagatttcactatacatccatatacaatatgatatgttatcatcgtcaatgaagagttttgttaattcttcaaaaggtttatacaaacagattttcaaaagctgcgagacttgtggagctaaaggagcaattgaatgtcccggttgcaaggtactaatttgatttcattactagatactatgtaataaaactaataataacttcaagtgagtctatttctttagtatatgttcaatctttttcagactatacatattcattttactctttcttactctatatgtatgcatatactagacaaaattctcttgttgtctacagggaacaggtaaaaataagaagaacggaaatatgtttgagaggtggaagtaagtaataactaacaatgtcacatggttctaaaatatcaatctaaaaatttactgttcaatgagtactttaagtagagttaatttgggattttgaatatgtccagatgttttgattgtcaagggtttggtatgaagagttgtcctaaatgtgacaagggaggcttaacgcttgaacagagaggggaacgttagagttatatagtatttgtttctcctacataagttaattttgtgatccaaacatgtctctattcctataacatttcagtcgtataattggcatgtaaaatacaagtcattaataaa

SEQ ID NO: 149980 - DNA, 1181 bp, Arabidopsis thaliana landsberg
ccggcgaacgatggcggtctcagctttccgtggcacgcggttaccgttatttcaccattctcaggtttacttgttttctcttctctttccttcagtaaagtcgtttccttgatctgctctttatggcttagctaccaaaatttgcaaaggtcctttactcgctgctcaatctcgatagcttcatttttcagtttcccgtcgcgagaactgtgtcaggaacgtctaagaagatgatcggagccagtaatttcaagggttttgttcttacagcccagtattcgcaaactcaggaccttttcacttctcgtcttcaaagtacagaaatttccttcttcttgtaaactcaatctcattgtatacatctatgattctgaattgtatctcgttagggtattctttgttgcttattggatttattttgtaaaaatctacatattggatgacagtttattgatccatttacttgtttacatggcttttgatgcaggccagatagagaaattgcccaaattggttgaggatatagttcagacatcgataaacacaggtccacgaggtgtgacacgcctgtccaaggtgttcaagcctttgtaggggttggaggagagtggctaaatgatttatctaaggtggctgaaattatctttttgcttatgatgtcaaactatctttgattgctaactactctctcactcgctgcagtctacaagcgcgtctggtggattaccaagtgaattgcagcttggtctactgtctcctctatatttgaggaaactctttgaacgcatgggagctacttacattaagctgggccaggtaaatcatgttgctaaatgtagagcatattgtatcctctgatgatatcatgtaaatatctagaaccatgtgaactgtgtatgtctaaagtaagcttagttatcatattttgttgcttctctatatatttcctattctatccatttaacaatacttgtaatgtatctttgaatttgtagtttatagcatctgcgccaactttgttcccaccagaatatgtcaaagaatttcagaactgctttgacaaagctcctcctgtgccatttgaagaaattcgtaaaatcttgcaagaggagcttgggagacccattgaaagtgtatcgaatatgttgacctacgccaattgcatcagctcaatagcacaa

SEQ ID NO: 149981 - DNA, 4414 bp, Arabidopsis thaliana landsberg
tttcagctgcttgcgaattggaaatggcttgtaattcctcaggctgtgagtcaggttgctatgaccgtgagaaagataatggaagtaagatagtggatgatgcagtatctggtggcggtaatcatgagagtgtctgcgtcaagtgtaaatgcaatgcgcctatgacatttggtgacggtggcttcgacgatggaagattctgcgcagattgttttaggaacaatgtctttgggaaattccgtcttgctgttacttctcatgctatgatcactccttcagataacgtccttgttgctttctctggcggatcatcttccaggttttgctctctttttttcctttagtttctgttttttgatatgttattgattggtgtctaaacgtagcaagtatgatgttagggtttctcttcaatttgtgcacgagttgcaaatcaaggctttgaagaattacgaggcgagtcgagatagatctttacctgtgtttggtgttggtgttgcttttgtggatgaaactgcagcttttcctgctctttcccctgaaatgattgatgcaattgagtgggttcgatatactgtctcgtgtttgtctccacctgctaaggatctccatgttgttccagtcgaaagcatatttggttcagactctcttgacgcacgggatagacttctgaagctattagattctgttcctgacgatactggaaaagaagaccttctgctgcatctgaaaatgttatctttgcaaaaggtttggacattatattgcttttgtttctgtctgggaaagaaattcagatttggaaatatcttttgtttaatgttgtttgataaacctttttaggttgccgctgaaaatgggtacaatagattagtgttgggatcatgcacgtcgagaattgcttcccatgttcttacggctactgtcaaggtgtgttgcttagtgccctgacttgactcgtgtttcctctggcttagttattctatagattgcatcttagagtgagaacttcatgccagaaagcaatcaatggctaccttaaagaatgtagatattttggacttaaccaattacatctctaaaaattgaagttttggtgtaaagattttatttcagtacacaatgttttgtgtactttatttggacattccctttagactatgttctatcagaattgtgagttgaattgctttttcttgaaacagggacgaggttattcactatcagcagatattcagcatgttgatgctagatggaaggttcccattgtacttccacttcgagattgtgttcgactggaaataactagactctgccttttggatgggttcgtttattggctgcctagtctacattgtattgttatagtgaaccttattcttgcataatccaactattgagtgacgtcacatattctgggcagggcagacttaagactgtggagttggcttgtcgttctcaatgcggaatcaatgatttggtgtcttcatttgtcgctctgttgcaggttcagataatgttcatcttctgcatatgtttaagtgcatgcatggttacctgttactttgtttttactgattcatttgtctctgggttctgttgtgcaggaagaaaatccttcccgggaatgcacaattgtacggacagctgcgaagctgactccattttacttcaataaaattccggaaacagacgactctaatgtacctatggccactcagaggcgcctaaagagattcaatctcaaatatgatggatcaatgactactgaagctttctgtcctatctgcaatggcccgctaaatagatcagactcatcagagttggatacttttgaagaaggccaggaatctgatgtcctctatgctgcttgctgttcaagttgccggtttcaaatacttccacaggatggatcatctcttgagcaattcagttcatttctaccagatcacatgatttcccaagtgaaacatcaaaaagttgatagtcaagcttatctgaggtgagtagtatgcattaactctgatctcaaacttggattccttttccattcgttttatctacattattggtagttcatgtctctaggaagcatcagatttaaaacaaccaagatcaagactgagtgaaacactatttgagactcctaacattggtttccatttatttcagggagaaaattaaagactgtctgctcttggacgatgaagaggttgtctaaatctgcattcggatgcttgcacaaggtatgagaggaagtttaaatcctgtcatgcttatcaaggattattcctagaaacctaagatcatcttagtttaatgtcgatctgatatcatcgtagatgttaaaagtgtttttactcattcgttacaatgattgtctcaatgtgaagcaaaatcactgagcaattgaatgaagcatctacagttttacacatataatacaagaatcatgggaagtttacaatttgtaacacaagtagtaaacttgttaggggtgatgcgagaatcaagttttgtaatatttctatgcgcagaatcagagattcaggagcattaatctagagtgcaagtgatcaacatcttccaatagctggataagaaatctgtgtaaattctaaccaatgtcccatagacattataacacgaagcgcttaatgtttgatcaatttataaagtccgacggacgaatggtcaacaaattagaattgagggcatcaaacaagaactataaaatatagaggcttatatttgaaaattttctcccctagctagaataatatatacacattgaagggaccgtttgtgaaacataaaaattgaggggcatggttggaaacttttaaatttataggggcgttttgcgtttttactcaaaaagtccaaaactatcgctcaacgccggtcgattctaccggagatcggaaaaaaggaaaaagtccggagagagctaaagatcaaagctttagaatggtgagactaaacagagtgctgctaaaagacgccgggcaatgtaattgacaagaccctctccgagattctggtgtgccctctctctaagcaacctctgaggttcgatttctctccttcaaaatgtacatagcttaaattcgattggtcccgaagaacttgtttaagcaatttggtgaattgattgctgataggttttgcgagaagacgaaatcacttgtcagcgatactattggtgtctcttttcctgtaagcttctatccaaagctttttgattttttcgattcagatgcttgtgagctgttgagctccatgaaagttagatttatggcgcttattaactctccaaacagtgaaattgtacgaaatcactatcatatatgctttcagaatcatgctctcttattcagtgaacatgttctcaacccaactttgatcttttaggaattgtctaatcaaagattgagatgtgtatatatatatagactttgattctttcattattcttcatttgcttcatactaaataatgtttaaaatgaatttattcttggtgttgatttgggattcactgatggaataatcatatgctaaagtgattggtcggctgttttcttcttaatgatattcttcttgttctttttagatttcacttcatgttcacgattcaatgtttaagacttgattttgcttctcttaacacgctagatcaaagatgggattccatgcttggttccaaaggatggaaaaatacttgaggaggaaggtgatgcatcaaaagcttaatgacttttgcttttgcacccaaaaagaaataaaatggtcagagtgaaggtatcagcttgtatctgcagcaacttatcaatggttcgttctgtcctctgtactagttacctgatcatctcttctaaactctcttttaggcttgtggccaagttctggtagcatttttaagtatgaatgtttgatgggaaacattgatgtaaccaattgaaaaacattataggtgtgtagtttcaggtgaataaaccaactttttcgtttaaagtttcttgaagtctaggattcttattgactggaatgaaagtagaagcatgatttaaagtattggatgcctatttgaggggctctaagtgtaaccatataatgtgaggatagattctagtcatagtcccacttttggtaactattcttctttatcttaatgtccactatatttacaccatattagctcttgatgtccacttttggttgcttaaaagaatacacagcaatatatcaacaaccaaaagtggatcaacaagacttatcactgtcaggtaaatgaaattgggccaaaagaagataaaaactattctcttgataaaccaaatgaatacaaacacacacctagtgtttttgatggtgaccagttagagcaaaagctacaatactatgtactatga

SEQ ID NO: 149982 - DNA, 2390 bp, Arabidopsis thaliana landsberg
ctgtgcttgaggtatccttagaaagcttacaagtctgcttttttgagggttaatgaagagttacacgatagtgaaatcgactattctatgagtggtactactgccattacggttcttgttgttggggataagatttatgttgccaatgtaggagattcgagggcggttctcgctgttaaagacaggaatcggattctagcagaggatttgtcttacgatcaaacgccttttaggaaagatgaatgcgagagggttaaagcttgtggagctagagtgctgagtgtggatcaagtggaagggttaaaagatctgaaaatacaaacatgggcaaacaaagagagtgaaggaggagatccgccgagactttgggtacaaaacgggatgtatccgggaaccgcattcacgaggagtgttggtgattttacagctgagagcattggagttattgcagagccagaagtgtcaatggttcatctctcgcctaaccatttgttctttgttgttgcaagcgatgggattttcgagtttcttccaagccaagctgttgttgatatggtaaaatacccttttgaagatctcaatatgtttttgttggtttggggtcttaatgtgattgaaaaatgttgtttgcaggtggggagatacgcagatccgcgcgatggatgcgctgcagcagcagcggaatcatataaactgtggttggagcatgagaataggacagatgatatcacaattatcattgtacagattaaaaagctgtctaatgaatgatgcacattcctatttgcccctttgtttgatttttctgtactgtaatgttacaggtttcatccaactatatagcaaagttaaaagtaatgctctctcttttgtgtatgagcttcttttaccaagattaaatgacgtgtttaatacgctatttgctcttacacgttgcttgttgcggagaataagctcttgacgacccaaacaagtttatttgtgttcttttttttcaaattaaagaatgaaaacatcattataaagcccgccaattatttacaaagaaatgagactctctatgtgattgggaagaatatggtgacgttcgtatccaagtctattacgtcgcctaaattcgtcgtccgcgagtccttcatatatgactcttctaaagctgtttctctgtggatcgaaatacagagcatgaaacggactctgcaaagttgttggtgcgtaaacaaactcaccggcttcagtcacacccgttagttctaaaaaggtgtccaaaattggatcatcgagtggaaaagttaaagaaaatgttctaaacgaccacgcatgtctctctgcatcctccagaacccatagtgaaataaaggctttcacataggttgcagaagcaagagaagctaactttccctcgtaagttaagaggtaaccttgggaactttccctgagcacgatcaaattcaccagattcataatacagaaccccgttgatgcatcgtccacgagggtagtaagggcaatgttcaaagctaccttggataaatctccatgattttttagctcttcccaatgtaagaacccgaggctggttgctgctttttgtctttgtcttctcttcacatcttcttcttcttgtttctccatcatcaaaccctatctttttctccttcttcctctctgttagattacgcgtatctatagggtttagggttttagacaagaagtttttcatgttaacttggtagtaattataaaaatgatgggtctcacgcgctcgctggaggcatgctttatttcttctctatacataatacataagtgtatgggtttcgttcacgcgccgagagtgcgagtgttggaacatataagaccagtagtaataatgtactaatggtcagtgaagtacaaaacttctaccaaactgatgatgacacgtgtaggggaagcaaaataccttctttgacaaaaactgacatgcaacaacaacaaacattaacaaaaagggctgacgaaaatcagaagtaaatacagagcttctcggctatgctattctgtaccatgttacatttttccaacaattcatctaatctctcactctctctcttctctatcgtcttcttctctgccgcttctctacctttacttctccatgatctctcgcctaactcatcatcctcagttatcatcagatcaatacctcgacaagcttctctgttcttttccaacatcgattcctctatatctctatgatcatcgatgagcattcctgtctcaacaactctctgggctttgtcatcatatggaggaggcgacttcaaggggctgcagctgatttctatcatttcatgaagcaatggaagatttggaggacaagatgggtatgatgcatcttcagccaa

SEQ ID NO: 149983 - DNA, 2240 bp, Arabidopsis thaliana landsberg
cttcatcagaagaagtggtctgaagctgttcagagcctacagcatgcaattagaggttatcctaccatgtctgacttgtgggaagtaattgtcctttttctcttcttctagttattaacatttacttacattgtttctttactatatgaccgaatttgacaagaattatttttgtctgtctgtcattgcaggctctaggccttgcttaccagcgacttggaatgtttactgctgctatcaaggtaaagacactgtttcctcttttttgtacctgtattttcccagtttcttgaagtggtttcgttttattgttgattctgttgtgaccgtaattctcaacgatacaacaggcgtatggccgcgccatagaattagatgagaccaaaatttttgcattagtggaaagtgcaaatatctttttgatgcttggctcatatagaaaggtaacctttgtatccgtgtctgtttaaaatgacctctttggaaggtttgtttgagtctcatatagtatttgtatagggtgtggagctatttgagcaagcactgaagatttcacctcagaatatttctgtgctctatggtcttgcttctggattgcttagttggtcaaaggaatgcataaatttgggcgcatttggatgggcagcttcgttattggaggttaataattctaaactcttctgattttgtcctgatctcatccatattgaatataactgtatgagagaacgattaatggaaatccactgtaggatgcccgtaaagctgcaaaagcaagcagtgaactggccagcagcatgtcttgtatatggaaattgcatggaaattttcaggtccttaggcggcccttgtttttaagggtaaagctcgttcgttatctgggtatctaatgtgtaatccttgagcagtttacatacgcaagatgctttccatggtctggtggaactgaaaactcagaattcactttgaagacatttagtgattcaattctttcttggagaagcatttgttactcagctgcattgtcagccaaagcttcttaccagcgagctctacacttagccccttggcaagctaatgtttataccgacatagccataacttgtgatcttgtttcaagtttaagcgatgactctgatacttcaagttcttggtaagattatactaggcgttatttggcattttcttagtttttgatgtttgcccttgtaatagtctactattctatcaggaagctaccagaaaagatggtgctgggagcattattgctggaatgtgaaaactcggagttctgggttgctttgggttgtatgtctgataacagtgctttgaaactacatgctttgatccgggcattgcatttggatgtatctttagccgttgcttgggcttttatgggccaggtattgttccttaacattttgtctttctggcttcgtatttgatgtcctggctttatcaaggcttgcatttttgtttcacatatgttcatgatttcagttacggttccccccttttgattgtaatttcggttgcttaaacagattttcagggaatcggatgaaatgaaatttgcaaagcaagcttttgattgtgctagaagcatagatcctacacttgcgctaccttgggctggctcagctgatacttatgcgaggtagatgctttttatgtaaaagagaattctcatgttttcgaactacaattttgcccacatagactaattaacatctcagggagtcaacatcagatgaggcttttgagagttgtttacgagctgcacagatatcacctgtaagttctaatttaatcgtggtttacttacttgtaagtgtgatggctctaattgaggcgtgagataattctgtccagcttgcagaattccaagttggtttggcatggcttgctttgctgcagggaaatatatcatccccgcaggtataaagacagacatatatatatacataggatttttattaatccaaagttagctttaagtaatttcccctcctgaaactgtgttgcagatttttgcttgcattgagcaggcagtgcagcgcagcccttattaccctgaaccccataacctccatgggctagtttgcgaggcaagacataattatcacactgccattgcttcttataggctagcactagctgcaatgagtatttatcccgaaagttcagtaaaatctcatgctggaaaagtatctataaacttggtcaggtcactcagcaag

SEQ ID NO: 149984 - DNA, 634 bp, Arabidopsis thaliana landsberg
ggtttcgattttgcgattcggcgatttgcttctccgatgtcaatcccaccatcttcaggttcttcttcttcatcttcctcgtctcagtacacatacgcagctaattcttactattccgctccgtatcagcctccacagccttacgcggcggcgccttcgcctgctgtaccggcgcctgtggcatccattcccggagctacggtctatcctcagcctgttggaccggttcctgccgtctacgcttaccctcagtaccaacaggttagttggatttgaaaaatcaggagtttgattcgtggcgttgtgtatttatgattctgggttcgaattagggtttgcgaaatctctctcctttgattttaggggtttaatgttgtttttgatattgaagtttctcgttatgattgtgtaatgcttgtcactcatggatctcacatgttttacagttaaagatttgttctttggatttgattttacttgttttgtgaaatttctgccaagtttaggtttaaggtagaaagttggtatcttcattgttgtttgattcggttgtatttattggcaggcacatcaattgttccaaagagatgcacagacaattacaccagaagctcttgagaatgtaaaagctgct

SEQ ID NO: 149985 - DNA, 1086 bp, Arabidopsis thaliana landsberg
gcagccaagcttgatcccaactgtatggctactagatttgctgttgctggccaacgaatcaaagatgcagaaaggtctcaggatgcaagcgaccagctttcatgggctggcaacgagatggcttcagtgataagagaaggagaatctgttccaattgaccctcccattgcttgggcagggcttgccatggctcacaaggctcaccatgaaattgcagctgcttttgttgctgaccgaaatgaattgacagagatggaagagcgggctgtgtacagcttaaagcaggtatgccgtttctgcgatttgatgcttaagaagttagtttcagatgttgcattcagataataactagttgggtagaataggaagaaagctgaagactgatttccttaaataagtcattggcacgtcttctggtatggtcacaagtacagacacacatagataatgaagagatattttcgcatcgaaaatgttttcatctcattatcctctttttattcacgttaggcagtaacagaggatcctgaagatgctgtccggtggcatcagctcggtcttcatagtctctgctctcaacaatataaactctcccaaaaataccttaaggcagcagttggtcgttctagagagtgtagttatgcatggtcaaatctcggtaacatcctcttcgaatcaatgcttgcagattaacctaattgctcaaactgcgaggagaaaattgatgattccacaatcttaagttcgttgcatgactcatgttagattcatttgttggctttaggtatttcgctgcagttatcagatgaacattcagaagctgaggaagtatacaagcgagccttgaccgtgtcaaaagaggatcaagctcacgcgatattgtctaacctggggaacctctacagacagaaaaagcagtacgaagtctcaaaggcaatgttctcaaaggcgttggaactcaaacctggttatgcacccgcatacaacaaccttggactcgtgtctgtggctgaacgcagatgggaagaagcgaaaacttgtttcgagaaatcccttgaagctgattcattgctagagggagctcag

SEQ ID NO: 149986 - DNA, 1315 bp, Arabidopsis thaliana landsberg
actcagactcaagagtggaggataatgagaaaagaggttctcgctggggttttggtgaccgtcattcccgtgttaaagaaaggaacatgaggcccctgagattagcaaggagaaggaggttcatgtcaaatcttcaagagaccgttctgatgggaaatgtttggctacagaggatcgagatactcattctaagaaactgaagggtttcatatcagacaagtttactactggcaatactaatggtaagacttttgttctgttctttacaaatgttttctttctgtgttatgtagatccttgctctaagttatagatgctgcagcagaagagaaacagacatcaatcttaaagccttcccccggtgatgttgatgctgcaaaagttgcagctatgcaggctgctgaattaggtaatactgttttgatgctattctaaattgacttgtccttgtttttgtatacttatgatcttgccatctgaagatagttaattgaaagtcatgctttatctagataatattggttctattgtaaatgcttacagaaaagcctactcatgtctgccttttacctagttcttaccttaactgttgttttgcttcgatgaatccagtgaataaaaaccttgttggaacgggttacctgacaacagatcaaaagaagaagttattgtggggaaaaaagaaaagcacggcttcagaagaggtaattcaactgttcgtggatatgtaatataaacctaaactcagagttttttagtgattcttcttttgcttataatcctctgaaacagtctgctcatcgttgggataatgcgagtgcgctaattggtgaccctgaacggcaagaaaagttcaacaaacttatggtaaatctcatccttccttctctacgtacatgttttgcttctattgattgttttcctacctctgtgaccatcataatgtagggcatgattccaaaattttgcaaactctcacttagaattttgcatagagttggttgtgtataaagtaatactaacacattttcagagtctgaggttgcgttggtgcatcattgtagggtgtgaaagcgaaggtagtaaaccaagagcaaaacctgggcgaagtcgaggccgagaagcagaaagagttgcagatggatctagagaagcagtacacagcagggttaaggaggagagatggacgaacagtagggttaggtctttgaacctctttggtaaattgttcgcatactcttgtctccttctaagcaatcttttagcatcttctttttgtactctactactcttgctaaatccctttatttcagtt

SEQ ID NO: 149987 - DNA, 643 bp, Arabidopsis thaliana landsberg
ctaatcgttgcctttctctttcacagtcagagctcttgaactgagaatttcagttgcgccgtcaactttttgttgagaagagatttcatctggtttcgatccaaagaatagaaagcttggattccgaaatttccctttttgcttccccaattcgatttcctttacaagctcggcgcttgatctcgctatctctcaggtagaatcgagatatataacagtatgacaccatgttttaccaattcttctagatataattgctttggcttttcaagtgctctcgcgtttctgggttttgtttcttattctcgaaatctgttgattgattcgtttgatccatcagtgtttgtttcgaaattcaaaagcatgcaaatttacagattctttgtttgccttgtgcgaattatatttccgtattcggtttcgaaactaaaaccctgactaggttatgtttcaagtgagagtttttttttgttttctatttgtaggatattttaactaactccataaagtttggggttttgtgaacagccaaaagtctttttattcgtgacatcagtttcttggaaatgaattcgatttcttcacctaatatagaagtttggactgatatgatgaacattgaagcatcttggtttggcatcat

SEQ ID NO: 149988 - DNA, 3134 bp, Arabidopsis thaliana landsberg
  unsure (1)..(3134): unsure at all n locations
ctaaanactgagactggtgacgactctgtgtctgggcatcaagaagagcagccgcttgctgaagatattgctagctcggttcagcggtcagcctctggtgaatttatgagaaaatgtgaaggagcaggtgattccgagtctgtgttggacaagtacaatctccaggatgaggcacagtctaagacaggttcctcgagtgccgggaaagatatagtacaggattgtgaaatctctaaagtatccgaaggctcttctagcttgagtgctggatcaggagagatgaaaggtaggtctggtggtaatggtggagaggatgagaaccagactgctatcgaagatggatctatccatcaacgttgtgaagatgcatctattgatcaacagtgtggggctgatgaatcattcaccaagagtggtattgatttggcaacgctgtgtaaatttgagaaggtgcctacgaggacacgctcttctctgactgcaaaaggcccaaagctttatttgagtcataatatcaaggatacctctcataattctggacttgaagaagaagatcaaaccgaaaatcgatgtgagactcgaggccaatcatctggaaaggccgatagtactggtgatgaaaatgaccaagttgaagattttgctcttgttcaatatattgagaacagtaaatgtcataggtctaattcttttcccagtagcattctcagggataacagtgagaaagaatcaggattagaattgcctaatctgcacagatcacattcggtggggaaagtaggtgagaaaaggcctggtgaaggcagtgacttggaggagggatcaaaaagacagagagattgggtggcagtttctgaagctaatgaacgcttcaacatgtttaaaacaagcggaaaccaatgcgatccggaagaagaaggaaagacaagctcgttcaacaaaagactgattgacggtgctgctggaaaaagggtcagccatgaaagtctggttaataactctacatacaataggacacacactggcagaacaggtccagggtatgctgaagaacatcagctgtttcctgcttcgtttaagatgtgtgacctaaatctagggggagcgtcggatgtgaatgatgggataaaggaatctcgtcaagctgttgattttgatctctcaatcagcagttctagtaagtctctcgagtttggtacgagtactcggatgagcaatggtaaagagatagaagtgattaatttggatgatgatcaagaagtggtaaagtccagcaatgatccaggaagaaagtacggccaagtcctactcttaacacttatatatatacacacacctattacattttggctaatgggttttcatatctaacaggcaagaagctgctccatatatgggcatcgatgacgtcccagactacaatgaaagactcatgatggtagagtatcttgattcctttactccaataaaccagggaaccagtagtgtcccacagaataacaacacagttagccttcaagaccgagaggtacctactctacttgtcaagttttatgtcacatagaatgtttgttgttgctaacagatcctgaaaacgtctcagggagctattggaaatgaccaagtaccaaataatacagacgatgattcgatcttcatgtcactcggagaaataccattgagtaagaccaatatcaaattctttctcttttctattttagcttcttaaagagctgagattcattgtctttgcaattgtgcagcattcttgcaagcttgggaccaacctccagctcgaggctacgagaagcctttctgattctctttttttttgttatgtttcttcagtctgtgtaatgagtgtgtagtagcccaatttcgtttgtgctaatctcaatcctctcagatgatgtaagaatgtgacttgtggtgttttatggctgtatgtaccctttgtaattctctgtttattctcacactgttcccatgttttaggtcagctcaacacttttctgaaattgtaataaccaaaatgataattattaacggtatatatatgtcgggtccaatcnnnnnnnnnnnnnnnnnnnnnnnnnnnnnnnnaggtcaggcgattccgacacgtgttatattccagccgcccacacgtaattttcaaaaaggaacaaaattgatcatgagggaaaaaagaataaactttttcccacaaagaaacttttcacattgaacgagagaattatagatctgcgaatccgatcattggattatggttttcacttttcaccctcctttttccatctctcggctgtatacccttcctttctccaaaaagaccaaaactttgcgattcaattcgaaatctgtgttcttccattgagctggattttcatttttggaatcatttcttctcttctttgatccgatagatggtggcatggtaggaaattttagacctttatatttctatttaaccgtcaaggaaccaatgaatttgtatagcttgttgagttgactttttgattgtgtatgatcgnnnnnnnnnnnnnnnnnnnnngttttgggttattgatctgagctcctgttacttctgaaaccgatgtgaatttggtgggggatagatttttttgtggagtcaatggatttggagagtgaaagctctgcacttgagtctgttgatgataatgttttgattcaacaaagtgccagcaacgtttgtgatgatggtaggagtttggataacgggtcttgctctgatgagagtgtgaaactgctttcgacttctaattctgttgaactcggtaaacctatgagttttgattcaccaggtgatggtggtggtgcttattctccggttttgaaaggacaaggcttgagaaaatggaggaggattaggagagatcttgttaaggacacgtctgcgaatatggagaatagtaaagctctgaagagagggttgtcaggtgttgctcattcacatggtaaacagatgcagtttcagtcaccggaagttgaacaagagagtcagggatctgttgggtctgttaatatgttgaaaagtagcggtgatggttttgatatacttgggagtagtggttacgattctaggtttgtggcaggggttggtttttcagctg

SEQ ID NO: 149989 - DNA, 849 bp, Arabidopsis thaliana landsberg
ctcatggctcatatgacatcatctctagtggacttgtccaatagtagtgaccttaaaaatttggctcaacaacctgatattatcatgctggtgaggaagaaaacacgtgaaaacttagatttagttattggtaaatccttataaacagaatggttctttcgtatttgtgttaggtgagttgtgtgttagagcggcttcgaggagcggcaagtgccactgaaccccgaacacagagagcaatatatgagatgggattgtctgtcatgaatcctgtactccgtcttctcgaggtttacaaacatgaggtactgttcaaggcgcaaatatagtgatcacatgttattcggatcatgatgaagtctatatacttgatatttcagtttcgatggtgtactatactctacctgtcttcaaaatccttgcggttggttttttagccattatggtcagaaaaaccactaatttattgttattgcttagtctgcagtgatatatcttcttcttaaatttgttgtggattgggtggatgggcaattatcttacctagaggctcatgaaacagccgttgtcattaatttgtgcatgagtcttctacaaatatattcgtcacacaatattgggaaggtaaatctgttcccctatctcctccttacttctctcttcagactgagcgtcattgtttgagcagacaagagaagtttttgtgtaccctcacatacacttgctttttttttacctcagatatcattgtctctctctagtaccttgcttaatgaagcaaaaaccgaaaagtataaggatttacgcgctctgcttcagctactttcccatttgtgctcgaaagatatg

SEQ ID NO: 149990 - DNA, 445 bp, Arabidopsis thaliana landsberg
aactcgtaccttgtttatgcggcggacaatgcagagaatccacgatctctttcagcttctggttcatttcgtaatgacagtactccaaaagcagcacagagaaattctgaagattctggtgttacggttgatggatccccatctgcaaaggtagtactttgtttagttgcgtggtagatgcatgttctccattaattaactttcggctttctcgtttaatcatccgcatacatctcacccataggaaatgacgatcgttgttcctgattcctcgaatatctattcggcttttggagaggctgagtcaaagtctgtggagacactctcaccgtttcagcagaaagatggtcaaaagggactctttgttgatcgtggtgttggctcccctaggctagtgaagtctcttagtgcaagctcttttttgattgataccaagcaaatcaag

SEQ ID NO: 149991 - DNA, 1437 bp, Arabidopsis thaliana landsberg
aagcctcttcttactaaccctaaacctaagcttttcgcttctcgttccatgtttgaatctaaaatccatgatcacgggctggggtttacctctcaacaacctaacatcaaaacaggtacatattacatatatatagatgaatcatgaatccatcatgttttctagtagaattttttttcataacaatatttttggctgttttaattttctttagacgtattcaacaatttgaaaatctacgtctatgacttaccttcaaagttcaacaaagactggttagccaatgatagatgcaccagccacctctttgccgcggaagtggctctccataaggcgtttctcagcctcgaaggagatgtaaggacggaagatccgtatgaagccgatttcttctttgtccctgtctatgtctcttgcaacttcagcaccattaatggctttccagcgattggccatgcacgatcactcatcaatgacgcgataaagctcgtctcgactcaataccctttttggaaccgaaccagtggctctgatcatgtcttcacggccacacacgactttggctcttgcttccacaccatggttagtttaaaaatgatttgccaaatatatatgtttatttatactcaaaatttatatttctttttggttgtgaaggaggatagagctattgctgatggagtaccaatttttttgagaaactctataattttgcaaacatttggtgttacttttaaccatccatgccaagaggtagagaacgtggtgataccaccgtacatctcaccggaaagtttacacaagactcaaaagaatattccggtaactaaagaacgagacatttgggtttttttccgtggcaagatggaacttcatcccaaaaacatcagtggacgcttctatagcaagtaacaaaactcttatagcaatctctatacctagttttttttcttctataaaatgcataaaactttaaatattgaactactttttttaacctatcaggcgtgtaaggacgaatatatggcggagttacggtggtgaccggaggttttatctccaacggcaaagatttgccggttaccagtcagaaatagctcgttctgttttctgtttatgtcctctcgggtgggcaccgtggagcccaagacttgttgaatcggtggctcttggctgtgttccggtgattatagccgacgggattcgtttgccgttcccttccaccgtacgttggccggatatttcgctcacggtggcggagagagacgttggaaagctaggggatattttggaacacgtggcggctactaatttgtcagtcatacagagaaacttggaggatccgtctgttaggcgggcccttatgtttaatgttccttcaagagagggagatgccacgtggcaagttttggaggctttgtcaaagaaattgaatag

SEQ ID NO: 149992 - DNA, 818 bp, Arabidopsis thaliana landsberg
atggccttcttgggaaaggttctttccgtaagcattctggatttggtgcggcaccatctgcccatagacctccatctaatgactcacatcagcgcagtagaaccaatgaaccttaccatcctcctcgcccatccaaggttgagtacccaaacatccgctgtagtcatcttgcatagtctctggtaccattgattcttgcatcctgctccatcacgttgctgggtttcatcagctggtttgtcaggtgtatttgaatgatttcacggcatagattcatgtatctctcatgtacatttgtaggcgccacctttctctagacgtgtcgctacagattcattcaatgatgtcgcattgcgttcttctgtttctactagtgaagatagagcagaagaagaaagaaaaagaagaggtacagaggatctattgactttgatctgtactaaacttagctctctgccaatttgtgcacttctttcagttaatccatgcgtttctttttgtgtcaatctttaattgacattctcaactctctgtcagcttcttttgagttgttgaggaaggaacatcaaaaagcattccaggagagacaaaaatcaaacccagacttacgcaaaaacgactttgattttactgaacttcttggggagtccaaagatgataaagggcgtccaagtagaagtgatgaagtcaatcacgctccaacaattcctggttctagtaacacctctttgccttctcaaagtaatgcacccagaccgcttgtacctcctggttttgcaagcacaattttggaaaaaaagcaaggggaaaaacctcaa

SEQ ID NO: 149993 - DNA, 461 bp, Arabidopsis thaliana landsberg
atccctgcgaatacaaagtgaagatcagagttgggaactctccaggaatcgtttcttccagaggatataacttcaacgcaccttatgagtttgtctttacagcccatgttcatgataccgtcgaagattctcaagaaggcattgtttcatggacggatggatttgatatttgggatgcgaagtcaaaggatttgaattctcttgtcaccttggatcggttaaatgctgagatggattttaaatggcgtcaggaagctatagattctgaggttgaatgtttcggtatactgcctgacaggtatatatcctatatactttctctctttgattggaaagagaaattgtagtcttaaacgttgtgttattttttcctttatagcaaaattggaaagctcactcttgcaaggcatttgatggctcgtgaagctatggtatcggatgatgctgtcaagggggttcac

SEQ ID NO: 149994 - DNA, 1991 bp, Arabidopsis thaliana landsberg
  unsure (1)..(1991): unsure at all n locations
caaaaacctgcggactccagagtgagtgtgagaatcggagatgtctttttcagtagtagcagctttaccggtgcttgtagcagtagtggtactgtggacatggcggatcgtgaagtgggtctggataaaaccaaagatgcttgagagttctttgaaaagacagggtcttaccggaactccttacactcctctcgtcggagatataaagaggaatgttgatatgatgatggaagcgagatctaaacccatcaatgtaacggatgatatcaccccacgtctccttcctcttgccttaaagatgctcaattctcacggtatagtgtcttttctttctttgtttcagcagagttgggaagtgaattgtgtagaatttagtttgacttgagatctctgttaggttgaattgttggtgcttgattgagttatgttggtggaacaggaaagactttcttcatatggattggaccacttccaacgattgtgataacgaatcctgagcagatcaaggaagtctttaataaagtcaacgactttgagaaagcttctacattccctttgatcagattgttagcaggtgggcttgcaagttacaagggagataaatgggcgagtcacaggaggatcatcaacccggcttttcacctcgacaaaatcaaggttttggtttttttctgttgcccgaattacgttagactgtgcatatgtgtgtgtgatcgtttagtaaccttatgtttggtttacagaacatgatccctgcgttctaccattgttgcagcgaggttgtctgtcaatgggagaagctatttacagataaagaatcgcctcttgaagtcgatgtttggccttggcttgtgaatatgactgcggatgtcatctcacatactgcttttggaagtagctataaagaagggcagagaatatttcaactacaaggggaatnnnnnnnnnnnnnnnnnnnngcttttaagaaatcttacatccctggatcgaggtaaaaccacgatctccattgtctctttgttctgttgcaaactaaagattttgagaatttgttgtttggtgtaggttttacccaacaaagagcaatagaaggatgaaagcaatagatagagaagtagacgtaatattgagaggtattgtgagcaaacgggagaaagcgagagaagctggagaaccagcaaacgatgatttgttggggatattgcttgaatccaattcagaggaatctcaaggaaatggaatgagcgtagaaaaagtgatgaaagagtgcaagttgttttatttcgcgggacaagagacaacttcagtacttttggtgtggactatggttttattaagccatcaccaagactggcaagctcgcgcacgagaggaagtgatgcaagtactcggtgaaaataataaacctgatatggagtcccttaacaaccttaaagtcgtaagtgaagaaaacacaactttcaccattctcgtccatctaaaaactgcgtttatagttaacaaagtcagttaaatttcaactgaaaggttgtctttgaatgttttttcaacagatgactatgatcttcaatgaggttttgaggctataccctccggtggctcagcttaaacgagttgtcaacaaagaaatgaagctcggagagttgacccttccagctggaattcaaatttacttaccaactattcttgtccagcgtgacaccgagctttggggcgatgatgcagcggattttaaacccgagcggttcagagacgggctctcaaaggcaacaaagaaccaggtctctttcttcccctttggatggggaccaaggatttgcatcggtcagaattttgctatgttggaggcaaagatggcaatggctttgattctacaaaagttctccttcgagctctctccttcttatgttcacgcgcctcaaacagtcatgaccactcgtccccaattcggagctcatctaattctgcacaagctctgattttgtatatcc

SEQ ID NO: 149995 - DNA, 3403 bp, Arabidopsis thaliana landsberg
atggccttgctagatcttatgtttataacaagatggttgagggtttatacagaccagggtactatgaagctcttggaaatgtgattttgaagaggattctgttgctggttcttgtaattgatagagccaaatctcaaagctgcctttcgctcaagtatgggattgatgggatagatggtggctcacccctcatgttctcagagaaatctagtataaagtctagccaccaacttatatgtggtactttcttagattttgctgtttagtttgtcgcttttttcatgtttactgcggctaattttccattttcttggctttgaacatagaattattgtcctctgatgtaatgcatggagaagggaatctcctagcgcatctagtgattataggatacaaaataccttatcagcaggtgatttttagttaagagtcaatgcaatgtcttatatgagatctcgattgctaagtgtatgatgtttcgctaacttcaataactggaatggctcttgcagtctcctttagttgaatacaactttagagtgagagagttgtttgctgacctccaagatggcgtgcggctctgcagagctattcaactactacttcatgatccgtccattctcacggtctgttttactctttatattgatttttaatcaagaacttccagtttgtcttattgagggagggagtttgatcttatgagggttcttatcaaacagaaaatggtagttccatccgacaatcgaaagaagaacttggccaattgtagaattgcacttcaatatcttaagaatgctggtgtttcgttaaaagatgacgaaggaatgatgataactggggaagatgttgcagatggtgacagagagctcactatttcactactatggaacatttttgtacatttgcaggtgagtgtttcttctttttctttgtccatttttgtggattgctgcaagtgtcgtcggattttcatcggttatgtatactctttgaactgggcagctgcctcttctgattaatgggagactcttgacagaggaaatctacaaagtccagggagtggaacaggtaaggctaaggctcgcttaatttccttggttccaataattcattccaatttctagccattgttagttatttgaatctatatgtagtttctactaaaagactctcaatcagatctttaatggtgacacttctctagttacactaatttttctctcaataagtcttctttttgggtttctttacagaataatcaaattaccatgtctactcctctggaaatgctcttgaactggatccaggtagcttcttaattcttatatgagcgtattcttattactttccttactatgagttgtgggtgctttctctgcctatgttatatatgtctaaccatgtacaatacttgcaatcttcactaagtcaattaccaggaagaatgacttcaagttagaaagctttgcatcattggtggatggaaaggggatatggttcttgcttgactactattttcgtcaagaagtttgctgtccatgtctacacagagaggtatgaaatgttcttaactcgaaatcaggttaaatgcattgaagtttacctaggccatttctcttcacgtatcttatgacacaggctggctatattttctgaataaatgtttatatccaggatcctggtggtcaagaaggccctcaatcagtaatgtccaataccgattaccatgatgcagttcaaaattttattctgtcgcaaaagttgacagcacttttgggaagctttcctgaggtactaatttcagccagtgaatgtctagttattcttaagtttagaaagaaaaagattactaaagatacgaagattgaattactgaggggccctttgtttctttccaatagatgattttcttcaataggctaacatattctgtatgtatggtcacgttagtgctatcagtttcctgacaaatcttgttgatttatataggtcctacagattggtgacttactggaacataatgcagtagttagcaaccaaagtgtgattatactgttggctttcctatcatcaaagctgatcgtcaaggagaatttggtattcctttcttaccaacaaaatatggcttccttgattagttttctggatggaagttagattttacattggcaggttatcttacaaattccgtcttttctcaggagcaactgaattttcataagttgctgtgctctagctgtcaagctcaggagaagagatattcgcgcatcagaatcagttgcagcagctctgaagcagttacaatcgaggaaccagacagagaaaatggagaaggttatctttcttactttccctagagtatatgatcttagaaatgaggaactggatctttttatttagatgctgatagtctataagtggtttcccaccctagtttcttatagagtctacagattcttacaattggttgaatgaagcaagcatgcttggtatactctaaatacatggtattgattgtcaaaagtaaattctacttgtagatgctactaaaaggttccaggcaatcaaagcctggtggcaggacatggccaaccaaaatcacatttctgttggaaaagctaatagccatactctgcaaggctccttgtctagaaaatgcaccacggattcccaacgaggtaattcaagttccatatctacccttctcaagttttacatcataagcttgttttcgatacccatcaccttttcatgatctgactcttatagatgtcacttgattgtattactgtattttgattcggtgattatttatctactttttggtacttggtagatagagtattgaatatcaaactctatccattatttgatttcagcatacctcttacttgcagaaattgcagcagtggtcatacaatcgaatattaggggacttcatgcacgccgcaagtttagaaataagatgagagcaatctgcttcttacaagctgctgttcggacatggttatcagtgaaaaatatacaagttcttgagaaattcaatgttgaggaagttactttacatttatctggtaattatttgttcgtgcatattcattgccattgacagatcaaaaagtttctctctaatgaaagttttgttatttctgcagaaagatcggccaacttaaaacctgtagctagatatgtcaagttcattgttgatcgaagtcgtttcatcaagttgaggaaatctgtttccgtcattcagaaagctgtaaggagatatcagagcaaccttcatcatgagctgaaagcagcactcagaattcaactagcttggaggagttataaagaaaaagttatctcatctatcaccatccaatcttatgttcgtggatggatcaactcagaatga

SEQ ID NO: 149996 - DNA, 579 bp, Arabidopsis thaliana landsberg
gatattggcaggattcagttaactgttagcaaatctcatttccggctgtggggtttcatgtcttgttaggtgttgaggaaggaaaagtttgcgccggtgaagaacgcaaacgggtcgaattacgacacaccggagaagcgcaagactgttggttctacgactgcatacacgttgggtcatagcagctggtggatttctaacacattccgttcctttatatgcgactggtaaagagccccatccaactcttcttttcagttgattcttttacttcactaacactcatagcttaaataggtgtggaagtgtcaccattgtgctcgtacgctggagaaaatctagaagcgatttgtcggggaagaacctttcacgcaccatgtgaaatctccctctaatcttcttctttctttttcttatctattcttgtaattttgtcattgtctttgctttttcttttggcttggttcttcttttgtgttggtgtttggtctctatatatgaactgtaactggcggaggtggtcagtagtctcttttcaatgtgttactcttcattattgcaacaatagtgaagtctccg

SEQ ID NO: 149997 - DNA, 540 bp, Arabidopsis thaliana landsberg
cgactctccgtctctgtctctctgccaaaacctcagatcggaaaatccgaaattcgaaaaaccctaagtttcagaagatgagcatcgctcgtttcgctactcggtcactcaacaacgtaactttccttcgaccatttcgtcccatcgtctctagaagcctcgccaccaacgccaacgaaggtaaacaccatttcacatttccacgattttgttcatccattttctcagattgtatcataactgtaaacggaatcgaatcgaactgagcagatccaaaccagaatcgatcttcttttgactcatcggacaatttggattcgttgtttggcgattacactggcaacgatgagaaaagcaatgatttcttccagcatcttagtaaagcggagaaagataagcgcgatttcaatggctataatagatcaggagggtcgagatactccggtggtggttcaatgagcaaagacgagacaatcgatccttcatctgatggtgttgatggaaaattgaaagaagctgcactagcttacaatatggatg

SEQ ID NO: 149998 - DNA, 651 bp, Arabidopsis thaliana landsberg
ttgaaatgactttaagtttgtcagtgctagaattttcaacatatatccacggaaaggagctatccttgctggctcggatgcagatattatcatattgaatccaaactcaagctacgagattagctcaaagtctcatcattcaagatcagacacaaacgtctacgagggcagaagaggaaaggtaatgataccctttttacaaacaattcgtctttactgatttgtataatctctgagcaatcataaccttttattttattggggacttgattgttaaatctcagggaaaagttgaagtgacaatagcaggaggacgaattgtgtgggaaaacgaggaacttaaagttgttccaagaagtggcaagtatatagagatgcctcctttcagttaccttttcgatggtattgagaaatcagatgctaattatctatcttctcttcgagctccagttaagcgtgtcagaactgaagctacgtaaagtgcaggtatctatctgcatatcgtgattctgtaagaacaattgtacataatttgtattaaaagtattgaaagagcgattatgaataatgtgcatgtagtctggttttgagaaaaaataaaagattgtaaaatttatccgtgagttaattagtctatggtctctttatctc

SEQ ID NO: 149999 - DNA, 941 bp, Arabidopsis thaliana landsberg
  unsure (1)..(941): unsure at all n locations
tgcagttatggtaactgccagacgacattccacccctcctgtgccagaagcgcgggttttcatatgactggtggtggtaaacatccgcataaggcgtactgtgagaagcacagcatggagcagaaggcaaaggtcttatctcttatcnnnnnnnnnnnnnnnnnnnnnnnntacttagattataagcttgcttatatctgtctgactatttctgcaggccgaatctcagaaacatggtgcagaggagctgaaaagtctcaaacattatagggtaggagttcttagcgaagtcaaaatgtttttgccattgctttgttaagcgtattcctttctatctcttatcaagtaatttataattcttggaattttgctaaatctcctccaggttgaacttgagaggttacgccttctgtgcgagcggatagtcaagagggagaaattaaaggtatatgttaaactacagaataaacccaaaattttccatttattgagcgaaacacatgggggtttgacctgttactggtttggtatatttgcagcgagagttggctatttcctcacatgaaatacttgctgccaaaagggatcatgctgcacggccattacatgtccgtaatccattttctcctccagaagtttcgtcggactcagctacaacatcaataaaaggccatcctgatagtaatatatctggcagtgaagcaatacagaggtcagatgatatcactattgacagcacagtcactgataagcgcagaggcaaaggtcccttattaatggacacggatcagaaaaccgatgacagtgctacttccaagagtcggttttcccgtaaactaacagaaagacagatcttatctgggaaaactgttccccgcaaacattgtatagtgtcacctagtgtttcagaggatggagataacgggtcaaagcccaagaag

SEQ ID NO: 150000 - DNA, 2124 bp, Arabidopsis thaliana landsberg
tcgacgtcgttttgccttgggctcgatgatggtttctggaaattgataagacttacttcttcagctgcaaaagacttctttttaccgaaacaagtcagtgacaattatataagttatgtcaaatggaagtttttgcacagagttttcagctctgctttacaggttcttgccactcaggtaacattgacacagttctagacttgaaattggacttttgtttgttacaaattttgagttgtttttgttgcttcaggcaatgtttagagcaataggaatcggacaatctcggtcacttgcttcatctgctgcttttaattggattttgaaagatggacttggaaggttaagtagatgtatatacactgctagtcttgcttctgcttttgacactaatttgaaggtattttacttcattatattgtaattctcgaaactttggagattttttgttacttatactcttagaactttgctaaatcaagagagttaggttctcgacgtctgtactcttcagtctgagcattggagttgagttaatgactccagtattcccacaatactttcttttgctagcttccatcgctaacatcgctaaacagattagcctgtcgtgctacttagcaactggtgtaaggtttcctgtttgttatttttcattgtgacttaagtgttttatgtttagtgttttggtttgacagccaatgtttcgacattgtgcagtcagctgtacatcgaagctttgctgtagcggataaccttggtgaagtctctgcaaaggcacaggtttctttaacgaacctactcgagcttttctatcatttgtatcacacacatggcttgattttatttgtgacttttcagattcaaactgtttgttttgataaccttggtctcctactggcggttcttctaaatatgctattccaacacaaccaaaggttagctcaatctagtaccgttgagagttactttatctgtgagatttgtctctgaatcctctgacttgctttatgtactagactgcaggcatgtctaccttttgttctatatccgattttctccacgtttgatctccttggcatttatcaagggctcaagcatatcaatctgcaaactttgaccaaggtagttttttgttatctcggtaactagactcgaacaatggagactactttatattgttataagtttttcttttccttatcagcataggcttgaaattattctggaaagatggattgaatttaggcaagtaccttcccctgccgaagtgagtaaagaggaaggaattggccttttagggagtagaggtgaaaaacaagaaacgtcttcaggctattcactttccagacattgttaataagctgaatccttcatatgttctttgtaggtagcaaaagggtttggcccatcagaatcggatgcttagatcctaaggctcagattcctacactattgatgatggccatgcaatcactctgcagtgatgatggttacttcataaccatggaactttcctcccaaggtttcagaagaataccaaaagtgagtttcatgtttgctactaatatgtcctcatgattctgtggtttgatcctcaacacttgtaaaatatttagtcgggcatcgttatttgtctgcgcgaagaagccaacagtgtagacgttatcacgagtttgttacaggtaagggactcaactgaatatcatcagtttagtaagttcatagtagtcaactgataacacattttggtgatatgttcagacatgttacatacgtaaatcccttggagccaatagaaccaagagaagttacttatcgttttcagacttgacgctacaagattggaccttgctcacaagagagagtaagcgagctgctcgagatgattttatcgcactgaacaaacaaatgcaagaacaaggttggatcgtaaagaatgtcttgttgagtgcagaagagcagattagatacatttttgacaaaaaccaattgtaacattaaagaagaatcggttaaattgtaactgttttagtacaccgagattggtttgtaaattgatgcttgagtactctgttaatacaatctacgtggcaatctatacacaagaaagttgttaccata

SEQ ID NO: 150001 - DNA, 2710 bp, Arabidopsis thaliana landsberg
atggaaatagtcgaatcattagaagagattccagtgcaaaacccacaagtagaagacttttcatgggctgatttgacctggaccaaattcggaacatcagagcatcacgaccaagtagcattagttccatacgcaagagtcgacgaattcatcatcggagaatgctcaaacgctgagtgccctacacgattccacatcgaaagaggaagaaaacgctctcgaggcagtctcaaagagtacaagagcgacgagtatttggaatatagactgtaagtttccatttcagtttcaaattactcaaagatctcatttttcacttgtgggtttcatttgttttacttcttattgaaggtattggtgttcatttggtcctgagaactatggagaaggtggtggtgtgttgcccagtaggaaatatcgtctcaacactagaaatcgagctgcgagacctcaatctatgagaggatgtacatgtcattttgtggttaaacgactctatgctcgtccttcacttgcgcttcttatatacaatgagagacgacatgtcaacaaagctgggtttgtttgtcatggacctcttgatagagatgctattggtcctggtgctaagaagattccttatatatgtaatgagattcagcagcaaactatgtctatgatctatcttgggattcctgaagaaaacgttttggagaaacatattgaagggattcagaggtattgtggttctgatgcaactgttgatagtcttgcctctcagtatgttcataaacttgggatgattatcaaacgttccactcatgagctggatttagatgatcaagctagtatcaagatatgggctgagcgcaacaagaaatccatcttcttttatcaggaatcttcggagacggatcagtttatgttggggattcaaacggagtggcagttgcagcagcttgtgcgttttgggcattgtagtcttgttgcagctgattcgacttttgggataaaaagacttaaggtaaaatggatcttgttcttatgtctgtctctgcttttgtgaaatttatgtgctttatcctgatctcctaaacattgtggcagtatcctctgtgtacgcttcttgtatttgattcaagacatcatgctctccctgtcgcttggattatctcgcgtagctatttgaaatctgatgttgagaagtggatgaaaatactactccaacgcgcccagagtgttgagcctggtttcaaaatcaatggctttatcattgacgatgctgcaacggagactgatcccataaggcatgaatgatggttcttcaactttgtagaaagcttcgaaaataggataaacagtctattgtgaactgactggattcattttttgtgtttccagggacacattttgttgccccatccttttctctctctggcgtgttcgtagatcatggcttcgaaatgttgtgaagaagtgcgatagcattgaggttcaaagagatttattcaaatgtttaggagaactcgtgttcagtatttgggatggagtagatacaacaaaggctttagaaaagttaactcaggattttgttgatcaaaccgcgttcatgcagtatttcacatccacttggttgcctaaaataggttagggccttaacttttcaccttctcatccttattatatagaacctttgggaacaccgcaatcaagttcacatgtactcggtcttagtgcctcatatcttcttcaattattgcaggaatgtggctttcaactatgaaaagtcttccgcttgcaagccaagaagcatgtggtgcgatagaagcttaccatataaagctgaaagtaaaattgtttgacgatacacacctcggtgcccttcagagagtagattggttggtacacaagctgacgactgaacttcattctagttattggcttgatcggtatgctgatgaaagtgattctttccagaatgttaaagaagaatacattgcttcaacatcatggtaccgagcgatggagattcctgactctgctgttacactagacgaaaacaatatccttctagcgaaggttcagtctcagagagatagcgatgtaacacgagtcgtgtggaacccaggttcggagtttgctttctgtgattgcacttggtctttgcaaggaaatctatgcaaacacatcataaaggtaaatacaatgtgtgaaaaccgcgaaggatatggtgactcaatgtccttgcgttccttcaaagagaaactgagaaacattaagatgaaacctatggatgactcgatagctttggatctgtcgatggcattgacgctgcagatgtttgatcagataaagcagttggtgcgattaagcggaacaaatgatatcagcaatatagtcaatgatttgccagtgaaatggggttgtaagaaaggccgaacaaccataggcattcctgcatctattgctgcctttacaaagaaaagaagccagaaaagaaagcgataagtcagagatgagatgagaagtggtagcatagatcacttgtaatggcttacaagaacacggcaggttgttgcgtatcttcagagttagagaattcatagacggttagctatagttataggttcttgatagcagccattgctttctccgttgctttctctaagtgtaaatctctaggttaatttgataatttcattgcaatatattcaagtttttgggacaaaag

SEQ ID NO: 150002 - DNA, 521 bp, Arabidopsis thaliana landsberg
tatctctcagaccaattagggtttcgcaatcttccagtagatttcgcttctcaacgtaagtttttctctataatctgtgtcgatttcagtctaactacagtgattgttaaaccctagactcggaaattttcctgggctttgttattatttgcgtcggtttagtcaatgcgatgtagtgaacgcttcgattacatagatttgtgtgaaaattttatagtccaattgcgttatagtgatgattttgttggtaattttgattttgaaactagggattttgaaaatggtggaaaatggggctaaagctgcgaagcgaaagaagagaccacttccagagattcaagaggtagaagatgtacctaggacgaagagaccaaggcgtgctgcagcgtgtaccagtttcaaggagaaatttattcgagtctgtgagaaatctgctactattgaagtaaagaaacagcagattgtggaggaagagtttctcgcgttacggttaacggctctggaaactgatgttgaagatc

SEQ ID NO: 150003 - DNA, 908 bp, Arabidopsis thaliana landsberg
atgtggaggtttcgttactcgtattggaacagtagccaaagctacgtgatgaccaaaggatggagccgtttcgtcaaggagaagaaactcttcgccggagacaccgtctctttctaccgtggctacatccctgacgataacgcacaaccggagagacgacggaaaataatgttcatcgattggaggcctagagccgagataaactttgtacacaggcattaacaatcataacttcgttttcgggtctccgacatatccaacggctaggttttatccggtgacgccggaatattccatgccataccggagtgttccaccgttttatcacaaccaatttcaagaacgggaatatttagggtatggttatggtagagttgtaaatggggttggagtgcgttattacgcaggatcaccgttggatcaacatcatcagtggaatcttggtcgatctgagccgttggtttatgactcggttccagtttttccagcggggagggtacctccgtcggcgcctcctcagccgtcgacgacgaagaagctgaggctgtttggggttgacgtggaagagtcttcatcttcaggggatacacgtggcgaaatgggagtagcagggtactcttcctcgtctccggttgtgatcagagacgatgatcaatcattttggaggtcgccacgtggcgaaatggcatcgtcttcttcggctatgcagctaagtgatgatgaagaatataagaggaaagggaaatctttagagctttgaagatagaataaaataagaactaaggagtaatttattcaccattttcttttaagagttagttccaactttcaactcattaggtcatttggcaattggggaatatgtagtgggaaattaaccgggcttatatctatatattggtttaatt

SEQ ID NO: 150004 - DNA, 2159 bp, Arabidopsis thaliana landsberg
ctcgggattttgtcactacctaatgctaatagaaactcttccaagacgaatgatttgaccaacattgtacgaaagaggttagggcaattttttcgatctgggtttttgtttttgatttgaaagttttgatttttttttattgatttgttttttttttggaaattgttttgttagtgagacgagttctggagatgaagaagggaatggtgaacgttgggttgaagttatttcttgggagcctcgtgctgttgtttatcacaatttcttggtaatttcgtgtttctctttgatttaggacttaagattagtatttcttgttagacaagataagagatttgagcttgttttgtttagaaatttgatcgattgagttgactttgttcttctctagaatttagatctttcattgaagaatgtttcagcgaaaatggtttaaggatagggttgactttgtttgttctgcactaaagtgattttggagatattgtgttagaaatgagttattaaattggaatgtttgagatgtgatcttgagatttctgtttcttttagactaatgaagaatgtgagcacttgatcagccttgctaaaccgagtatggttaagtcaaccgtggtagatgagaaaaccggtgggagcaaagatagcaggtttgtagtgactatttacttgtgtccttctagcttaactctggaggttttataatcgatgttgtatcaatcctgtgtagagtgagaactagctcaggaacttttcttagaagaggacatgacgaagttgtcgaggtgattgagaaaaggatttcagatttcaccttcattcctgttggtaagtgctctttgctttgttatccaatacttagatgcacagcaggaaatgttgacacatcttgaggtcatcagttgcatttactcttgatatcttgagttgtgttcctttggaaatcccttattgagtttgtggatgacgcttttgtttgtagaaaatggtgaaggtcttcaagttcttcactaccaagttgggcagaagtatgagcctcactatgactatttcttagatgagttcagcaccaagaatggaggacaacgaatagctactgtgcttatgtacctgtaagtaactcacaaaactcattattcctttttctcagagcatttctgtgtttaatctttctttttttttcacacgattctttagctctgatgtcgatgatggtggcgagactgtgttccctgcagcaagaggaaacattagtgctgtcccatggtggaacgagctctcaaaatgtggtaaagaaggactatctgttctaccaaagaagcgagatgctttacttttctggaacatgaggcctgatgcatctctagacccttcgagcttgcacggtaataagactaaagaggttgctttctttagaagctaatacaaatatcagtttctaaacttcaatatcctatgcattgattttcaggtggatgtccagtggtgaaaggaaacaaatggtcatccacgaaatggttccatgtccacgagttcaaggtttaagagaaaccaaacaaagaaagctaaaatatgaggaggtaatctcttaagtcttaaatatcaagctatctatcaatgagatcttcaagattgcctgaagtctttaccatctatcttcaacctcactcctttttatgaatctttaggtttttcatggaagcttcgaatgtgtgtggatacagttaaacaggtataatgtgtatttcccttttgaagtgagagatccttaggaaattggaggctgttctttcatgggggatatttgaactttttgtactttttcttctaaattattttgaatgatttgtactttacgacatattcgaatctgagtcttgtaacttttaacaactcaatacgaaccatgaattttccgtttatacatgcttgctttcttatgttgattaagcaaagttatttctgcaaccgttaaatttgatgtacttcagaagagctcgctcagaattcacaaactttgcaaatcatcgtttatgcaattcaagattcggaccaaccgatcacctcggtgcaaaatatttttcgggaagcatgattctgagaaatatctccctatgtgttactcgcaacgtagttgggaacagattcaaacgtgttga

SEQ ID NO: 150005 - DNA, 2119 bp, Arabidopsis thaliana landsberg
  unsure (1)..(2119): unsure at all n locations
atcagaggcaaatcaatcaagattaagaagacgacaatggaagagccgtttcttccgagagacgagcagttagtctcttgtaaatccacatggcaaagtggtcaggtcaccgtcgagctgaagaaagtgagccgcttggccgctcctatggccaccgtaaccatagctcagtacttattgcctgtcatctcagtcatggtcgccggccacatcggcgagttggagctcgccggtgtcgcgcttgccacgtctttcacaaacgtttccggcttcagcataatggtaattatgctattactctctcctcttcatttcaagaactcaattaactttccaatgttggactattgcttcattcttttttgtgtagtttgggttagtgggtgcattggaaactctttgtggccaagcttatggagcaaaacaatacgaaaaaatcggaacctacacatactctgctatagctttcaacataccaatttgtttcatcatatcaattctatggatttacatcgaaaagctcttgatcactctcgggcaagaccctgacatctctagagtcgctggctcctactcattgtggctcgtaccggcttttgttgcccatgctattttcttaccactgacttggtttctgctagcacaagggttggtaatttccctgctatactctgccatgaccacccttttgttccatattgcggtttgctggactttggttttcgcgcttggtcttgggagcaatggagctgccattgccattagtttgtctttctggttttacgctgtgatactctcatgtcatgtgagattttctagctcttgcgagaagactcgcngatttgtatcaaatgattttatgtctagtgtcaagcagtacttccagtacggagtcccatccgctggattgatttggtaagtaaaccatttcacgtttcttgttggttaagttacaatacaccgatgcttcctcttatcttgcttgcatttttttgtcttctttgatagcttagaatggtggctgtttgagctactcatactctgctcaggtcttctcccaaacccaaaactcgagacatctgttctttcgatttggtaagtatcatattacttctttttatcctatgtgttctctttaccaaaatgtattaatcttatgtctttcatgttatcagtcttacaataggaactttacactatgtgattccatctggagtcgcggcggctgtgaggtatgatctcaactctcaaaccagaacaagtgttcaacaattcctttctcaacattagtcatttggtttcttgaagcacacgagtgtcaaacaaattgggagctggaaatcctcaagttgctagggtttccgtattggcagggctttgtctctggcttgtagagtcagctttctttagcacacttctcttcacctgccgaaacatcataggctacacattcagcaacagcaaagaagttgttgactatgttgctgacatatctcctttgctctgtctctccttcatcctcgacggatttaccgcagttctaaatggagtggctaggggatgtgggtggcaacacattggagctttgatcaacgtggtagcttattatcttgtaggagctcctgttggagtttacttagctttcagtcgtgagtggaatggaaaaggactctggtgcggtgttatggttggatccgcggtgcaagccactttactggctatcgtcacagcctccatgaactggaaggaacaggttagagtttgttacattctagttttttgaatgctctgaagtaactagactctattatttgcaggctgagaaggcaaggaagagaataatctcaactaaaaatggattggtttaaataaaggttgttcctcagagctatctcaaagtatttggaagtcatgtgcaagaaaatatttaatgttattttaatattttcgtaaaacttatatccaggttttatacattttttcacatgcagattttatacattttttcacatgcaggttttttgtaaaaattattcgaattgcaaaaactcatttacttgtgcagcgaggcgcttctggacccaaaacccccaaaaaaaaacatggctataatgacaac

SEQ ID NO: 150006 - DNA, 1212 bp, Arabidopsis thaliana landsberg
aattcggcccatccacgtcagcgactccggatttagcgcagttttaaactcttttgacacacgaccacttattataacgccacgtgtcaatgcacttcatcaggacgcgcgtaaccgccagaaaagcgaaaccaaaggtccatctccgacacgttgcttatccgactacgaaactcactcaccactgttctaaattctctcactctctcttttttcattccttaaaccaaaaaagctctctgtaggtcatccgggtttcctcgtttccaatctaaaatcatcatagatttgtttgaaattcttcaaattgaaccggtatcaagagatggcgggaagtgaagcggtagaagataaggagataaaatcggcggtttcaagctgtgaagcgtatttcgagaaagtacaatcaaggaagaatctacccaaatctcttcaagaaaccctaaactctgctttcgccggaatccccgtctcctccttccctcaagtccccggcggcagaggtaaaaattaggaagatcccattttttcgatttctccaaatttcctgatttctcgtttaaagtttgagacttggcaatggtttagattcaattagtttttttgtttgatcgtagtgatagagattcaagcggaaacacctgtatcagaagcagtaaagatcttatcagacagcaagattctatcagctcctgtgattaacacagatcacgagagttctttagattggagagaaagatatttaggaatcattgattactcttcaatcatcttatgggtactagagagtgctgaactcgctgcaattgccttgtcggctacgtcagcaactgctgctggtgttggtgctggagctgttggagctcttggtgttgcagcgctcgggatgaccggcccggttgctgctgcaggtctagccgcggctgcggttggagcaccgttgctggtggtgttgcagctgaacgtgggattgggaaagatgctccaactgctgctgataagttggggaaagatttctatgaagttattcttcaagaagagccttttaaatcaaccactgtaagttttttaatagaacattaagttatttgtgttgtgatggatggtcctgattgatcatggatatatgtttatgtctgcaggttagaacaatacttaagtcgtttagatgggctccttttcttccggtttcatcagagagttcgatgttga

SEQ ID NO: 150007 - DNA, 822 bp, Arabidopsis thaliana landsberg
  unsure (1)..(822): unsure at all n locations
atgggaaataccaataatgatgggaaggttaacagaagaagggagcaaatggcagatgattctgactattcaaggtgaatctagattctagcttctcatagtcagagaatgtagcatggttgtttctaacacgaagctacaatttatgcagaaattccggcgataagtctagtaaacaaaaagtagttccaaggtcagaacaagtgagtgatgaagaagatgactccatatgggaatcattgcctgcatcattgtcagtgttgctcataccgtccctaaaagaagtaatccagctatataactacattctcatcttttttacttgcatatatgaaaaaaatgagttggaatgatttgaatgtcttaatcatgtgtaggctcttggtgacgattctaaagaatctactgtgcgtacagtgtcgagatcccttgtgatgatggaacgtgaaaagcctggttcttgtgaagcttttgttgccaagctgattgaacttttgggaaggtacatggagctttaaagaacacatgttttatcatcttattgttgattacaaacttattctgacacaaaacataaattcgatgacagttcaaaagaagcttcggtgaaagaattgcacgatatggcggtctgtgtttttgccaagaccacacccgacaatgcagagaacaaaatgaaacaagcaaacaaggagtttagttccaacgcnnnnnnnnnnnnnnnnngcaaattcttactctcaaggtttgttcgaatgatgaaaaaattgaaacatgaaacaatttttcatgagtttgatatatgaatttttagggcttcag

SEQ ID NO: 150008 - DNA, 982 bp, Arabidopsis thaliana landsberg
ctatggagaagcagcgtctgagcgacaagccattggttcaggactcttgtttcatggagttaaccaagtatgtttcactctactttgaatgtaaaacttatgcagctatggttcttgtaaagaaaaagtttcttcatttaatggaacagggagcttgcgttggactctattttattaacagaccagagtggttggttgtggatcatgcttgtgcagcatattcatttgtctctgttcctttatatgatacacttggtaaccaatctaaatttgattttttctctttagttttcgagttttgcaagccttgtctcttcttaatatgattcttctggttacgcaggtccagacgctgttaagtttgtggtgaatcatgctaatctgcaagctatattttgtgtaccacaaaccttgaatattgtaagtgtgttttggtttgttaaagtggtagctattatcttctgagaatcagttcaagtatagtctaaattgcaacactttcgatcatgaattgtgtttgtctttttttgttgggaactttgcagttgctaagcttcctagcggaaatcccatccattcgtctcattgtggtatgtacttctccaatatgtaatttcactgtaagctaaaatatatactcccacttataaatatgttttgcactgtgattaggtggtgggaggggctgatgagcatttgccatcacttcctcgaggaactggagtcacaattgtttcataccaaaagctattgagtcaggtagccttttacaatgggttttaactaaagtactaaacatgtgttgttatcttggtgaatgatgtctctgttcctgtaatgagttttgcttggtagtgaaagagacttcatgttgccaccggctatcttgtagggtcgaagtagcttacattcattttcgccttcaaagccagaagacattgcaaccatatgctacacaagtggaaccacaggaacaccaaag

SEQ ID NO: 150009 - DNA, 374 bp, Arabidopsis thaliana landsberg
cgcctttctacgagcagacataaaggtgaagatccaagaagccacactgttgttcatactttattgtttgccatgtatccaaagaatgtccagttaactattgtgtgtcaaaacaggtgtttttgcagagtaatcgccaagccaaattcacaccaagagccatcgcgagaataatgcacggagttggaagtccagcttttccgaattcagtctggtccaagactcatttctggtatattcatcatcatcagctaaaccaagccatgcaagttattgtttggtgatggtacatgtgatttaataaaaataaagctttgcaggggaaggtatatgaacgtagacttccgagtgatatggaagcgacacaaaaagct

SEQ ID NO: 150010 - DNA, 1228 bp, Arabidopsis thaliana landsberg
caccttggaactgtagcttccaagcttactgatctttttgttcaccaaaattcagacatatcaactggggaagggagagcttcttgtgttagccaggtaactaaactctctcacacacttctctatttatttatcttaccttttctaggcaatctcccttaaggtttgtgtatgttcttttcatcagcaactgcttacatgccggacatatatcgacaaagaaggtcttagacagcaacagctattagcagttatcccattgcatcacaagcattacattcttcccagtaagagtttttcttgtcccttgttaagattctgttagtttactagtgaaatctgatttcttttttctctcgactgttgttagattctgttaacaagcgggtacactttagtcctctcagacgaactgacacaagacagaatcattaccaagctatatcccgtcttcaaccttcaggtgcaatgtcctcatctttgagcttattagttaataatacaagcagtcaaatatcaaacagtttaagtaatatgcttggtttgactcacttagatgcccctgcatcgaaatcactctcctggcatttaggctcagagaccaagtctaccctcaaaggaacatccacagttgcaccaaggtgagttcacaaaaagctttagtactgcttctcacgttcttgataactaatacatatttactgtgcagctccaaagattcaaaagctttctcaaagacatctggagtgttccatctcttaggtacgagaaacagggagttggggaagtatcaaacatagcatttcttcttagacaactcttgccaagagattgatgatatacattgaaactcatgcaggtgatgatgaaaacatagcaaacaagaagcctttggctggttctcaggtctcaggtgttcctgctgcatccactgcccataaggtaaaaaaatttagaacacatgaaactaatctttcatgaatcgggcagttcatgtagaaaaatgcaactggattagtaagctgtgtatttgtaatcatggttttgatgagacaagtttgtgattcaacaggatttggaggttccgaaacttctatctgcacacaggtcacttgataacaacccgcgacgagagatcattcgagctcctgtccgggcacagagtgttctttttgcgttctttgtaaaacaaaaaactccagagctcacagctggctatgtcgcgtga

SEQ ID NO: 150011 - DNA, 845 bp, Arabidopsis thaliana landsberg
aaagaaattgctttcagtgaaccatctagtggaaaatctcttgatgaatctgacttgctagataagcatgagggtcatggtgaagttgctactgatttagatggcggattgagtaaaatgccaatgagttgtctgagggtctgctcaggaaatgcagaagacattatttcgggttctgaaatggaaattggactttcaccaggttcaaccaaagctgctgcagaagatgttacctctactgttcagaatggtacagacagtgcgaacgagaattgtgaaagaggtgcgaaaaggttgaaaatttgggcaccggagaacggagtgtatgaatgatgatgataactgagccgagaacctagctagcgagtatttccaagatttgaatgagcaaaatctaacgttgagcacacaaactgagaagcaacatctacggggtctcagaaaacttgattcgagggaggattcgacttcagaactatgatgaagaggctccttcaaagaggaaactgaaagaagccgttgaggtgacattgtgtcttccctacaacgtgaatgagacatccaaggacacttgctttggtctgaaagccgcaacagctgtcaagtaatacgaggaatgtcttgtcctcagctctgtcccctggatttcttaaactatagacttgttgaatagatcatgaaagccactaatgagagtgtctctgtcgacttttctatgctggagatggaactatcgaactgtaaattggataattatgatttaatacaactgtctaggaaaatgattgtattcaaataacttttttttttctcaaataaattatggaataaattgaatactaaaa

SEQ ID NO: 150012 - DNA, 599 bp, Arabidopsis thaliana landsberg
tcttcttttgatacaccgagaggcaacgaaccactggctttggacatgaacacaatggggaaaggtcaagtttgggtaaatggacataacattggacgccactggcctgcctacacggctcgtgggaactgtggacgttgcaactatgctggaatttacaacgagaagaaatgtctcagtcactgtggtgaaccttctcaaagatggtgagaaaaaagaaacaatatccttctcttcttcttatttggtctaaaatctaattcacatgattgatttattaatgttttaggtaccatgtacctcgttcatggctaaaaccgtttgggaaccttctagttatatttgaggaatggggtggtgatccaagtggaatctctcttgttaaaaggacagccaaatgaagcttcttacttcaaattttttccggaagcatgcagagattgtcatgtacagatatagttgcattcattggctcattgtggaagaatattatatatatgtatcctgctctaaaaatgtattgcaattgtataaaataatatttatacaatagaccaaaacaagccaatctcaatcaccccataagaggggttcttctt

SEQ ID NO: 150013 - DNA, 219 bp, Arabidopsis thaliana landsberg
aatccgtggtttttctttggagtatcttgtctggagctttaagtgcttggttccggcttaagttccctcatttgacctgtggaagcctcgctagttcagcagttgttcgtgctgtctacgaattccccgaatttgatcaacaggtattcgttacaatattcaactttaagtgaagaaatgttgtgtttcttcatatagagtttagttgctggcagaatc

SEQ ID NO: 150014 - DNA, 895 bp, Arabidopsis thaliana landsberg
cgccgacaatcgccgacagagtttttgcttctcacgcgatagaaagaagatgaaggagacgagaaagctgaagaagagtaatctccctaaaggtaggcctaattttctcgcgtttatattcttacttaattgatttatgaggtttcattacagaaccgaaaagacctaactatggttgttgtgtatactaagattgtgttcttagaggtaacttatttgatttcgaaagttgagagctttaattggaatggccttgaacttaattacaaaggttaatcttgtgaagcagaagaagtaaattgcttatgcaaattattgtttgtctaattgacgtgacggataaaatcaattcagaagaaactgttgggaaaaaaattcagaggaagaagaatgagaaagtgagcaatgtcgaattaagcgaggatcctcaggctgcacagcttcaaggtgaaagttttggctttgatggatttagaagtgttttatagtgttttaagatgtgttatgatgttgagtatagtatcttgtttattattccttaccagctaaatcaagtgagaaacccaatagaaagaaaattcagaagggtaaggaaataaaaagctctccagctgatggtaagctgagtgggaagatgaagaagagaaaagagaaagtaggcaatgttgatataagcgaaccgattctggaaggtgaattcttttgtttttggcagatgaaatctattactgagctgttagattctggtattgagtttagtatctctggttcttgttacagctatttcaactgagaaagtaaaagaaaagaagggcaaaatgaacaagactaagaagaaaaggaaggccgaggaaataactagatcttcagtcgaagatctgaaaagagaaagtga

SEQ ID NO: 150015 - DNA, 1298 bp, Arabidopsis thaliana landsberg
tataaaaaaggcagctgaatctgcaagttagggttcttccgacatgaatcttgccccaatcttcaggtactctcttctattttgtttcccttctcctcttgtgcgttttgctgcaatttccgatcctcataaaccctagctttctgacgcatattcagcaactaaaacgatgaagagactaagatccagcgacgaccttgatttctgtaatgataagaatgttgacggagaacctcccaactcggaccgtccgacctcttcctcccaccggggcttcttctcgggcaacaaccgtgaccgcggggaagatgctgccggcttctccagggctttttcccgtaggcgatccaatcgtgacttggataatcatcggccagatgcccggtaccatcgatctgagagcgcctgtttctcaaggagggcttttccaaagggatttcgttctgagagggagaggcccaatagggatgctagtgtctcttcctggaggaggtttggtggtcctggtaatgactttggcgttgatgaccgagataggagattaagggacgctgagagggataggagtctcaaatccccttcttggtccagagactcgcctaacgagctttccaaattcaaaccactcgattccagaaattctcgctccagatccaaatctctagcttctccgacatggtccaaagattccgggagtgagcaatccaaaagtgttggaaatgttgtcaagaaaagcgaggaggaagtgcagggtaagagcagtacaaccagtagcgagatggaggaaggagagctggagccagagccccaaccagagactgcctcaggccttgctcatcaaaccaaacatgactgtaaactgccttcctgctctgctgatgatcataagaacgcaaggattgatagaagcttccaggaaattggaaaaagcgctcaacttgatgccaacactgagagtaacagggaactcagtcatgtgggtggtaatagggaaatggaaacgacagatagcatgaccgataagaaaagtgttgaagacgcggaaaatgtgcctgagcatgcgactgagtccatgcatgtttctcaaaacaacgtgaatgatacttctacagctttggctattgaacacgatcatagagatggcacaatcactgctagtgccaataagattacagatacggttgacgagaaaggtgacaaagatgaggattataaggagaaccttcatggagtgaagttggaagaaactctttatccagatgttcctgaacggttggaagagcttaaggaagtgaagg

SEQ ID NO: 150016 - DNA, 2677 bp, Arabidopsis thaliana landsberg
atgagtcgggtacgggtccggtttgggacctacgaggcagagacagagtgagaatccgagtcacgaccggagtgatggtcgtggaagccagcctggtctgaattgtaaatgggcctattaggttctgaggcgtagaccgtacggactgttaccatgtgcttttacaccaacaacaacacatttcacaattaatgtattaaaaatattattataataatattaaaatcaaaaccgtaggttatttttttttaggacctatatattattgactttaaaaaaaaattcatttcataacaatagataattggataatttgattttctattatttcatttggaatggacacgtggtggattaatgatggtggttttgtaaagatataaaaaagtaaataaataaaatagcttccctacttaaatgattaaatgaatgtacgttaacgtacgtgttagatttttttcatagcgaaggaaaaatttaagattcgcattggtcgtgtcgattgtgtcaggctaaacgacgacgtattaacgtagatgacaaaggggtccggtcccaatgaaaatatgacatatttttttgaagtgattttgttttgtcaaataagttattggatataaattgcaatttgataaaattatgtaatagatatgacaatttggaatgtatctgttttcttttttagtttatttagatttttaaatatttccatgcttttattcttattttctttgtgtaagattactttctatagtttcatttatagtaagttaaataatttaatattgcatttatagagaatgcattaatatagaatcgcctaaaaaacactaaaaatactcaaatctcaactaaattaataacactaaatattttatgtactaaaaatttactcgacagatcttggtttctagtacatttttgttttttttgttttgtcttgatattagcatgcaaaatcaaaacataaacatgtgttatctccaaatcaaaaacctaactaccattttgtaaattgtaactgcgattctatttacatcttcaaatgtttttttcccttctaatccaattaatatttctttctgtattttatataatatggatcaaattattgttattttcaatagaaataaatcgtggcgtttccaaaataatcagattgtgttgttgttataatagcatcaaaattaatatagaagacagacaatgacagcttgtctttatttctccgtaatcgttacacttacacaaaatttaatttgttttcttactatattaaaaatatattccaagttgaccataaaaataatcaataaacaaaacgagtaattacaaataaaaataaataaacactctctctttctctctttcctcgtcttcttcttcttcttctttttttttcgtaaaaattcttcttcttcttctccgagctccgtccgagcagagaagaagagtaaggtaagttttagagtgcacttgtgtggcactctcatttcttatcctgcgcctcttacgatttcttatggtgcgcttctccgactagtttcggtgtctaatggactcttcctcttcttctctatctctccaagaaaaaatctcttctggttatttctagggtttcgttggttcttttttcgaaatgctttggataacgagatttgctggattattctccgccgcgatggcagtgatcgtgttatctccgtcgcttcagtcatttcctccggcggcggcaatccgttcttctccatcaccgatcttcagaaaagctccagcggtgttcaacaacggcgacgaatgtctctcctccggcggcgtctgcaatccgtcgttggtccacgtggcgatcacgttagacgtagagtacctgcgtggctcaatcgcagccgttaactcgatccttcagcactcggtgtgtccagggagcgtcttcttccacttcatcgccgtctccgaggaaacaaacctgttggagtcgctggtgagatcggttttcccgggactgaaattcaatatttacgattttgcccctgagacagttcgtggtttgatttcttcttccgtgagacaagctctcgagcagcctctgaactacgctagaagctacttagcggatctgctggagccatgtgttaaccgtgtcatatacttggattcggatcttgtcgtcgtcgatgacatcgctaagctttggaaactagcctaggctcgaggataatcggtgcaccagagtattgccacgcaaatttcaccaaatacttcacagatagcttctggtccgatcgaaaactctcgagcgtcttcgattccaagactccttgttacttcaacacaggagtgatggttattgatcttagagcggtggagagaaggagattacacgaaacgtatcgagaaatggatggagattcagagaagagagaggatttacgaactaggctcgcttccaccgtttcttctagttttcgccggtcacgtggctcccatctctcaccggtggaaccagcatgggcttggtggagataacgtgagaggaagctgtagagatttacatcccggtccggttagcttgcttcattggtccggtagtggtaaaccgtggtttcggttagattcgagacggccttgtccacttgatactctttgggcaccttatgatttgtatggacactactct

SEQ ID NO: 150017 - DNA, 823 bp, Arabidopsis thaliana landsberg
atttttagcttcattccttcttttgctctgatcaaaggcttcttcttaccttctctctctctttcctcctctgcacatttctgggctcttctcttcttatgctctgttgcttttaacacacagcagaaacagctcacacctgccatttccttaaacaaaagtgaaaagagaagaaacaagtgacagctcaaacggacaaaaaccactcttgggtctttcttgcttctgattctttctcttctctaatagaagaaaacgtaagtcactctctctactctcttttttcacactaaagaagagaaaaaacgtgaacaaagaactgtcaattctctttccctctctgtttcatcttcttgaattctccaagattgagatctctctcagtctcttatgtgctctgttttctcctctctgttttcacttagttactaaacacaatcgattctttcgctctgttttatttctcagatctagaagctaaaaaaatgtcggaaggagtagaagcgatagtagcaaatgacaacggaacagatcaggtaaacggaaaccgtaccgggaaagataacgaagaacacgacggctccaccggttctaacctaagcaatttcctatggcacggtggctctgtctgggacgcttggttcagctgcgcatctaaccaagtaaaccaataaaaccataaactaaagattcaaaatttcggatttctcatagtgaagaaagatctgatttgtagtaattatcgttggtttcaggtggctcaagtgttattgacattaccgtactcgtttagtcaactaggaatgttatcactatagagaac

SEQ ID NO: 150018 - DNA, 3603 bp, Arabidopsis thaliana landsberg
  unsure (1)..(3603): unsure at all n locations
atggccgaaaggtagagcggaggcggaagaggagatgtctaagctcctccattttgtgtctgtatctccgaggctgaatatttcggccacaagcacgtgctcttgtgtctcccaaacactaatgatcttgtgagtgtttcctttgggatcatatccgaatcctagaggctgtttccatgcgttttcgtccccctgtgctggtnnnnnnnnnnnnnnnnnnnnnnnnnnnnnnnnnnnnaacggactattagaattacatctggttagaattagtccacccgagcttatagggtgaaaataagattgtgtttctatgcaaggataattccaaaggtgtcgatcttccaccttcaacacttttgcttcatcactctcttccagcatcgtcttacacatccacagcttataaaagactgctacatcatggactccataagtgagcaaagctggaggttcactgttaatgcacgaattaaacaaatacgggtgagtctctagggaaggtgaagaatcaatctctaatccacgagctgaacttgaagctgggcaatcgacgggctgagagatttgttgcgaactgaggacgtagtaggttgagggtgctacgaggcgatgtcgtttcgagctggttgttctgacgagctggctcttctgggcgagctggctggtcttgacgagcagacttctcccgacgagctgacttgtgctatcctttctccaggtgtcgaaaaaaagtcctctttcccgagactttctattccttatttatacccatccgtatagtagggtacgcaaggtgaattcccgagagtgccccttttctgcgcagccgaactcacatcttgaccaggccgggtttcggcccggtgggccggctcgagttctaaagtgatggtcggggctgggtcgttaatccttgaaatgggccggttgatcactgaggcccaattgatgtatcaacagttgtcccccaatccgatgttcggttgcggacgtcggatttaacagatcaccgaaactgacgcgcctgtggcttcgtcctattcgatgcagcgcgtggatccaacgtgccttctgattcgtgcacttggtttcttgcggattcggaagctgaagcggcgcgtaggtaatcattgcgcctactcggcagcgtgatgattacctaggtcatctctcgcctctataaatgtggaaacacgctcagttttctcaggattctttgcagccaaaggtactttcttcttcccttctctctattttgagctcgcaatttataatgccgtcgtcagatatttccatcgattctctctccgaccatcgtcgatcttgcaccccggacggttcttcagagtgttctggagccgaccgttttcgagccaaatctcttgatgacgatcttggcgaggcgggatattcttcctctgagtcgtcttcgcaaacttctgttgtggccgagctacagcgccgcatttcttctcctctagttgaccgggctgaaacaagtgctgcggcgacaaccactttcaagccccagcttacagatgaggaaattggtgatgaggatttcaaggaagccatagcttctggagagatcgcgatcttcgaacctcgatctgcggttgggggaggttttgaggacgatgttaaggagatgacagtttctgatgagattggtgtttttcctgctgtattcggccctaagcccggctcgactgactatctgggaccaaccaagacgtcagcttcttctatgaataccgtgcttcgcttttgtaacgcgccgcgtggttttgtggctcgggttccggaaacgcatgagcgtccttggacgactccggagggttatatgtgcgtctacgagaagtttctcactgagtgcggcttgtcgtttcccatcccgatattcttgcttggattcgtcgccaggagaaagatggcactttctcagctgaccgtcgcggcaattcgttatgctgttggattgattcgcttggcccatacgtttggccgacgggcgaagagaaggaacgcttatccttacacaagccgaagaaagctagaaaaactccaggtacgcgttttcgtccgaggtgattattcgtccgtgccaccttccttatgcgttttccttcttctttagcgaaaaggaagatgaagatgaataccgaagaggtcgggagttactcatctcgctacaaacgtcagaagacatccgcgccgaaggaatctcaggagaaggatcaccttccgagcggggaggatcggactgcgcattcagctgaggaagagagacgcactgcccgatctgagcccccgagaggtcaccagggcgtagtgtcgtgaacccggggtcgtctgttgaccgctccaaggagactcgggagaaggagctggccgcggctcggcagggaaagcagcgggaaggatctgctcgctctgttgttccaccgggatgcaacactttgattgttcatcctggttctgccaacgacccccatcgtaggcgatcctcgggggccattgaggagatccgtcctgacgcaagggtttcgaagcagcccgactaccgctgggagcattactactcgggtcgtgaagtccccataacctgcgacgcggagtcttgtgcggatctttttcgcaaaatcagctacgggctgattccttttcccgaggtcaaggaattaaaggagatgaaggcctttaccgacgttgcgaggaagacgttcgatgtatgtcttttttttttttttttttttttttgggccgagatgcttccttgactttttccctcttttctcgctttgttaggctgttggctcgatgaaccgtctggcttatctgtacgagcgtcgtttccgcaacatggaagtgctgggctcgcaggatcttcgtggggagctgagtgctgagaagaagaagaacgacgagctcctgaagaagttggagtcggcgagcaaagaagccgcgcaccttaagagcgaggtagcgacgttggcttatcagcgaaccgttatgggcgaggagagggatcattgcaccctggatctagagaaggagagggagtaaacggtcgagctggaggatcggctgaagtccgagaagaagaggcttcagtcccgtcgtgagaagtatgcggagaaccagacgagtaaggccttgattcatgttgctgacctctttcaagctcgcatgaatcgagtgaaggcccatctcgatgacaagctgaagatcaatcccaaattcctccattacaaccaagcctatgcgaacgtcgctaatttggacgagctggtagaggctgaggagatcgagatcaaatcggccgagctgatgccacgtttgattgcggatcgggatgccctcaaggccaaggtggagggttttgagatcaccgagatcgagaaggatgacttcgacgtctggacccttttcgagaaggttcccaaggaggagcatttcgagccatcggctagcggaggtcattctgagaccgaggcagaaaaagatgaggagacttctgttgaggatgctagtcagcggaagccgaagactcccgggcctcttcctgacgacccggctgctgccccggtgccggagtga

SEQ ID NO: 150019 - DNA, 845 bp, Arabidopsis thaliana landsberg
gcttcactctgttgaaaccaaggctcaagaaatgctgaagaacaatgagatcaccaaaccggtgctaccatggacttagcttgggttggggtatgtgatttcaacaacatctggtcattctatccatctatagagtctacaaatccgaactcactcacttcttctattaaattttcaacaggccacagctttaattggattccctcttatattcatcatcaaattgctttctgcagtctccaagtaagctttgaacatcattcaacaatagtctaaactttacttataagtttcaatctgttgcatcagaaagtacttacagaattgcatctaacagtcctaaggggaagaagagacacaaccataaaaaagaaccaaccaccgggtaccgcagagccaaacgccgacatcctcaccaatgatacaataggactataacttgaagagatcaaaaaggtttttgtgacttcacttaatcgatatatatatcattcgttttggttcctattaaaagatggttacttaaatggaggaaatatcttttgcaggtggtttgtatatacctttctggtttctgagacttataatagttaaatatctattggctgaagaagttgaagcagaggtgttctacaaaactataggtctctcttgactctctgtagtgacaaaatcttagaacaatctttttcagttttcatagtttatggttttttataaagtagagaagagaagaaaagaagagagttgtaaatcttctcacattgatacagatgtgattgggaaattttagtttgccatgttaatgtaaccaggcccagcccaattgtgttgggtacaagttg

SEQ ID NO: 150020 - DNA, 1506 bp, Arabidopsis thaliana landsberg
ggtatagagcttcacgaacaatctctctctctcgatagactcttgttacctctgaattactcggtgttggaacaatggcgtcgaatctcctgaaagccctaatccgatcgcagattcttccatcttccaggaggaatttcagtgtggcgaccacacagcttggcattccaacagacgatctagtcggcaatcacaccgccaaatggatgcaggtaatcttcgcgatcatgagtccttagttttctagctctttcgcatcccaaataaatctgtacgaggacttgtatcgtgaatttaatctgggaattacactaatttactcgggaattagtctcgacgatctcccctagggttagatcgtgatttggcatgtttacgatttgctgattcggtttcgtagtcgattcattctgctgaaattgtgttcctgtcatatgaactggaatttggaaatcacagggaattgttaatttctgaaaagtcttgctagtcagtcttgataactgaagatatttgtttcgatgttgaatcagtggtcttgatatctgttcgaaactgcttagaacttgttttggatttttgaggacattaggtttactattacatgggaaatttgtgaaagaaaactatcttagctaaaatctgttcgttgggaaacttaggcttccattcatgtggccatgtttttacatgtctttgactatcatccggtgccaaacaataattaaagccaaagggcttgagagcataagaggagtagaagaaaatattctcattcttttctcatgagttgtgctatctatattgctcattttaagggtataaccattaccttcatagctatggtcttggagttagttcctttggctgatgaattttgggcggtagaaaatcacgtatgttagtttactgttaactttatatttgttagtcaaatcaataagttggtttgagctttctcctttatgttgtcactaccctttgacaccagatcagcttaccctttttatcagtgcttgagaaaattgtgatgaagagctgattcatcacatactattcctagtttaagatggcagctctgctttcattgaaaactagtgatgtaatctagtgaattttttttgtttgctgagactttcaaacctgtatatataacataaattgcataggctctataccagtcctttctggtaaattatgaagtttctgtatcacattttgttttcttttgccacattcctacaggatagaagcaagaaatcacctatggaactgattagtgaggttccacctatcaaagttgatggaaggattgttgcttgtgaaggaggtctgtctcctcttctcctcagtcgctcaagatatttggtttagtgatcatataaatgggcacaacagaaattgatatataaattgacttttgtcttacttgcagacaccaatccggccctgggtcatccaatcgagttcatatgcctcgacgggaatgagcctgcgaaaagcaag

SEQ ID NO: 150021 - DNA, 1454 bp, Arabidopsis thaliana landsberg
atggctaacgcaaaagacgtgaaagacttcaaagaaacttttcagagatttgatcaatatgtaaacggagagattccatggagggtatttgacatgactggcgtacgcaaacgttctactccgatgaccaagtctgaaatcgacacaatatttgtagagcttggaactcgtggtgaagatagagtctttagagattccaagttttccggtaatcctcttcaagcttctgtctctcttaaacataagcctaaagatgtgattaatgtggtgcaaaaagagtcttgtgtctataattctgacaatgatgaaaagaaaacagagaattaacttcaaattccaaagaaggtctctcgaaaatatagtgaacgatgataaagattttgagttttgttaggtgtaagttcttttggttttggtgttaatcaagtttttaataatgactttgatagagcttttttctttctttgtgttaacaactttgatggagcttttgtcgtttaatatatctttatgttattatcttactaaaccataaagatttttttttatttacgaacgttaaatcagggaacaagattaggttctagaatatacttgatgacgcattacaatatgaattttggaaaatcaattttgttgggctgatgacaaaaaataatgttgggctgaaataggcccattaagaaacctcgacgtgcgagacgcgtacaccacacaagcgccacgtgcttaaccctccgtacatcttcttcttccttttgtaccacaaaatcaacaaaggcaaagaaaaagatctaaaacttgttcactaagaaaaaatcaaaatcaaaatcagagcaccaaaaccgactcagatctagatcggaattctccaatggctctcgaatgggttgtgttaggttacgcagcagcagctgaagcgatcatggtgatcctcttgacgatgcctggacttgacgctctccgcaaaggattagtcgctgtaactcgtaatctcttaaaaccgtttctctctataatcccgttttgtctcttccttcttatggatatttactggaagtacgagactcgaccttcttgcgatggtgattcgtgtactccttctgagcatcttcgtcaccagaaatcgatcatgaagtctcagcgtaacgcgcttctgattgcgtcggctcttgttttctactggattttgtactctgtcacgaatttggttgtgaggattgagcagcttaatcagagggttgagaggctcaagaacaaggattaagatccagcttcttcttccctcgtcgtcctcaggtcctttagtgtttttgctgttttcgaatttcgatgaaagagtctctttactacttgtgtcgttttagtttttttctgcgttctttttttcgatgtttgctctttgttcaactggggattgaaggatctataatacttaaaaatatatgcttctt

SEQ ID NO: 150022 - DNA, 1765 bp, Arabidopsis thaliana landsberg
gaaatccacaatatctttcttcacactttctttcactttcccgggaaaacagccgagaaaataaaagaaacgaagaaaagtttgttcctttgtggggatcaaagaagaatgtactcggcgattcggtcttcgcttcctctagatggcagcttgggagactactctgacggaaccaatcttcccatcgacgcttgtctggtcctaaccactgaccctaagcctcgccttcgttggacctctgagctccatgaaagattcgttgacgccgtcactcaactcggcggacccgacagtaagtgtctctttacagaaatttctggatcttggaatcaaatgtgttttgttttttaatctgttgttcttcagttagtacgaagaatttgacaacgagttaggtttaatttcttacaaatttggaagtcaatcatcctgaattagaatgggtttatgtcacttagaacaatttaggaattactgtggcattctttaggtttttttattggccttgagatttgtttacaagattgttttttttgtgtgtatgtttgttttgttgatgacagaagcaacgcctaaaactataatgagaacaatgggagtgaagggtctcactctttaccacctcaaatctcatcttcaggttttgatcctacttactaccttcaatatcaaattatgcttctttggctacttataacaaacaaagttcattgctttttgactgtgttgttctctgtttttttgctcggtagaaattccgcttggggaggcaatcttgtaaagaatcaattgacaactctaaggatggtattcagttatatctttagctaagaatccatttatatctttatggattcagttgtgcatttatatctttatgaacttatatatctctgtagtttcttgtgttgcggagagtcaggacactggttcatcttcaacatcatcgttaagattggctgctcaagaacagaacgagtatggttacaagtgttctctttttgttccaagtgttatattcactgtctataacactcattgtttttgtcttgagccaggagttaccaggtcactgaagctttgcgtgcccagatggaagtccaaagaagactacacgagcaattagaggctagtttcttcttcgaattcaccaaatacctgagagactttggttaatgagagactatatagaaacctctatagctaagacttgtgcctttgaatttcgttaaagcttatcagaacgatactacttaggaaatcttttgatgaaagttagaaccatagaaaccgcatatactaatgtctgagccatggttccacatttaataaggtccattagtatacgcaggtgcaaaggcgactccagctaaggatcgaggcacaagggaagtacctacaatcaattctagagaaagcttgcaaggctatagaggagcaagctgttgcctttgctgggttggaggcagctagagaagagctttcagagctagccataaaggcctccatcaccaatgggtgccaaggaacaacaagcaccttcgacacaaccaaaatgatgattccatccttatccgagcttgcagtagcaatagagcataagaacaactgttcagcagagagctctctgacttccagcactgtaggaagtccggtatcagctgcgttgatgaagaagagacaacgaggagtgtttggaaatggagatagtgttgttgttggtcatgatgctggatgggttatgcctagtagtagcattggatga

SEQ ID NO: 150023 - DNA, 884 bp, Arabidopsis thaliana landsberg; identical to SEQ ID NO: 67890

SEQ ID NO: 150024 - DNA, 563 bp, Arabidopsis thaliana landsberg; identical to SEQ ID NO: 7170

SEQ ID NO: 150025 - DNA, 1014 bp, Arabidopsis thaliana landsberg; identical to SEQ ID NO: 18853

SEQ ID NO: 150026 - DNA, 485 bp, Arabidopsis thaliana landsberg
gaacagccattactttagtggttctagctgctgcaggagccgctgctgcagctgttctatcttccaacccggaggttacaaacgagctgaagaacctggtggactcattggagctgcatgaatacatcaacaaatacactgaggttatctccacagctttgaagaagtaagagaaaagaaacaatcaaaaacctgaggatgatatagagaggtaactcttaatatcatcggtgtagagaattacttaaaagttaaagccttttactctccaagatacaaaattttgaacatcttgaccagaacttaggggttatggaggggaagagaataatgagagttttcgtttttataatcacagagtctgttcaaagttgttgaaggttttttttagactgtttaatttgtttctgagataatttatatttcttcttttttccctgatgacaataaagttatttctgtttattacatgtttgatttggatt

SEQ ID NO: 150027 - DNA, 1078 bp, Arabidopsis thaliana landsberg
ttatgacagttgagtaatgaaaggttagatggtgacgttcctgcaatagtgttggtttatcagcaagcgaacaaggaggtaatgacaattattctctctgctattttacagataagagaatatgatcatcttattcttttttgttaggttgctatcatttgtaaccatcaacgtactgtctcgaaatctcacggagcacaagtggagaagctggctgtgaaaatagaagaactaagggtataacataagcaaatcctagttaaatatgatcaagatacaatttcaactttctcactcccataatctttgtacttctctgcaggagcaaataaaagagctgaatattgatctcgacagggctaagaaaggaagaacaccgttaatgggatctgatggaaagagaaagaggaacttaacacctgaagcgtaatatctaaacctctcttcatatacattatttatcgcataagcatctcctttaaaacaactccctctttggaaaaacagattggagaagaagataatgcaaacgcaaggtaagatcgagaagatggaaagagatatgcaaacaaaagaagatatgaaaactgtcgcattgggcacatctaagatcaactacatggatcctaggatcactgttgcgtggtgcaaacgacatgatgtccccattgagaaggtaatatgtaaagagcttcaacaaagtaacagaattgcaaacacttgaaatttacttgtgttttgctattgcagatatttaacaagtctcttctggctaagttcgcttgggcaatggatgttgatcctgagttcagattctgttcaagtaccgatgaataaatacatgttcgttgaggccagtttcacctaactaccattcaccatacatttacagagatatagagagaaagagttaaaaagagaagaagaatgatagcaagaccctgtaaaagaggtttcttctctcttattagtaaaccaaagactaatctatggatgttttatagaaaaacagttacaattttttactccaataaataaataattcaggttaataatattaagaattatacataaaatg

SEQ ID NO: 150028 - DNA, 2138 bp, Arabidopsis thaliana landsberg
  unsure (1)..(2138): unsure at all n locations
ggtctctctctctgaagtggggctctctctctcgctttatatgtgactttcaaatcggccgagtcttctttttgtgaactctttcaaaggagctcagtattctataaacacctctctttgtttgatcgatttcacaagccctagtttcggcgatcttaaatctgcaaaaaatatatggcgtcttctcctggtaatactaaccctcacaatcctcctccgtttgatctcggtattctcttcaaaccttcatccaatccttatccgccgccgccggcatcttatcctcctcctacaggtccttttcttcacaaccagtacgatcagcagcactacgctccgcctggtatctccgctcaaccatctccggttactcagcagcaacaggatgtgtcttcctcttccgccgcgactaacttgcatcctcagagaacgctgtcttatcccacgccacctctcaatctacaatccccccgttccaatcacaatcccggtacgcacatcctcgctctccttaacaataccaacaacggagcccccgtggctaaccaagagccgtcgcatcagctcccagtagtcaatcacaacgagatcgctcgctcttttcccggcggttcaggtcctattcgtgtaccgagctgtaaattgcccaagggaaggcgattgattggtgaacacgctgtgtacgatgttgatgtgagattacaaggtgagattcagccgcagctggaggtgactccgattaccaaatacgggtcggatcctcagctcgtagtgggtaggcaaatnnnnnnnnnnnnnnnnnnnatttgctatggattgaaaggaggaaacattagggttctcaatatcaacacagcattgaggtctctgttccgtggccattcacaggttcatttactttttctctgtaatttgtgaattacttacttattcaagtatagtaggtactcatctagttctaactacggttatatatccagagagtgacggatatggctttctttgccgaggatgttgatatgttggccaggtaatgttttggaactgtcgtctaattaggctatgctatttgtacatatatggaagagtggctcattgaattcttctttgtttattagagtttttctggttagcttcttcgactttgtggtttatacctctatttttctgtttcttttaaacagtgttagcctagatggaaaagtttttgtgtggaaaatttctgaagggtctgagggagaggatcagccccaaataactgggaagatagtacttgctcttcagatactaggagaggaagacaccaaacatccacgcgtttgttggcactgccacaaacaggtagttgaacatatttcttttgctacgagaagttgcataagattcttcttagaacaagcttctgattgcttaaatgtcattttttcaggaaattttggtagtttcaattggtaaacatgtactgcgtattgatactacaaaagttggcagaggtgaagtattctctgctgaggctcctctccagtgtccccttgataagctgatcgatggtgttcagattgttggtaagcatgatggagaagtgacagatttgtcaatgtgccaatggatgaccacgcgtctggtttcttcttcagttgatggcacggtttgtgtttgttcatatcatcccttttctttaaacctctctgaaatgaatcattccaaacaacccaagtttatactgattacgttgcaaactgggtctaatcctgacatttttcgtaattagaactagccagccttgttagtaagtgcatttgacatccaattactattctagcacattttgaattttttaaggtttgctaagttccatttctgacatgcactgggtatcatctcttttcaaccaggaattattttgcaacagctagtatttctgtgtgtgtgagtcttactctttctttccttataaccatcgtacagattaagatatggcaagatcgtaaggcacaaccacttgtagttttgaggcctcatgatggacatccagtcagttcagccacgtttgtgacatctcctgagagacctgatcacatcatacttatcacggnggtagttttcttgaatcaatactactgacttttctcagctct

SEQ ID NO: 150029 - DNA, 944 bp, Arabidopsis thaliana landsberg
ggattttctccacgctatctatgaagttcaacctgcatttggagcctccacagatgacctagagcgctgcaggtaattttctttaatgagtgtgtggtggtttgacgaattggcatagttcttgatcgaatgggcctttagcattgatatgctgatttagccaaacttaattctcttcttttccgtgagtcatggtctgaaaacgcagtactctactactcatacatattttcttttgttttctgtctgatccaattgtatttccagcgacaatttcgcatgcatgtattgcattacttttggatttttatttgccagtgccttagtttttacatttctgacatgtatgtagactcaatgggatggtagattgtggtcatcggcataatcacatttacaaaagagctatgcttctagtcgagcaagttaaagttagtactagaagtcctctagtcacttgccttctggaggggcccagtggaaggtatcttccgtagttatagccacattattttggcttactgttttataacctgttgctgattgttttaacttttttgtctggacagtgggaaaactgctttagcagcaacaattggtatcgatagtgacttcccatatgttaagatagtaagtgtctatctttctttgtacagtatatttagtccgtaccctcttttactctttgtgtgatattgatttcttattttgtaggtttctgcggaaactatgattggtctttctgagagcacaaaatgtgctcacattgtcaaggtctgtccactggaaacattctacttcttgttattctgttctatccactgacaattggttttggtgtgaatgagaccaggtctttgaggatgcatataaatctccaatgagcatcattatccttgaaaatattgaaaggttattacctgctatttttattctacgttcag

SEQ ID NO: 150030 - DNA, 1595 bp, Arabidopsis thaliana landsberg; identical to SEQ ID NO: 9992

SEQ ID NO: 150031 - DNA, 597 bp, Arabidopsis thaliana landsberg
tgatgcagttgctgctagttacggtggattgatgtttggatggacgcagaaattttgatgtgggtttagtctaaaaggtgaagaacaatgctcgggaatcaatccgcggattttagtgagaagggggaagatgagatcgtcagacagctttgtgctaatgggatttgcatgaaaacaactgaagttgaagcaaagcttgatgaaggaaatattcaagaagctgaatcttctttgagagaaggattatctctcaatttcgaggtttgtttttgtggttttccaaactccattaaaccaacttttataagtaaatgattagattttatttgtttttgtggttacaggaagcaagagcacttcttggaagattggaataccaaagagggaatttagaaggcgcacttcgtgtctttgaaggtatcgaccttcaagcagctatccagcggttacaggtttccgtgcctcttgagaaaccggctactaagaaaaaccgtccccgtgaaccgcagcaatcagtttctcagcatgctgctaacttggtccttgaagctatctacttgaaacccaaatcccttcaaaagcttgggagaataactg

SEQ ID NO: 150032 - DNA, 999 bp, Arabidopsis thaliana landsberg
atgtacgttcgaattcggttaggtaacacacttacactgaattggacatcctatgtgatgctgccgcttatccaaccaaactcacatgcatgttgttgtgatttttaatgttcattaaatgcacaaaactcaaatcaaatcgaaaacataaaacattcttttgatcaaacaaagtttatatacttctttaccttcatctaatattcattcctcacatccacttatgtaacatagtaaatgcatgctccacatatgtataaacaaatatacatacagacacgcacacatggaaaatgcatacacatataaaagaatatgaacgtatcgtaaggttcgaagtaggccgcgcaattactgaccacacatatttgtatatatataaacatgcatgatgggagacagagaatagtagcatttatttacatatataagttggaggtgggtcatagctcattatttagttgaacgcgttatagaccacttgtatacaacatttctataggtaacgacatttctcacatactagttttttttttaagtttaattatatataaagttagttgaattagtaaatacaaaacataattgtgtgttaatttcttgctttaatttttccagctgcgaccggagctggatttattgcaagggacatcacattcgaaaactgggccggtccagcgaagcaccaagccgtggctctccgcatcggagctgaccacgcagtgatctaccgatgcaatataatcggttaccaagacacactctacgtccattcaaaccgccaattctttcgtgaatgcgatatctacggtacagtcgattttatctttggtaacgcagccgtcgtactacaaaactgtagcatctacgcacggaagccaatggattttcagaaaaatacaatcacggctcaaaacagaaaagatccgaaccaaaacaccggaatatcaatacatgcgtctagggttcttgcagcatccgatctccaagcgacaaacg

SEQ ID NO: 150033 - DNA, 1287 bp, Arabidopsis thaliana landsberg
  unsure (1)..(1287): unsure at all n locations
tgcatgtgtaccgtaccgtgcacgtacaccacacaactcttttcataaaagccctctatctttcaacaaacatccgattagagtagcaacaatagagatcaaacgtaactcacaaaatgctctcgtttcttatcccagttgtacagttttttcaggtggttatcgctgccgtagcatctgtagtcttcttagtgttcgccggtataaccttcggtgcctcaattgtgggactaaccatagccacaccgctttttgtcatcttcagtccgattctcgtaccagccactatagccactactttcctagtcggaggggctaccgctgcagttgccctaggagtgacggcatttgctctcatactttggctctttaagtaaaatttatttattcaatttactattattttttccatgactaaagttttttgaaaaccctattcaaaccctcgaggtgcacatctcatatatccactatttatcaaacgtcttacatatcatatattataaggcatgtgtgcatctacaacgaacctgcataatgcatgttttattggttctaatgttgaataatggatgttttcagcacacaaaaaaaatctaaatagtttcatgtacacttgtgtgtgtgatgtagacataggattggagtaaaaccgaagaacaatccagctccgaaaggagccccaaccaaagcagatcaaccgggagcgtcgggagataaaccgggagaaatgtcaggagcaggaggaccgtcggnnnnnnnnnnnnnnnnnnnnnntggaggaggagataaaccgggaggagcgtcgggaggagcgtcggcaggaggacctggaggagcgtcgggaggagcgtcgggaggaggacctggaggagcgtcgggaggagcgtcgggaggaggacctggaggagcgtcgggaggaggacctggaggagcgtcgggagaagcttcgggagataaaccgaaaggagcaccgggagataaacccgggggagcatcggggggtaaaccggggaaaaagccaggacataaaccggcgggagcgcgaggaggtaaacggcttgcgtggtggtaaggatgatcatatggagcaacttgaaacttaattattaggtttcataaattaaacctcatgtatccatctctttttagtaaatattaattaccgtagaagaaactacacgtttcaaatatcatttctattcatgtttagcatggtacaaagaaattaaccatgaaacaatgctttgtttaaatgaagtaattaatcggtactatagcatatat

SEQ ID NO: 150034 - DNA, 531 bp, Arabidopsis thaliana landsberg
gttgtgaaaatttatgggcgagtgatcggtgaaggaaaagtaggaccggtaacaagaagacttcaaaatgcttacaagaaactgacggatggttcaggtgtcccaatacctacttaccaagaagtcaagaaccttgaaccatgtgtttgatcgtagaacacgaatggtaaaccaggcttgttaaatgtgttcatctagattcgtaaactctaacaagaacgttgaacaaaaggaaccttattttggaaaaatgaaatcaacgttaacataatttcatcattggttttttatttttgaagtactgaaaaggttttgtgattgcaggaaaaaaacattgcatacgaggaaaacggcacgtatttcagaggaaagctgtggtgttttacgtttttgaatagaaagtgcgtgctgttttagctctcaaactctctcatattatgctgttgaccagttgtaccctgtgggtcaatgtaatcacagttggtcgcaaaccaagaaaagtcaggctctcttgtttacattcaaattttt

SEQ ID NO: 150035 - DNA, 2114 bp, Arabidopsis thaliana landsberg
atccaacaggttctcttaacaattggaactcatcagacgagaacgcctgttcgtggaacggtgtaacttgcaaagaactcagggtggtgtctctaagcattccaaggaagaatctttacggttctctcccttcgtctctagggtttctctccagtctccgtcacttgaatctccggagcaataggttttatgggtcgttgcctattcagcttttccaccttcagggactccaaagtctagtcctttacggcaattcctttgatgggtcattgtcggaagagatcggtaagcttaagcttcttcagaccttagatttgtcacagaatctcttcaacgggtcgttaccactttcgattctgcaatgcaacagacttaaaacactcgatgtcagcagaaacaacttgtctggtcctttgcctgatgggtttggctcagcgttcgtctctctggagaaactcgacctcgccttcaaccaattcaacggctccatccccagcgacattggaaacctctccaaccttcaaggaactgctgatttctctcataatcaattcaccggctcaatcccacctgcccttggagatcttcctgaaaaggtttacattgatctcactttcaacaatctctccggtcccattcctcaaaccggtgctcttatgaacagaggaccaacggcgtttatcggcaacactggtctatgcgggcctccattgaaggacctttgccaaggatatcaacttggcctcaatgcctcttacccttttatcccaagcaacaacccacctgaggattctgatagtactaactctgaaaccaaacagaaatcaagtggtttgagcaaaagcgccgtcattgccattgttctctgcgacgtgtttggtatctgccttgtgggtttgcttttcacttactgctactcaaagttctgcgcttgtaaccgcgagaaccagttcggagtcgagaaagaatccaagaaaagggcttctgagtgtctgtgtttccgtaaagacgaatccgaaacgccatctgaaaacgtggagcattgcgacattgttcccctcgacgctcaggttgcgtttaacctggaggagctgctaaaggcgtcagctttcgttctggggaagagcggaatcggcattgtctacaaagtggttctagagaacgggctcacactggccgtacggagattgggtgaaggagggtctcagagattcaaggagtttcagacagaagttgaagccatagggaaactaaaacatcctaacattgctagtcttcgagcttattattggtctgtcgatgaaaagcttctcatctacgactatgtttccaacggtaacctcgcaaccgccctccacggtgagtcactcttttctcatttcaagatgcattattcagttacatcatcgtaaatgtgtgtgtgtgtatgtgcaggaaagccggggatgatgaccatcgctccgttgacatggtctgaacggttgaggataatgaaagggattgctacagggcttgtttatctgcatgagtttagtcccaagaaatacgtccatggagatctcaagccaagcaacattctcattggacaggacatggaacctaagatctcagattttggactagcacggttagctaacatcgctggaggatcttctccgaccatacagtctaacagaatcatccaaacggatcaacagccgcaagagaggcaacaacaccatcacaagagcgtatcttcggagttcactgctcactcttcttctggatcctactatcaagcacctgagactctcaagatggtaaaaccttcacagaagtgggatgtttactcttatgggatcattttactggaattgatagcgggtaggtctcccgcagtggaggtggggacatcggaaatggatctagtgcggtgggtacaggtatgcattgaggagaagaaaccattgtgtgatgttcttgatccttgtttggctcctgaggcagagacggaagacgagattgttgctgttcttaagattgcaatcagttgcgtgaatagcagtccagagaaaaggcctaccatgaggcacgtttctgatacgctcgacagattacccgtggccggcgattga

SEQ ID NO: 150036 - DNA, 5440 bp, Arabidopsis thaliana landsberg
gattgccgtagatatcactaccatccattccttgaattgaagttagccgatttctagcaattcgattcttcgtagaagcatgaaagaaacgtgtattgaggtctccttcattcatccattgtattcgacatttcaatttccagtacatctcttccttgagataggccaaaagcagttctcttctaagttgacggagttgttcagttgatacaaggaaatctgtgcttgcttcatcaatgatcataaccagttccttaatccgtttaacagagtttgtgttgtttgttctcttccaacttgaaatgtacgatctgcagtttctaatcctttttattacagagcatcgataagccggtgtattattccaagcagcttcaataatcgtttcgacctcagggatgttacacaatcttgagtcaaagtggaacatgcgtgtacctttttctgatgttttccggattttgatgattgtaggccgatgatctggttcaatcacttccaagtattcaactttagaagcagggaagttagctttccattgatcattagccattgctctatcaagccagcattcaatagtgtgagttttcctttttccaacccaagtcatattatttcctgtgaatggaagatcagagactttgaaggtgctaccatgttctgaaaatcaacaaaactccaattttgtcttatacgacctccacgtttttcattggcattgagtatttcgttggagtcaccacacattagccaaggaccttgtctagtgatcacaattctttcaagtctttcccataagatatttcttaactttctcataggatggccatagacacaagagaaataaaaagacgcatctttattacttatcttacaatcaatgagtcttgcatcaaacgaaaagaaatttacagaaacagatttcttccacatcaatgtcaaaccacccccaatgcctaaaggcgacacacacttcacataatcctattccaactgaactgctacatcccgaactacatcatccgggttctttgtctcgagcaaaaagagtaagtcaggggaatacgttgccttaatccctttgaggcgtcgaactatcagagacccttttaagccttggcagttccaaaatgttgtattcatggcggctccggtagcttttggcccatcgtgccctctcggtaagtgtgtggggtggtcgaagtggttctcccatggttgctagttgatataaccctatttttactggttttagctatgatgtaggtataggtattagagttcttttgttatttctagagtcttttctagtctttttcaggtctttacatgtttcggattcatttggagataatggagcattctggaggaaaacaaagaatttatgctgctgatgaaatccggagacaaaaatgcacgtaggtgtcgagcgacaccaatacgtgacggcaatttcgagacgcaacttattgatgttttgaagatttccaaattcggccctgaactttctcctatgtttaattaaggtccatcacgtttttaagacatatatatagtttttaggtcattgttttagaccctaagctttgggaggctattccctggatctcttttgtactttgggagcaaaaccctgtgaaaaatcccgtttggatctttcttactctcttctcttgttattttcatcattaatttcttattcggaatatgatttgtgtttctttgatcatgtttgagtaatccacttgttaggtttagggtttatcattagggatttagatgatttagtagattgccctcctgctaggttatctgtaggattcttcatcttgattaatcttaatgctagttttagagtagctaactagaacttgatattagatgataggtatgcccaccataggtacttgctatttgaactatcatagatgagcctaggcatttaagaaagaacatgtaggctcatagaagggctctggtttagatactaggtgaactaatcaagcttattaacaatgcatgctttagcataggatttatcggcttctctggttatcttagctttaagtatagagagtttcgcggaacgccaccggttactctataatcatagtttgagttcgagaacggtgcgttaacaatctttatattagctagatctacaatttatctatctccctagacaattccttagacccgacgctttaatcaattgaatctacaactcatttacttgattatttgtctttaacattcaattacttcatttagcttattaaacaacatcataagtctattttgtgaacatcgagagctcagtggaattcgacccttaagtgctaacgacgatctcttatttgagggagtaagcttaaggcaatttgagctatatcgctattgttgattctttcttcatatgctttgatttgtccaacaatgtcttcgaaacctataacttttaactcaagtacttgttccaaggcagccacaatttgtatgtatttgtctcttggcaagctattaagaaacttcttcaccagtcttgtttcctcaattgcttggccaagagtcgatgatttagatgacagctgcgatagcctacttgcaaaatcatcgactgtctccgtatccatcattgttatcttctcaaaataagacatcacaatactcaaacgtgcttccttgacacgttctgctcctacgtttcgactgataagtgtgtattttgcatgttttgagcatcaatttgtcatcactttagcatcatatcatcactgttttataccatttcacatcatttgtcatcactttgcatgtttaggatagttttgcatgcatgttgcatatttgcgttgatttcaggtgatttggagctgttgacgagctatctggaagaagcggaccagatcatgacaaaccactcgacccagaggtcgagtaggagcttcaagacctcaagagaccattcgaccaccaggtcgagcagaggacatcaccacttcacttcaccactcgaccccgaggtcgagtgccctcgtctccatcactcgatcgcttcactcgaccatgaggtcgagtgtcttcacctccatcaccagacaaccactcgacctcttcactctacctagaggtcgagtatcgccatcacaccactcgactgcatactcgatgacaagctttagagccttcttcattccgcactcaaccagacactcgagcacaaggaagaaaagaagactccagctattcactcgacctctcactcgaccacctgggtcgagtacagttcttaatccgtccaaatacttcgtcgttttgagtattagggtttcgggatatttggctataagtagcatgtacttctcattttcgaaaaagaagtttttaacctagttttatttccgcagccttgtgttctagactttttgtaatccggatttctctttatcaattcagtattcagcttctgttcttgattttcgtttactagttgttcattctgttatcatactactgttacactgctgttatcatgtcttcaatctgttcaacgtttatgctttctcttatgatgtctgagtagtgaataggtttctgaggatgggttagagtagtgtagaattctcagtatgctaggtgattgagtattgattgatagatcccttctggattagttgttcttaatgcctattgctttctgatcaactggaatttgagcccagacatttccgcgcccaaaaggtgttcgatgaaatgtctgaaccactaattccagagattcgtgaccctgtaccaaggtattggttgcagggagcgttttggctttaacttgttgattcgtaatgcctgttaggttagctctcgtcaatggtgattgagtctgggactaggttagcttgagagtctctgttgcggtggcacttagatttggttaatgaacttgttgtctagggttaatttattgagcatgtcaatcacctgtaaactgaggaaacgacactactcaattaccccatccttaggaattctttgtctgattgattttatagtttactctactgctgtttactccatcctgtcatatgttgcttagtttctacaattctttactgttactcgaccttgtactcgactacccagttgtctgaacaacagactgtgcagtcgagtatccctatttcattttctgtctgttactcgacctgtcactcgacctcacccagtgctcagcaaagagctgtgttggtcgagtgtttcactgtttctgtttgattttctgttttctgcatgttcatttaggactgctagaacacaccaaaacctgttatgcttggcttgacttagtgacttctgatcacatcttgattgttagcatcacacccatttggattgacaacctaaaatactacaacgacatgattggtgttttaggataattgacttaaaagcctactatcaatttggcgccgttgccaattgggtgtttgttgttacatttaagatttcagacttgcttagatcaaattctttttaattttctttttagttactaactgtgtgtttttcttgttgtcttcttgatccaggtacacctctgctgtatgcgaactcgatcaacaagcaaccagaacctctttttcaacgacaacatcaaccgcacagcccgcgaaatcagaaaaaggagaaccacagtcaacctagtacctcagcaaccactcgttatggctgaagaacggaatcaacaaaatggccctaccaacattggtgctggatatgcaccacgtgatcaccgtcagaggaaaagaggaaaggaattgcacctcctcaatccagaacaacaacttcgagattaagagtggtctcatctcgatgattcaggggaccaaattccatggtctgccaatggaggatccactcgaccaccttgatgaattcgataggctctgcaacctaacaaaaatcaatggtgtctgtgaagacggattgaagctccgtttgtttccattctccttgggcgacaaaacacacatctgggagaagcatctaccccatgactcaatcaccacttgggatgattgcaagaagggttttctatcaaagttcttctccaacgccagaactgcaagactcagaaatgagatttctggtttttcacagaagactggcgaaaccttctgtgaagcatgggaacgtttcaagggttacaccaaccgatgccctcatcatggcttcacgaaagcctctctgctcagcactctttacagaggagttctaccacgcattaggatgcttctggataccgccagcaatgggaatttccagaacaaggatgttgaagaaggctaggaattggttgagaacctggctcaatcagatggtaattacaatgaggactgcgacaggaccgttagaggcacagctgactccgatgacaaacaca

SEQ ID NO: 150037 - DNA, 1470 bp, Arabidopsis thaliana landsberg
  unsure (1)..(1470): unsure at all n locations
agagttttaccatagacaaacgccttttattcgtcgtggcgaacgaaaccctaatcatcacttctccacttttgttcgtcatcctcttcaaaatttcttcaatttgattctgcaatttccttaannnnnnnnnnnnnnnnnnnnnnnnttcttcttagcccgccatggatgctcagcgagctctgttggacgaactaatgggcgcaggtgagaataatcgagtaccaaaatctattttcaatttattctccaaagctttaatttctgtattcatgttaagaattgagcgaatttttgttgaaattgctctcgattttatttgcagctcgtaatctgacagacgaagagagaagaggattcaaggaggttaagtgggacgatagagaagtatgtgcattctatatggttcgattttgtcctcatgacctctttgttaacacgaaaagcgatcttggttagtctcactatttgtatctacttgcttttttgtatgatgcttttctttagcttatcttaagcttcattgttgttttcaggagcatgctcgagaattcatgatccaaagttgaaagaaaggttagtcttcattgagatcttcttcattatgtttatttgatttgttacaaatctgaatcgattcgtgtgaaatgtggctaccttgcatgtttacgtccaccgatgttatgcatttatgtgagtttgttttgattttttctgtttcagctttgaaaactctccgagacatgattcctatgtgcctaaattcgaggctgagcttgcacagttttgcgagaagttggtgtgtaatgcttgtcataccttttttttgtttttttcattagagtctgattcttctctatactaaattttggaattggttacaggtgaatgatctagataggaaagttaggcgtgggcgagaacgtcttgcacaagaagttgaaccggttccaccaccttctctatcagcagagaaagctgaacaattgtctgttttggaggagaaagttaagaaccttttggaacaagtggaagcacttggtgaagaaggcaaagtggatgaagctgaagcgctaatgaggaaggtactatttgtttaccatgctctaaaaagaggagttttgaagttttaacaaatcattactgaactttggaatatggtgttctgcttgattcgtccgtatttgcagttatacccgatgtgacacatttactatgatcataaatttcgtacatttagtgcttatcttttgaaaactctggtaggtggaagggctaaatgctgagaagacggtgttgttacaacgaccaactgacaaggtactcgcgatggctcaggagaagaagatggcattgtgtgaggtttgtggttcatttcttgtggctaatgatgcccttgaaagaacgcagcttcatgtcactggaaagcaacatgttggctatggcttggttcgggatttttatttgctg

SEQ ID NO: 150038 - DNA, 400 bp, Arabidopsis thaliana landsberg
gaaaattgttcctctcaaataaaaaagagaaagagatccaccggaaaatatggcggagatgtcttaccttcagatcgacgatgctaacgatgccgttttcaaccattaccgccaccaacggcggctacatgatcacctgagagatcaatcgttttctcagatcctatatccgcttcctcactggatccaatcagacgacggcgatctctacatctctgaaaccgatttttcttccggcgacgtttcggtgtccgatctagtattcacgaccgacgacggtctcgatcttctcgatcggcgtagctttgttatcgatctgttccaccaacgcgttgagcaatctcaggtaactaagcttgataatgacggaatcgatgatttcgacaattgcgatatgcgt

SEQ ID NO: 150039 - DNA, 318 bp, Arabidopsis thaliana landsberg
tgacagggcatttcggtcggttattcctagattccgacaaaggtgcctctgtggcttgcagtggcactgacgaggagaggaaaatgcactttccggcctccggggtggatgtctgttggtaagacaatttcaaatttagcagataaatttctaatgttaacgaacattaggtgcttaagtgttaactgtttcttgttgcttctttgtttgtgaactagataatttgactcagatcttggaagcagaacgtgaatctcagtcgacattccaggcattaccatttagttacgtggagattgccagactactttttgacca

SEQ ID NO: 150040 - DNA, 476 bp, Arabidopsis thaliana landsberg
tcataaaccacaaaccctaactattaaaaagaattttttaaaatcaaagttctgaacttctgatcaatttcgaaatgttatcgttaatcatcagaaggtctccaagcagattcatcatccatggaatcaaaatttcttgtaactctctgtcggctgtagattcaagttcttcagttttggtttctagaagaaccttcagttcaacacctgcgttaagctattttggattcaattatggaaaaatctctaatttgaatcagagatttggtaattacgcttattctgggagtagtttcgcttccagtactcgatcattgagctcagaagctgtagctgtggcagcgacttgtgatggacttactgtggaacgaattatagctaatcagtggccgattttagatgagaatgaaggtgattggaagagtcacgctgcagcaattgcacagtctattcaagtcatcaagagacgattacag

SEQ ID NO: 150041 - DNA, 1885 bp, Arabidopsis thaliana landsberg
aaatcgatctgaggggttttagaaagaaaagaagaaattcgggagtcggagaaattgtcgggtggatcgatgaatacttgtcagtttatggataagcagataatggatctatcttcttcttcatcttcaccttccactgatttcatcgatctgatgaacaatcatgacggcgatgatcaccagaagaagcaggtgatcggcgataatggattggactctaagaaagaagtgatcgttcctagctatgatttccatcccatacgtcccaccaccgccgcacgattgtctcactcggctttagatctcgccggatccacgactagggttaattggtccgcctctgattataaacccgtttccactagttcgcctaacactgtacttactactacttctcgaatcttcctctctttttttttttgtacatgattctacatcataagcctataagaggacttgtctatttctgattgatttgtttttttttattcggccagaatttttggatcccctcgagtctactgaaccttccaagttggttcctgacaagggtcaaaatgtgtttaacacgactattatgtccgagattatagataggacaatgaagaaacataccgataccttgcttcatgtaatggaaggtgttagtgcacgtctttcacagctggagaccagaacccacaacctcgagaacctggtggatgatctcaaagtttctgttgacaatagtcacggcagcactgatgggaaaatgagacagcttaaaaatatccttgtagaggtaactttgctgattgcttttcgaaactagaatttatagcttttcctggcaactattgatctttcttatacagaaattttctcatttatgaacatgtcttttcttgaaccaggcttataatactttttgttgatacttcagttccttctttatgcgaattgtgtgcaggtgcagagtggtgtgcaactattaaaggacaaacaagagattctcgaagctcagctttcaaagcatcaggtatccaaccagcatgccaaaacacactctttacacgttgatcccactgctcaatttcccgcaccagtccctatgcagcagtttcctcttacttctttcccacagccaccatcttccactgctgctccttcccagccaccttcctcgcaactaccacctcagctacctacgcagttttcttctcaacaagagccgtattgtcctccgccttgtcatcctcaaccacctccatcaaaccagcctccttaccaagctcctcagacccaaacgccgcatcaaccatcttaccagtcaccgcctcagtacccccaacagccaccaccatcatcaggctacaaccccgaagaacaaccaccatatcagatgcaatcttacccgccaaaccctcctcgtcaacagccacctgctggttctgccccttctcaacagttctacaaccctcctcaaccacaaccatcaatgtacgatggagcgggtggtagatctaattcaggttttccgtccggctactcgtctgaaccttacacatacagtggttcaccaatgttctcggcgaaaccgccacatataaatagcagtggaactggttgcccacatctctcaaattcacgtcgattgccacacgctttgccaatggtttcagccgtcagcagcggtggtggctctagttcccctagatcagaaagcagagccccaatcgatgatgtaatcgacagggtgacaaccatgggattcccaagggaccaagtcagagcaacagtgagaaaactgactgaaaacggccaagctgttgacctcaacgtggttctggataagttgatgaacgaaggaggagctccacctgcaggtttttttggtggtcggtag

SEQ ID NO: 150042 - DNA, 1561 bp, Arabidopsis thaliana landsberg
ctccgttcactcgtcggcggagtttcccgtttagtgctcttcctacgacgaaagccatagacgcggcgttaatgaaggagaaatggttggattctctctctctcacctcacaagacgaagatacgactccggagaatgctgagtcgagctgcatcattgggattgaccctgatttgtctggtgcgttggctcttttgaaatttgaccacttgggttcttcttcttctgctcaggtcagtcactactcagtagaatggtgaaagtatgggtttttagggtttttgtcaaaagtatatctttacaaggttatgtgaatcatatgtgtagaatcagacttattaccaaagttggtttgtgttttgaactttggttcttatgctcaggtcagttagggttttagggttttgtgaattgatttgttgatgtaattcttagaatttttgggttacagagattatctatctttacaaggttcgtttgtaatttgtgagaagaatcgagaatgtgaaggaatctgtgaatcgttcatgttgctttgtttggttcaatttgaagtaggtttatgatatgcaagaactcatgtgaatcagttttgaacaaaatcagagttattaccaaaattgattgtgtttttttttttttttttttgtgtgtcttggttcaatctggagtaggtttatgatacacctcacattccagttttagttgggaaaagagtaagaaaacgtttggatgcaaagtcaattgtacaattgattcagagcttagatgttccctcaggtaagaaagatctctctttgttgttgtgttctttaggttagatttttagaaataacttaggtcttgtgtattcaacaatgtaggaagcagagtgtatatagaacaatcgaatccgtttcccaaagatggaaaacaggtttatgctacagcacacattcgtttttcttcagctatggtgtgttttattcgttaaaactgaattttttgtgtttgtgtttgtgttttagggttggtatagtggaggatttggatatggattatggataggaacacttgttgcttcaggcttttgtgttattccagtttctgcatctttatggaagaggcattttcaacttgctagcggaagttgcacaaaggtgatttattgatcttttactgtcaaacttttgtgagttaaatacaagtctctcgaatgctgacaatgtttatattctccgctacaggacgatagcagacgagttgcagcggagttgtttccatcgcttagttcgcaacttaagaggaaaaaggatcatggtcgagctgaagcactgctcattgcggcgtatggtgaagcccttaaaacagagaaattgttgatccagccaaaggaattgctctctcaagttaactacttagaaaaccagttagtggaggttaaatagtgtttcagttttcttggctctcaactcattaatcaaactattacaatttggagtctattcctaactctactaattgtatttttgctaaaccagttagtaaatcttttttaccagttagcaaatccttatcaaac

SEQ ID NO: 150043 - DNA, 940 bp, Arabidopsis thaliana landsberg
attttatttaaatttatttctaagatcttcgcatttagaaaaattgatgttaatgatgcaaatgagaaatttatttgaacaatgattctcttattagctgaggcgaagcatactttaaaaaattgaactttctcattacaaatcgtttgcatatagtgttttgcatattgtagtgtaatatattttgtggttaccaatgcacgtcgatacctttatgtaaatgctaaacattaggctagtataaaataatctcatttttccaaagtattcttaacatgattaataacaaaaacaaaatatatcaaaaatgattaaaataaaatatagaaaattcagaaagtgtggcaagaggattaggtaaagacccgacccgaacccgtttaagagagtaaaagacccacccggtaagagagttctagaccacttggtgcaataaaaagagaggagtcagtctatctctttctctctactgcaatttttagggttttatcctccgaaagtctcaaccttttctcttatcctcaacaaggtatcatcactctctcttcactttagctatctactctctctcctcactgtataagggttcacaacgaggtttgaaatttgggtggagaaagtaattgagttcgcttaatagtggttgggttttgctctaaatttgctgaatctgggtgaaagcttcatttctgcccatttgttgatctgtctctctcagtttcatattgattgagaattatgtgtgtgttttgacgaatagcagaaatggcggccactcaacttacagcatcaccagtgactatgtcagcaaggagcttagcctctctggatggtctcagagcttcgagtgtcaagttttcatctttgaaaccagggacccttagacagagccagttccgtcgtttggttgtcaaagctgcctctgttgttgcccctaagg

SEQ ID NO: 150044 - DNA, 1675 bp, Arabidopsis thaliana landsberg
  unsure (1)..(1675): unsure at all n locations
tggagttacccaatttcgacgttgaacacaaacccttgcttctctcttctctgtttctctctcgcagcgaaaaatcatggcgattagctccttcaagcatgaacatcctcttggttcgttttcgatttaaacctaatcgatcaatcttgttgatctttgtgtatctctctctcatcgtagggatttttttagcgactaggtttaaaaattctcaaaatctggttacgtctatttcaattgcttctgagtttgcatgaattgatccttgattctgatttccaacgatttcaattttgattgcgttaacagttataagaatccgcaaaattatatgttgaatgattttatcgccgattctgtattgtttcgtgaagtagtatgcataatctttgattgaaacaagttttgtgtttattgatgcaaatacattatgatctttattcaagtggagatgaatattgatgttgaagttactaagtttcacttgtctctcttgtgttccgtggtcgagtctctgttgttcacggggcgtagaatcgctatttcagtccctgtacataatctttgattgaaacatgttctgatttggtgctgcttttgctgaggaagcaaaatacattatagtctctgttcaagtggaatcctaagatattatcactgagtatgtgttgttcacgaggcttagaatcactattttagtccctggagcctggagtagtagtgtacataatctttgattgaaacatgttttgattttgttctacttttgctgaggaagcaaagtacattatagtctctgttcaagtggaatcctaagatattatcgctgagtctgtgttgttttacgtgggttagaggatgttgatgtgttgaaaattgatggatctgtgttttttttgctcttgaatgttacagaaaagagacaagctgaagcagcacgtatcagggagaagtatccagacagaataccagtatgaattttggctattttcatttaagaaaattgcatagctnnnnnnnnnnnnnnnnnnnnnnnnnnnnnnnnnnntgtcgaaagagccgagaagagtgatgtcccggatattgataggaaaaagtaagtccttacttctcttgaggagttggatataatctctttcttctcactgaaagtggcttcaagcccttttctgagaaccctacactccctcacatttagtaatgaattggttaattggatagaaataatttttttttattgaaagatctggaggaatttctggttttcatggtttgttgcttagggataatgaattggctgacttactattcaaaactttaggtacttggtcccagctgatttgactgttggccagtttgtttatgttgtacggaagcggatcaagctcagtcccgagaaagccatcttcatttttgtcaagaacattctaccaccaactggttagtttcaaacacgttccttaatcatatacttttccagttcaaggaatcatatctttttctcagttgagctaatagtagtagtgttatccttttattgcagcggcaataatgtctgcaatttatgaagagcacaaagacgaagacgggtttctatacatgagttacagtggtgagaacacgttcgggatcttcttctaatgcgcttggaatatgtggatgcatcagattatca

SEQ ID NO: 150045 - DNA, 244 bp, Arabidopsis thaliana landsberg
atttgcagacttactggtagaaccgaccacaggaaattactatcctacaatttacttcaatgagttttggctgctaagggacaagttcattccagtcaatgagacagtctcagaactaccactaaatctggaaataagtcccataagcatgatgaagtggcaactgtttcagcaagttgatcaatctttccagatgcagcgtagctatggaagcatgcttgacggtgaatctgacgaactaaag

SEQ ID NO: 150046 - DNA, 3056 bp, Arabidopsis thaliana landsberg
  unsure (1)..(3056): unsure at all n locations
gtggagaaacacaaaagagatctcattgaagaaaactctcaacatttatctaaagagaacgtaagtaagagagacatacatcatcttccctaagcaaagattcagggacgaatctgtttcacaacgaaaacaaagaagaaatagttcatagtcatataatcaatcagctaaaccaaatggaaactaagtaatgaactcactcagtctttcccggagtatggtccttggtggagtcagacatatcacaacccaaaagccacctacaaggtttgaaagtcacagacaaaacaaaagtctgaaactttttttggagaaatattaaaggttgaaactttcacaaagccttaataagcagagagattgattcgaactcaaagcaatcgtttcctatatctaagttacaattatagtccaaattcacacacacacccatataaaaccaaaaggagagaagtggaagaagaagaaaccttcttttgagacgaatttgctcatcttgatccctaatctgtgaaagtatcgaaccaaaatcagtcttgaagaaaactgaattattatccattgccatcttcttcaaggaattggaatcgactctcctttgaattgatatcgattttggtctgtttagtttgtcttgttcacttgttctcgtaacttaaaccgggttcgaagaatttttattaaatttttgagtaaaccggcttattaggtcaatacaaaaaagcccaatggacttttaagtttatggcccaaaatataacaaacgtatccgttctacttctgaaactaacctaaaacgcagagtgtgttgaagacgacggagacggcgacggcgagaagcaatgacgactgaggaaaataaaacaagcagaaataggaagaggaagagacagagaaaccctaaaccttctaaagaagaacctatcgagacgacaccgaagaatcaaaacgagaaaaagaatcaaagagataccaaaaaccaacaacatggaggttcttcagctccatcgaaacgacctaaaccttccaatttcctcgatgcggttcgttcgttatctctctctttctatcgagtacatttgattgaagtttatggagattttgatctattcatacgaaaaatcgcagcttagagagagattatctggtgggcaatttaggatgctcaatgagaaactctacacttgctcgtaagttctaatttcattctttccgatgatcttccttcagttttcacagtgcttaattcaaaaatctctgctttctcagtggaaaagaagctttagactactttaaagaagatccacaaatgtttgatatggtaaacatacattaactcgagaacaagaacttatgttgttgattcttttagttgaattgtaaaattgattctgttttgttattagtatcatacagggtatcaacaacaaatgtcaaattggcctgagcttcctgttaactccattattaattggctattgtctaatagctcttctttagttgtggctgattttggctgtggtgagaatttcttatcctgtattgctatatcttactttttgcctgctgaaattgtatcactctatcgacactaatattgtctcnnnnnnnnnnnnnnnnnntaaaagtgtgaagaacaaagttttctcctttgatcttgtctcaaagaacccctctgttattgcctgcgatatgtcaaatgtacgttgaatctttactccattcatgttaatttcatgatttctttgttccctcagacttaactggtatatttggggtttactttgtagacttcacttgagtcttcatcagtggatgttgcagttttctgtctttcattaatgggaacaaactattctagttatatcaaagaagcacatcgagttcttcgtccaaggtacagctttgtttactttccaatctcttcttgttcatgggattttgtcatgattctgaataatacttcctatggttttattgtattccacagtggtatgcttcttatagcggaagtaaagagcaggtttgatccaaacaatggaggagcagacccaaaagactttgtgaaagccgtttgtgatcttggatttacttcggttttnnnnnnnnnnnnnnnnnnnnnnacactcttcttctttttttcatttccactataagaaagaaactcatttggttctttgaacaggacttctccaataagatgttcatcttattccatttcaagaaaaaggttagtgaaacatacttcctttcaggtttgttattagtctcgtagcttagatctacactttgtttagcaataatccttcttttaatcgtgtggttatataggagcagatgaattcaaatcagaagataataaagtggcctgagttaaaagcttgtttatacaaacgtcgatgatgagtttacaatggaagattactcagaatactatttttgttctccactgttgtatcatttaggcacattgattgtcctcaaaatctcataaatttgcaccctataaacttttgtaagagaaaagcaatcacagatttttcaagtgtttagatacagattttcagatttttgtcaacatagtgatgaggttcaggtaaagtgagatttaggccgtgaatcgtgaatggtgtggtgacgcattcccctaccctctgcaactgcattttttaagttttaactagtcattcaagtttctaccaaaatttaagttcaaagtgtaaagtaattataacaagtatagcctaattcgaattacaaagatcacaacacaccctcatttgtaaccatgaatcccttacggctttacctttcactattctaaaagatcgctcgtaatcatcttgttgttacacaatacaacattcagtctctcactttctattctggcctctgggaaaccaaaaccacattgattgaaaatctctaaacttttgcaaaacacttctttcatttatggagagatgcataagcaaaaaaatcccttacctctacaaagttagaccaaatgttaagttagaccaaatgtttttcttgttttgttacagatgatatga

SEQ ID NO: 150047 - DNA, 1493 bp, Arabidopsis thaliana landsberg
atgttgggctcatatacacactttaattccgacatgttgtgtactccagatcggacggccagcttggcgcactgggtttatgtcatgtgggtcccacgtatgattcgcaccatcttcattattttttctctttctttatctttaatgtttttttttttcctgtgtctgtagaatcatttcgtccactttaatcattttcgttgatacagcttctcccggtaataatgtcggcggatttctccgtcgcactctaaattctttaggattttgtttctcttgctcatctgtaactcaggcaagctctcgttggattgttttaggtacgctttaaatattgattcgagtcgcttctctctgttttcattaattttgttttttcaagaaatttctggacttgattagatgagattgttgaattgtgaattgagttttgttcattgttttttcggtagatgaggttagaataacactatacatcagttctttcttttgaagtagtgagctgaatctagttctttagctgttggaaattttcagatttgtgtctctgatgacagagaatttgatacctttttttttgttgtgaaatggatttaggcatgaatgagtcagtccctgattctgtggaagacaatggtaattcagtccctgcaaatggattattagtattgcctgataatgatcatgaggaaggaggtgttggatcacctcaacgatcgaacaacgttgaatctcctggtggatcagtacattctacgaggaaaggttttggtttgaagaaatggagacggatcaaaagagatggtcctgtgagagatgaggctgctcctgttgatgatggtagtaagttactgaaacgtggattggctggtttggtgaatcctccttctaaacatgtagaattttcttcagttgaagcaaggcagagtagtgaaggctctgttgggtcagtgaatatggtgcatcatccaggggtagccaacgggtttagtcccgatataggttgtatgtttgctgttgggcaagcgtttgagaaaagtgaagagcatagtggtaataccataggtggaaagaatgtagtaggagggaaggttgtttcaggtagccaagagaaactctggagtgataccatcaagagggctagcgaagagcggggggatatcgagaaggagaagccttgttccagcttggattccgacttgagaagtagtgattttgtgttttcgactggctcggtttctgttggtaaccatggagagaaagatgagagattgacgatgaattatattgggggatttagcaatgaaggtcaagttaaggaggaagttcaaacatatagcagaagcgaaaacgggaataaagaagacgatggagagagtaagaaaaacagcaatcattgggcagataaagacgcacttgcagattctatcagaagctttgcagttctgcaggaagttctttggaaaggtttgcacacgaaccttgatttttga

SEQ ID NO: 150048 - DNA, 938 bp, Arabidopsis thaliana landsberg
taagcctttccaatggaggttacctccaccaccttcatctccactaccagatcttctaaataccttaccttaacttcgtactctccggtgattcttccggcttctactctccgccgtgattttcttggttgttgtcatagtctccgtccttctcctcatcttcgaactcgcgccgggaaacgcaattctcgtcgttcttcaattcgatcgcctcgtttagttgttagagcttctatcgattctggtttgattcttattgttgttgctgtcactgcgttctctgccattgctttcgcttattgccaaagtactttcaggaagcggaaatcttccgatgaggtaactgaaatttctgagcgaagggttttgcttgttttaactaatttttaagttttgtttcattagagtgcataaagttgctgactttttgtaaaattcgataagaattctggttctgactagctaagcttttcaggttgcaacggttcatggcggaaaaaatagtgctgagaatcggcgggaaattcatggagatattcatgaaggcaatcctgtggaaataaatgtaggtttcagaaaggtagaggaagaaagtgtgaatcttttggaggaagaaaaggctcatcaaatccatgaagttgctgtgatggattatgattcagtttcagctgaggattctcagtttgctgttgctagtgtgaccacagttgccacggcacataccttaatagatgaatccttttcatcttctattgttaatgggtctgttgctttggaatcagctacctttggagtaaaaacacctgaaaaacaagttggaaatagcgaagatcagaagggtttggagcatgatttttcacaggcagtggtgggaattcattcgattgcttctccacaggtggtagatgatacacgtgctctagagtatgagtacaatg

SEQ ID NO: 150049 - DNA, 330 bp, Arabidopsis thaliana landsberg
atgagaatcagacatcagagggaacttggaggacacagagaagcgcaaattatcagacagagtgagaacgaagaagaagaaagcacaggtaagttgaacaatatgtgtttcgattctctagaaaacttacacaattgtaaattgaattcactagatatctctagtggctgaaaaggagaaagctttaagatttctgggttcttcttcttcttcttctctgaattgatttttttcaggatgctaagcttgagatattcattaccttatcttcttcttcaaacaagggaatcattaactaagctcttcaccaaaaagcctaacaatgttgtg

SEQ ID NO: 150050 - DNA, 279 bp, Arabidopsis thaliana landsberg
ccggaatcgtctgcacaaacggccgagtcacaactcttgtactcttcggaaaaagtctctccggttacattccattagaactcggtttactcaactcgctaaaccggcttgatctagctcacaacaatttctctaaaaccataccggttcgtctcttcgaagcaaccaagctccggtacatcgatctgtctcacaactcactctccggcccaataccggcccacaataagtccatgaagtcactcaaccaccttgatttctcctccaatcatgctaacg

SEQ ID NO: 150051 - DNA, 117 bp, Arabidopsis thaliana landsberg
attttcacaaacaacctctcgtcttctaggttaatccaatttcgtcgattcatgaagttcacccctctcccatcggaaaattcttcgtaatcgacgacgaagagatcaatgagaacc

SEQ ID NO: 150052 - DNA, 1576 bp, Arabidopsis thaliana landsberg
ggttaatctctcaaacagcaaagctaggtgcacagggtgtgccctcatgccggtccttttcttttgaagatttaaaggaagccacaggcgattttgattcatcacgtttcttaggtgaaggctcccttggaaaggtatggtttgtcttctgcaagattaattcttgtgatctgcctatcagtcatttgctttactctgcttgttttgatcctttgcaggtatacagaggtgtcactggaaaatggaagttccatagctatcagatgtctggttttatcaaggaaattctccagccagagtatcagaggtcacttagactggatggcaaagctcaaccatcctcatctccttggcttcttgggccattgtacgcaaaccagcggagaacacgatcctgttgcaaccatactctaccttgtatacgagtatatgcccaacgggagctatcgcacacatctatcaggtcagtcgtttggcatttgtagtaaactaaatgttatactgaatctctctgtacttggaaaatcgttgttgttagaatattgtttatttgtagaatctttctcggagaagatcctgacatggccagatcggctagcaattctgattgagatagcaaaggcagttcattttcttcacaccggtgtaatgcctggttcattcaacaatcagcttaagactaacaatattttgcttgacgaacacaagattgcaaagctcagtgactatggagtctctgccatcattgaagagaacgaaaagcttgaggtttgctctatttactctctttcactgtgtttatcttcattttgtatgatcttctttgacactaactcaggactctactttactcctgcttctacattttgcagacaaagtcagaaacccacaagtcaaagtatgcatcttttgtccttgtatagcaaaactccatggcatttatgagaatctaatccaaactttgagattatgcaggaaaaaggctaaaagagaggacgatgtgtacaacttcggattcatacttctggaatctctgataggaccagtgcccactacaaaaggagaggcttttcttctcaacgaaatggtaacaaagagaaaaagcaaaaaaaaaaagcatcatcattgttatttgattgaaacaaatttggttaatagctgttgctgcaatgttgtgtttgcagacatcatttgggagccaagacggtcggcagaaaatagtaagtccaacagtcctaacaacaagctcgcaggagtctttatcgattgcgatctcaatcgccaataaatgtgttttgcttgaaccttccgcaagaccttcctttgaagatgttctctggaacttacaatacgcagctcaaatgcagtctgccgcagacgctgaacgcaaatctgatacgtcgtcgtgaatccaaaggctaacctaatgattgatagttttttcggttttctaaatgtaaagctctataagtttggttttcagtataaaaatgtaagactcttgagactaaaaatcatagtagcttgtcttctcttgaaacttatttcgttaaacaaatattgattgaagaagata

SEQ ID NO: 150053 - DNA, 792 bp, Arabidopsis thaliana landsberg
gcacgttggagaatctgttgcagtctgtggatgagatcaaagaaggaaaaataaaggaggtgagtgaacaagtgttgcagaggttaggcaagctagtgcttctgtgatatgcaaggcctaatattataatcttccttgtctttgcaacagtctctaatagctagtgcggatcaagccattcttagcaagaaattggtaggttttcctgtttttctttcatactttcattcatttattcagttgttaagttcacaaggtagggatgatgaattgtgttaatggcaggcactgttacggtctgatctcccagattacatagtaccgttcgacacgaaagatcttacttttaagaaaccagaggtttgtatttgtatgacgatatacatctactacaatagactaactgaaaacagaaagattagtaacagaggataatttgtgaaatgtacaggacaatggtgagaaattgagtagcctgttaatcgcgattgcggattacgcagaaggattttcagctgatccagtcatcagaagagctttcaggttgtgggaaaaactggaagcagtgccatgatgatattttatgcatcttttttcttactcgtttctttgtattgggtacataaaatagagtaagttcaagccaagcttagaaagttctcccacaaaacattaaagcgatactttcacaatccttttgtaaagcatgctttattgtaactatggagaatgatgaagttgatgctaatttagaatgctcctccatgggaggttccattacataaaacacaa

SEQ ID NO: 150054 - DNA, 1365 bp, Arabidopsis thaliana landsberg
atggcggtgagtctcacggtatgatgacatcagggcttcatttggatagtcgcaacacgacgacgttctctgttctgtctttggtctccaaataccgttgggatgctaagctagtccttgtcctatctgctttggccgtgaaatacggcgtttttctcctcctcgcggagacacacgcaacaaatcagctcacaaaatctctggctctcatcaaacagctccctagcatcttctcccggcagaacgctctacaccagcgtctcgacaagacccgaattctgatgcaagacatggttgatctcaccactaccatcatcgatatctatcaactcccgccaaaccacatcacagccgcgtttaccgaccatatccccactgcggtttactggattgttcgctgtgttttgatatgtgtttctcacatcagtggcgccagtggtttcaagcaggagtaagttgtttttctttctgatttctagggtttcaagtaggagtaagttgagtatgtgcttctcatctatgttttcagtcaaatcatgtcgtttatggaagtttcggagatacatgagaatagcgaaaggcttaggaagatcaatgcttacttgttagaacaattcaagaagagtaaaatgaccatcggtaactacgacgtcgttttaagctctctctctgtttctatatttttaagagtatttttattcctctgttctcaagctctgttttttttactctgttacagaggaaggtataatcgaagaagagtatcaagaactcattcagacgttcactactatcattcacgtcgacgttgttcctcctctacttcgtcttctcagacccattgattttctttaccacggagctggtgtttcaaagagacgcgtaaaacctccttatatctctgcatctgtaaaagtctcttgtcagtgactgatctgttttcaaacattaaccaggtcgggatcaacgtgctcacccaaaagcacgttctgcttctgatatcagacctagaaaacatcgaaaaagagctttacatcctggaatcgctctacacagaagcatggcagcagtcattcgagattctttgggttccagttcaagatttctggacagaagctgacgatgccaagttcgaggcccttcacatgaacatgaggtggtacgttcttggagagcctcggaaattaagacgagccgcgataaggtttgtgagggaatggtggggtttcaagaacaggcctatgctcgttgcacttgatcccaaaggtcaagttatgtcaaccaacgccgttcctatggtctggatctgaaaaccctttgctcacccttttgccaccgcaagggaacgtgatttatggagagaac

SEQ ID NO: 150055 - DNA, 739 bp, Arabidopsis thaliana landsberg
caaatcgtgtcacatctccttcttcttcactttaccaaatcgtgtcaaattttagggttttttttttcttttcgttatttcatcaaattctggaatctgggttttttaagttttcttctctatacctttgaatcgcatctttgatccaaattcattttagatatcaacttgaagtcgaatttgtgtttttctcttttcctctcgaattctcaaagtctcacgcaactatgaaagaagacatggaagtactatcgctcgcttcactaccggttgggttcagatttagtccaacggacgaagagttagtccggtactatctccggctcaagatcaacggtcacgataacgacgttagagtaatccgtgagatcgatatctgcaaatgggagccttgggatttgcctggtaattcctttcttcatcaaatcgatttgttgattcatctttagctctttagtctcggtttagcaattcccaggcttcaattccggtttatgcatgtttgaatttggaacaatatgatcaataacttcttagcttgggtagtggacttagtgaatttgagtaaagatttatactttagtatttgtggtgtagatttttctgtggtgaagacaacagactcagagtggctcttcttttgtcctttggaccggaaatatccgagtggaagtcgaatgaaaaaagctactgtggctggatactggaaggcgacgggaaaagcccgtaagatcaaatc

SEQ ID NO: 150056 - DNA, 1775 bp, Arabidopsis thaliana landsberg
tccatcgtccgaccgagattttgtcttctcgtgagttcaaatccaaatccatggggaagatccttgtggaaatctgtatgatatcagctcgagggctccgtgtgggaattggaatcggatcctctctactgaaacaccaatggtacgccgttggttggcttgatccagaagacaaatactgcaccacaatcgatgcttcaagagcagacaatcctgtctggagaacaaagtttgctactttgctcgatgattccacgattcaggattcgaagttggctttgcaagtcgaggtttatagcagagaacccttgttcttaaggaagaggcttcatggctctgctactgtttctttgaaggagtttctgactaagtataagcaacaacagagttcttcgaaagctgtaattgaagaaactggaagctatcagcttaggaagacgaactcgagcaagcctcagggttttgtcgatgtgtcgatacgtatatctgcagagcgagaggattttgggggttttactggtaatgtctctgaattttgcctttagtttatttgcattttgtctgcaatcagattatatgtaaattgaacaacaatagacgcaaatgtgaatgggttgtgtcaatttcagaaagaaccaacggtggtgctgcttttgtttcctgtaactcaattcttgaagaaccttaaatttgggtttccgaatatccgatttcgagatcttagcgtttttaagatgggtttgtctgaaggagagcgctcaccatctttctcttcttcttttgtgcaggagattttggaggagtcatgctctcgaacaactcagataacaacacttcaggacaggattacatggctggttcatcgcagaatccatttgcatccaatggaccagtcaaacccattctcagttcccccatcatataaccaccactcatcaatccctaaccctccaatgaccaacaccaacccacaaatgcaacaaccttactatcctccaccgatgcagccaccaccaccacctatgaactcagggtacatgcctacatacatccccaaatctgtgaatgactcatcaatgcctaaccctccaatgaacaacaccaacccacaaatgcaacaaccttactatcctccaccaatgcagccagcaccaccacctatgaactcagggtacatgcctacatacatccctaattcagagaatgttacgaacattccatcgtcatcatcatctggaggagtaccaggaggggcgggaagaggatatgctaggactggcccagggtttgctgtaggagtgggagctggtgcagtagttggagctggtgcagctttatatggaagcgagtttatgtcaggaatcgacttaccttcaagcttacctcacccaagtgtccccatttccattgatcctccattttgatgcagcaacagctcgattcaatatggctgcattgtgagattatctgaaacattgtagatgattcgtatttgatatgataagacatcccagattcaagaaacatataaaatgaaggcctcgggtttcttgggaattcgattgaactgttttttctattgttattacttttctatagtgttatctgaaaatttacataatacagtgttcgaagcaaactgttgtggatgaatcttgctacgtagctatgtacacatagtctcaatcagtaatgcaggccctttcactcgaagtagcaataagcaataatcaaatcttatgcagtctcaccaaatctatttacatagacatggt

SEQ ID NO: 150057 - DNA, 4177 bp, Arabidopsis thaliana landsberg
atgtcgaatacaccagaagacggcgacggagcacaggtaactacaggcggcttgttccccgtcttccctacttcggcgaactccatctcagctatttcgaatgctcctcaatggcttcgcaacgctagcttcactacggatctctctgtcatcaacgctgccgcttcgacggctccttcctcatccgaggtcgaggctggagacgacgaagatgaagaaggaggagctgatggaaatatcggtttagctaatcaggctagggtttataatttggttgaagaagaagggtctttggagtctgatgacgacaaggtaaagaggaagcgagagaaaaagaagaaacggaagagtgataatgcttcggatgaatctcgttctcgtaaatctgatgaatactattcgaaacctgtgaaggattattacttggacactcgtcctgatccagataatctggcttatggctctatttacaggtactttgcttataatttgtctagttatggttggtttcattttctgtattctgtgcaaggcgttttaagagtgtagggatattgaaattttgcttctgtttgcataatacaggatgaatgttcctcgttataaacttgacaattctcagagagttccagggtcaggttctctgaggttttatttgcggaatcgacgtagttctatgcttgacacagagattgatattgattctttggaggggagagcaaagtctgatacccgatactggtatgcaaaacatgctgccatggaacgcaacaagaatttcaagcgtattcgtttatctgcttcaagtgaagctgtggattcttcctttgataatttcattccactggaggaagacgtgactgttccagaaagtgacgaagaagatgttttatcaaaggactcaatgattggagcatcatgggaggatgaagtgctgaataaaacacgggagttcaacagagtgacgagagaacgtccccatgatgcaaaggcatggctggcatttgctgattttcaagacaaggtttcaagtatgcaatctcagaaaggagttcgcctgcagactttagagaaaaagattagtatacttgagaaggcttttgagctgaacccagatagcgaagaactgttgcttgctctgctcaaggcataccgaagcagagacaacgctgatgtactaatcagtaggtgggaaaaggcacttatgcagaattccgcaagctacaaattatggagggagtttttatgtgttgttcaaggggagttctccagattcaaagtatcagaagtgaggaggctgtattcttatgcgatccaggctctttcttctgcttgcagcaagcgacataggcaggttcttattttatggtgctaactgataagggttgatgaatcacttcattacgtactgtttactgtcacaagtcgtttggtgtttccccactatctttaatcgctggcattattgatattctcattaatagcagtttgacattgtaaggtctaattctatttattggattatgcaggtggatacaacatctgaaccattggattctgctgccatccaacaggaactcgttctagtcgatatgctagttagcctctgcaggtttgagtggcaggctggttaccaggagctggccacagcgttacttcaagccgaagtggaatttagcatcttttctccatctttgttgctaactgaacagagtaaattacgactgtttgagcacttttggagcagtaatggtgctagagttggagaagaaggagcttttggatggttattgtggctggagaaagaggaggaaaacaggcagaaaattttgaaagaagaatcctctgatgacaatgaagtaggtggttggacaggttggacagaacaggtctcaggtagaaatggagatgatattgcttcagctaacactggagaggtcgatgttgatcggaagggtctggatgaggaaatggaagacgagaatagcaaacctgaagatgacactgaagctatgctgaaattattgggcattgatgtcaatactgcggccagtgatgaggttaaagatacatcaacttgggttaaatggtttgaagaagaggtttctcgagatcacagtcaatggatgcctactcggaaagctggtatctatctctatctttaccatcattatctctgtattgtttgttcatcttttcttttggagcttacaaaggtctaaatgtgtctgttgggtgaattttgtccaactgggactagtcgctcagccttctttgtcattccagagtcattagtaaataaattccagtctctatagatatgtttgatggtattgttgacatgtaatctatctaaaagactgtaaacatgcatgtggttaaccgtccatcatcctttaataggtgaattctccagtgttgagggaatgggtgagggagaagatgaagagcaactctcaagtgttgtactatatgaagatataaatggatatctattttccttacgttcaaaggaggcccgcttatctctggtataccagttcattgatttcttcggtgcacatatctccccatggacttccagcaacagtttgtcgtggagtgagaaaataagtagccttgaaacattgtcagattccatgttagaaaacttgagaagtgttcatgaatgtttgtcgaaatcagatagtgccaactgtttcagcttgggatctcttctaggtggcagctgtgacttatctatgcggactgagatgatgaagtttctccgcaatgccatcttgctttgtctaaatgttttcccgcgaaattacattctcgaagaagctgtgcttgttgcagaagaactatttgtaacaaatatgaaaacatgtgaggtagcaactatgccatgccaagctttggccaaacgtctcctgaaaagtgaccggcaggtaagccccattccaattttttgatgtgtttttttgttcagtttatctgaactgattcgttctctaaacaggatctactactttgtggagtttatgcacagagagaagctgcttctggaaatatgaaacatgcaaaacgagtattcgacatggcactgacttctatctgtggcctccctaaggttagtttcagatctttcggttatattgttacttgttagcatatgatacaaaatttcaggtttccacgtatgtttctaattccaaggaacttctggatcagtaaccctggttttgtgtttatttctgattcaaattatcgcttactggtcccaaaaactggggcactgccacttgagtttggacaagataatctctctcatggacggatcatagtagagtttgttatagaacagtctcttcttggtaatgtacagggaagcatggcctagtggatatatctagcccaatttccgtgctttctttggatttttatgacattgcaaaagccatgctaaatttatttcacctatgattgcaggaattacagtgtaacactcctttgctatgtttatggtatgctgaatcggaagtagccaatagtagcggcagtggtagggatacagaatcatcatctcgtgctatgcatattctgtgctacctgggaagtggtctagcttatagtccttatacttcccagtcttcaagcatgcaaattcttagagcacgccaggggttcagagagaagcttaagaagatacaatcaacatggtctcatggtgtcacagatgatcaatcagcagcgcttgtttgttcggcagctctatttgaggagttaacaaatgaccttcctggtgctcttgagatcttagagcacatgttcagttctgttcttccaggttatttacttatttccatgatcagtattcttgggttcacttactattttccatatgaatttctcttaaaagcatgtatccactgtatatctgaatttgggctattgtgaatttttcaggaagaaaaagtcaaagtcatcaacttgaactcttgttcaattattatgtgagaatgcttcagagacaccaggacgatctaactttgtcacaactttggaagcccatatcagagggactgcaactgtatcctctcaatcctgaactttatcgagctttggtggacatttgtaatcaccggatgacatcccataaactgagaatgatgttcgatgactactcccgcaa

SEQ ID NO: 150058 - DNA, 539 bp, Arabidopsis thaliana landsberg
cctcagtcaaattttattacaaagagggagaccagaatattcctccttttgtcttcaagattttaaagccatggccggtggagctcttaccgatgaaggaggcctaaagagagctcatctctatgaacatcggatcacttcttacttcatcttcgcttgcatcgtcggatccatgggaggctctcttttcggctatgatcttggagtctctggttagataactttctcgatctggttttatcttataccaatcaaatagccagattctgaaactgccaagtattgtttttgaaaagggcctgcttcagttttgttaaatttcccctgttttgtccgaaaatatcagttccctctctgacgagagttagcttcagctttgtttaagtgtcgactgcttagtttcttgtaaatcaaggaacctatgcaagaccaatgctcatttttgtttattcgtccttgttaaacgcaggtggtgttacatcaatggacgatttcttgaaagagttcttcccagggatctcaaaagaaagcaaatcatc

SEQ ID NO: 150059 - DNA, 476 bp, Arabidopsis thaliana landsberg
acgagactttcttctccgatccaagtctatgcagggagacaaaggtcctttgattttgttgtggacttatcagtttcaagagttcggattctttcttacacttttcttattttcttcttcagaattggtattcactctccaagattttggccgagaatgcagcgtggcaatttgccaaagacaatggaatcgacatggttgtgttgaatcctggatttatttgcggaccactcttgcaaccaactcttaacatgtcggtagagctaattgtggatttcataaatggtaagaaccctttcaataaaagatactacaggttctcggacgtaagagatgtcgccttggttcatatcaaagcgttggagactccttcagccaatggcagatacatcatcgatggtccaaatatgagtgtaaacgacattatagacattcttcggaagctgttcccagatttgtctattgctgatacgtga

SEQ ID NO: 150060 - DNA, 754 bp, Arabidopsis thaliana landsberg
ataaatttatcttatttttccaggtgtacaccggatcattttcattagggatgggtgggattccttgggtcattatgtcagaggtaagtaacattcataaaaattctttggttttaaacatactcttatacttaataatccgatcgatgtcttaagaaatattaaactttatatcataaacctacggtttagtattaaaattaaataataaattatttaactctcatatggttgtatgtggtatgattttgatcagtgtatataaattatgttcctttatgatttatttattgattctttgtttatataacattttaattcaatttagttggtgcgtagatattaattttatgttttatatgataaagatatttccaatagacataaaaggatcagccggaagcctcgtgactgttgttagctgggtcggatcatggattatatcttttacatttaactttctaatgaattggaatccggcaggtataaaatttgtttaaattttgcttttatcaataaattttgttctttatctaatagtggcacaagttttaaattttcaggaacgttttatgttttcgctactgtttgtggggctactgttatttttgtagcaaaactcgtaccagaaaccaaaggtcgcacacttgaggaaatccaatattcgattggttatgtagaattgtaatgtatagtagttgattacgagaatatcagtccctaattataacgattaaaagtaagattttttatt

SEQ ID NO: 150061 - DNA, 1855 bp, Arabidopsis thaliana landsberg
tagcttttgaagcctctgtttgtttatggttcattaacttatatcctctctgttcttctcatttctaaagactgaattttgaatggtaaaagatcgtgtgtgtgtgtgtgtatccttaggctttgatgcaattttctgaaaattgaactttgtttctatgttgcagtgtttgagggtgtgttttatgtatggatggatttaagggtaaaagaacatctagaccgattatgccacggaaagcaagtggtcttgtgttacatgagaatatgaagaagaaagatgataagagtgttgttcctatctgcagtagaattggttgcagttccagggttagttccactaaaggagatttgattgatcacaaagcaaaagctaccgtgtcgtcgtttcggtcttctttaaatggaaaggaaaccgttggtagttcatctcggagtatgagtggatttggcggtacgaaaaaggcttccaaggttatcggtaggagacaactctcttctcttttggacatggattcttcagagagtagcagtgttaatgaagagtcacccaagggtgagcgtggaaagaaaaaagaaggcactattagtgttctttctgaaaatagtgtctctggagaagttgtgacagaggcaggaagctcaagtagagaaactgatagaagcattcatcagagacctgatttggtctcccgagatgctcgtgtgagtaatagtgagcaaaatgcaagagcttgtgtgaacaagaatgggttgagagacttgaggagcaaatctggttctgatgttcttccatctaattcaactccgccaagaaaaagtaacatctttagaaagaaaacctctgatggtgagagcagctcttcgagtagagggaataagacggaaggatcaatggttgggggaaagaatataagttcccctcaggggaatggcatcaccatgtctgattctaggaggaacagaaatataccaagtgttagggacaacagtgttgtttcaagtagtactaggagatcaactggttattatggtagaacaggacgtgctggagcggttgcaacactacaagcacctcggcctccaacaagagctgatctcaatccttctagatcggcagaagtttcgcgtagtcctttaaatagttacagtaggccaatcagtagtaatggcaggttacgtagcctgatgatgcctggtagcccctcagaagccggcctttctcgctctttgatgaaccgtgatactttcagacggtataacatgaatggagttgcagaggtagtcatcatatcctttcttgtgtgtgatggtgttccagcttcttgataacaacaactcaaatacttttttcacaatgtttcaggtattgttggccctggaaaggattgagcaagacgaagagcttacatacgaggtgattttatcatctttgaaatgcagaggttttgtctgacttagagttttattttgacacacttgttctgcttctttatttcctcttgcagcaattggctgttttagagaccaatctgttcttaaatggtatgagcagcttccacgatcagcatagagatatgaggcttgacattgacaacatgtcgtatgaggttagtcttaccttttgtgtattttggtgattgaccgtcaaaggctaaaattcggatgtgaaagctaagattctcaaaatcatgcaggaactgttagcattagaggagaaaatgggtacagtgagcactgctctaagcgaagaagcgcttctgaaaagcctcaagtcaagtatttaccgtccaaatgatgaatccgacgacatttgcctgaacaaagatgatgatgtcaagtgcagcatttgccag

SEQ ID NO: 150062 - DNA, 1811 bp, Arabidopsis thaliana landsberg
cttcactgatcatcgccaatcacaaaaccaactacacacattcatcatcatttcgattatattttacccgaccatgaccggagctagccgtcggagcgcgcgtggtcgaatcaaatcatcatcattatctcccggctccgatgaaggaagcgcttatcctccgagtatccgccgcggcaaaggcaaggaacttgtatcgatcggtgctttcaagacgaatctcaagatattggttgggttaatcatattagggattatagtaatctacttcgtaatcaatcggctagttcgtcacgggttgttgtttgatgagtcccagaagcctagggttatcactccttttcctgctccgaaagtcatggatttgtcaatggtacactaatattatattcactactcgtttttttaaatcatcaaagtcatgaattggaaagattcgttttttgtatatgtgtaccagtttcagggcgagcacaaagagagcttatactggggaacttatcgtcctcatgtttattttggagttcgagctaggtatgcaaattccactgtgaatgaatctctactctgggatattctttgtacaagtaaagaagttgtatatggcaatgcagaactccattgtccttggtagctggcttgatgtggcttggtgtcaaagatgagatgtatgttatgcggcatttctgtgaaaactctgatgatttaagtacatttggctggagagaacataatggacgggattatggtcggcaagagctggttgaaaacgatatggtaatagagacgagttttgtgaagtccaagggagacggccttggttatggtggggattgggcagttcggattgatgtaaaaaataaagggtaattgctaatatgcattcgtactgtaatatacttttcttcacagtgtcggctttttgttattttggcttggtgatagaaattcattttacactgtggcatgacaatggtttttttatttgaccatggtggaactaaactaggttgaatgatgatgtgaagagaagtgcacatctcttcttttatttagctgatgaaggtggcaatgttttaaatttaggccaagatggtttagatttccaagggagctctctcctggtttcggggtcacgtgaagatgtaggagactggcagatacacttaaaatcacaggtaatttgtgattgaaattgctctgtagaattcttaggacttttgtagctgtctctgctggaagtggatctgcgggtggtttgacattttctgtcatgtttcggatgtcatccgctgatgctcatctggatataaccattttgattgttcttcatttgcagaatcagctcgagacacattattccggtttcaagacgcctcacatatataatttgtctgatctagttcagcaaaatcttgctctgcaggtctgctagttttcgagctcataactcattttgaaagggtccaaagtatatttttttaaagaccgcaatgcttacagttctctttgcttgtatgttttcaggcaaggaagtttggacgacttcagctctctgacacatcagaggattcttctaacatttacatctttcaggtaatcagtcttaataaagatgtatgcatgtgtatttttgtaaaaatatatagaattttcttaactcctatggaatctgtgatcaatatgtttcaccatgtccaatggcaacatacagatttctgggaggctaccatttacgattgatattcccttcatctccgggatcaaaggagaaagttcaaatgtggaaaagcgtttaacaagtctcacag

SEQ ID NO: 150063 - DNA, 698 bp, Arabidopsis thaliana landsberg
tatctgaatgggatcttttcgatttgaagcagaaggttccaaaatatctctcagtttttcgattcacattttgagagtgatacttagtgttttgtgtctttctatgttgtgtagattgtgcttgagtctattgtaatctcgatatggcaaatggcattggctcccattagcggattctcgagtgatgtagaaggtattgacaatggatacttgagtgagaaatcgtatgatgaggaagagagtgggagtgaaaaagatggttctgattcctatgagtttcatgagaaggtcagagaaggagatagataggcttcttgcagctgcttgtgatgatggttgtgtaaaactgtaccgtatctctaatttagaaaagttaactgactatagatcattgcctagggtcagtggtgagtcatctttccccacctctgttatggtatttatatcaatcgtcaatctttgtttcgtttacttagtttcatagaatataatcttcacaggacgtgctttaagtgtaacatggagtccagatgcaaaaaggatcttttcggggagcagtgatgggtgagtttttgtagattcattgtttacttgcatatatgtgttacgtttattcaaagtaaacagattcttctgttgcaacaatcatttgtaggcagataaaatgctgggacgcaacctcgtgtcatgaggtatcc

SEQ ID NO: 150064 - DNA, 1344 bp, Arabidopsis thaliana landsberg
atgggaagagacggcaaggatcagtgcctaacgcacatgttcgttcagagatcaaagatctggaccaggtgcgtaaggagagacagcaaaaggcaaacaaagtttcttatctgcagagcaagagaggcggaagaggtggaagaggtggggccaggggaggccgtggtggtggggccaggggaggccgtggtggcagcagggattttggtggtggaggaagggattttggcagtagcagcgatagaggtggaagaagtggcggtagggattttggtggtcgtcgtggtggtgctagcactagtagcagaggtggtaagagaggaggaggaagaggaggtggaggtaaacgtgggagaggaagatagtcatgaagaagaagactgtcttcaaaactttgagcttaggcaaactattacttgccaaattgttatatcactcaccgaaccttctctactcaaattttgtgcaacactttataatcttgtttttttctgcaattttggttttcatgtatcaataagttggttgacgacaaaaagaaagcgacccaacactagacacttgtactgacgattcgttgtttcatgtcaggttaagtaatgatgacatcaggtatagtacaacaaggttctatggtgtagtggttagcactctggactttgaatccagcgacctgggttcgactcccggtaggacctctttttttccttacattttttttagttattacgtttcaaaattaaccctattatatcaactcccacttctcttcttcttctgtcgccgaaaacgcagcttaagctaaaacccctcagagagaacaatgagcaaaatcgagagctttgatgatttcgtcaaagtacatggaatactattggctgcttctggtttgccgccgaagctttacccacgcctctttgagaaactcgcttccgatacttttgatggcggcgattacttccaaatcgaatcctgcgaggatgatcagcgacggaagcttctcctcactgccgaatctatgcctaaagattctgacgtcttccttgttgatcacgcctggacttttcgtcttcccgatgcctataagcaggtaacgcctactctcactctcgaaagaagcttattgaattttggattggtgatgaagcttaaggtttgttttaatctcttacttcagcttaaggaaattcctggattggctgagaggatggcttctttgatgagtgttgatattgatgtggatgctggagaagaagaagaagtggcagaggaactctctgttgatcagataattgacaatgaaattcgttatgcagcagataaaggatatgactctttgagatg

SEQ ID NO: 150065 - DNA, 1773 bp, Arabidopsis thaliana landsberg
  unsure (1)..(1773): unsure at all n locations
atgtgggcttcagttccagaactgcctgcccctcctttggcttgcaagcgacgggttcaaatattgatgaagaatgataaatttcggaaggcgatcatgagtctttgcaatctgctcagtgagcgttatgcaagacatctggagacgaaacagaagtgtttacccgagagcaacaagtcacatgttcttgttagatatttatccccggcaattggcggaacggattctggttctgttgagcaaggtaaagatatatgttttgatgaagaaaaatgggatgacttcaatgaaaagagtataagtcaagcctttaatgatgttcttgagctcaagaagatggctaaactggtggcccctaaacggacaaaaagttctcgggaatggtcaaacagagatataattgatgaggtgctccttattgcttacttttctttcgtttgacatcattcccacaatttcttcacttctctgtgatgtttcacttttattgctacaaccaattcatacataattttactggaaacattcacccctgatctggaagatcttaatttcagtggttcttttgcttttggcaatttatgataaactaaaaaatgaactcgcaggggagtgaaatggttccacctgcgatccactcagaggacattcaaaatgtgtctgtggatcaagttaaagatacatctcgacgatctggtcattatcgtcttcatcaaactgtcaggcctttagatgaaaaggacaacgatagtatacaagtacggaaatctctggcagtttctactgctgcagaactgttaaagcttgtctttctgagcatgcctactgcacctggtatgccaaatttgctggaagataccttacgacgttattcagagcgagacctcttcacagcctatagctacctccgagacaaaaaattcctggtaaagtttcttattactttcctgttactgggttaaaacttctggctacttccttttgttatatgcttatttgcttatcagttgtatgaagaggcataagagtgtccatgtgaaaatagcatagcatagcatgtttaactttaaaggatcatcttttcttcctttttttggttcgatgttgctgtcaaaaccacataatgtgcaggcttgatgtttggatgagatggtgaataagaaacaggtttctacatttcttcacgtcactttattaatttattttcaatcaagtttatttgcttgtatagataaacttaatgattgtatttgtcaattaaaactgaaaagtcattgaattatgggaacgttccaggttggtggaagtggtggacagccatttgtgctttctcaaaacttcttgcacagtatttcaaagtctccattcccagttaatactgggacaagagcagccaagttctccagttggcttttcgaacatgaaagagaccttatggctgggggtgtcactcttacttcggatttgcaatgtggtgatattttaaatttcttttcattggtttcttctggtgaactctctatatctgtatccttgcctgaagaaggtgttggagagcctggagatcgaagaggtttgaaacgtagagctgatgacatagaagaatctgaagctgagagttctaagaaattgaagctactaggcgaaggtgaaatcaacttccgaaaggagaagggtttccctggtatagcagtatctgtncgacggcaactataccaacagctaatgcatagagttgtttaaggatgatgactctcgcactggtgaatttca

SEQ ID NO: 150066 - DNA, 276 bp, Arabidopsis thaliana landsberg
atgaatcagacaggtggtgattctgacagtgatgttgaagaagatgggaaagatgatttgttgtgtttggatacagatgcaagtatgttcaaggaaagggtaattgaaattctgagaacaaatgggttcgaagagaagagaccatccaagctttcacatcgtgagttgttacatttgctttctttgtttaaccaagctggaatttttttccatgatattacatcattacaaatggatctacacgaataatgataagttttctttaatgttttatgt

SEQ ID NO: 150067 - DNA, 654 bp, Arabidopsis thaliana landsberg
cgcttctccgcttccttcataaatatctcactcatcgtctctagattgttctttcacacgcaattttcatttctctcttaaccggaaacgaatctctcttctcaaagttttattttctctctgcgatggctcaagaagatgttactgctgttgctactaacggtgctggtccggtggagacgcatcttgtcttcactgagttcaagcagatgttgctcgttgaagctcaaaagttcggtgacgctgttactttctacaaatctgcttttggtgcgatcgagtctggtcattctctttaccctaagcgtaagcttgaccaagagcttcctcatgttctctcttctgagcttaatctcgctggctcttccttcgttgtttgcgacgtttcctctctccctggtttttctacgtaagtctctctctctcgttttggtgtttagcttctagatctccatgttttctgtttttttttaggtttttgttcgtttagtgtttgatttcgttttagatctggttttaggttgttttattagaagaaatctggagaataaatcatgtttagaagttattcctctcccttaaacacgatttttttgttcgttttagatctggatttaggtttttgaaatgaatagtttctggaaatttttatat

SEQ ID NO: 150068 - DNA, 340 bp, Arabidopsis thaliana landsberg
tcgattaagcatcagaaagtatgttttaatttttaaatttgaaaaaggtgtacttacaagttcgggtgttcacacggaggagagctacaataatgaaaaagctgactcaagaagggctatagaagaaacaagagtcacggaacaagttgtcactctcaatctccagtacactagcttccataactctctctctttctctctttcttctctctctaaaagttatcagaatagaaatctctctctctcaacaagtctaacagtgccatttgtatctctgaactccaacatggctcctctggttctctaccttctcactctcctcatggctggccattccagt

SEQ ID NO: 150069 - DNA, 2186 bp, Arabidopsis thaliana landsberg
aaccctagatctaatgtaagcactaagcagagagcgtaactatttatttaaagcaatagaggctctctctcattcgcatatttctctctgcttctcttatttccttgtgcctcacgttggtctgagaaaaacttgagttttcggttccatcacaaattcacgatgagtagtatgtatcacgattacgatcatctcacggcttcagggaagggcctgtggtcgaagttctatggactggtggatgcggcggttttgttatatgatgagatacaacgtcgtggcaagatcgtatctgaagaagaaagccagaagagaatattttgtctcttcccgagaagaacaagatcgtctttggtgaagagacaacaaaagcttaatggtggttttatctcttttacttcttcatcgcttatcgatcttaaccagttgccgactgattctgagatcgaagacccacaaacctctgattcccagatgaaaaccctacaaaactctagttctgaaccttgcacttcactcgtactctttgattacaaaacggctgagtccgagaagacggaggcgaaaaccctacaaaaccctagttctgaactttgttcatcactcgtactctctgattacaagatggctgagtcggaaaagatggagacgaaagacccaccaaaccctctgtctttgtgcctaacggggaacacaagccgcaagagacgtgctgtggaagagaggaaacgtaccggtggattcaagaaggcaaaggttgctccttttccagggacagcgagagatacgcctaagtggcttgtcaaggtgatgagagacatgaaagaagccaaagatgctaaactgatctttgagaagactctgtttgtgactgatataaacccaacacagaaccgtctctcaatgccgttcaacaacttactccaaaacgatttcttgacgtctgtggagtccagaatcataaaggaagacatcaacaacaataagaagattggagtgggagcgattctcgtggatcaacggtctgtaaagtggggtgtgatgttgaaaagatgggagctgaagaaggaatcaggaaaaggaagctggaactacaatctgatttgtgggtggaacgatgtcgttgaggctaacggattgaaagaaggcgacaacattagtgtttggtcgttcaggtgtcgtggagtcctttgctttgccatggaacagagtagctcttctcttgctctctgtctctgctaagtatcttatgtctgttgtgagtcttgtgactataacttggttcattaacacgcacagtgattttcaggagattctgaagattcttttgtctagtaatttcttgaaagagttaaactaaagaaacttgggttcctctttcttcttagtaacttgttccttctattgtttcagatcattataatcgtatgtacttagcacttttgacatgaatctggtttgttgtttggtctactttagttacctttcgatttcttgtaatatatctcaaagtctaattttgtgtgatgacattgatccaattgtgaaaaggttacatgttatggtacattcatgagaaatgctcaatacaatcaaaaccagggttgttttctactaagtgagaatctggtttttaaactcaagtataatgatcaaatcaggaacaaaatttgttgccaatgacaggttttgctacaattgcttccttctgccacttgaataagtacgacgtcctttaacacagggaatgcattcgtgctggccaagacactgcagaaacttccaagctgaaacctgattatatttgaatctcatatccgaagtctgcattgctactattacttcaccctcaaaccatatatattacatgtgagagacatcacgctcatctcttgtcatattccaactaaattttgtgttcgttttgctcacttagcagccgttgatggaagaaggaggaaattgcagtgaagaggacgagaaacgattagagagaaaatgagaggaggatctcatcaacgcaggtttgcctaggcacaacttggaaggctggttgaaaaacagagataactgcagtagtggctgaccacataagctgttttgctgtttgcagcaaaagcaagaccatctttatcgaagcctccagggaatttttcgtcgcgggaaaagaacacaatcctttctag

SEQ ID NO: 150070 - DNA, 533 bp, Arabidopsis thaliana landsberg; identical to SEQ ID NO: 15579

SEQ ID NO: 150071 - DNA, 490 bp, Arabidopsis thaliana landsberg
  unsure (1)..(490): unsure at all n locations
ttgtggaagaggtaagagagcttggtgagggagtggaatctgcagacattgcgaactttcagcttcaagttgtgctagagaaatcgaatgccgaactactctctgccagatcagccaatgttcatttggaacatgaaatagctaatgtgaaggttcagaaggagaaagagcttttagaagcaatgctgatgatctccatcatgcacaatgaaaaatctgaattatctaaggcagtggagggttcagactgtagatacaaggaagctaaagcgatagaacaggatagggataagcacgtcttgacactccgtggagattacgatgagcaggttaagaagaatcgtcattcgcacgaagctaatctgaaattggaagctgacttgatgaacttactcatggaactcgaagaaatcaaagtggagaaggacaatctgaaccaggagctttttacagaaaggaatgagatngaactatgggagtctgagtctgc

SEQ ID NO: 150072 - DNA, 689 bp, Arabidopsis thaliana landsberg
ccgcaaccgccgccgcaaataaccaaccccaccaacaccaacagctctggttcgctgcgcctcctcctgttcctccaagctccgaccatcatcaccaacaccaccgcatttttctccgaaccggtgtgctaaacgacaaaacttcagattactcttctacagaagcgccgctttacttcacctcctcgcctaacacagccacgtcatcgcctggttatcaagtggttgggtttccgatgatgaattcttctccttcccctgttacggtgagacgtggcttagccattgacctcaacgagcctccgccgctttggctttgaaaacaaacgataaagatggatatagcggcgccgttttgcctacttttctatacggcgccgtttgagaccactttcggtggaactactttagtttctttttttagcaaatagtatctttttgttagagttagtagacttgtttttataatttaatccttcttttgttcgttatgtaagagtcggagatcgattgttgttgtgagatccatatgttgcggaaaaaacaagaaacttcttaattagcaacacaaaaacttaacaacgtctgaacgtggatctaattatgtttgtggatcgtgttacgaccgtcgcttatgtcggtttcgagggggttttaaaaatcttatcgtattctatggcgtgtcgtga

SEQ ID NO: 150073 - DNA, 462 bp, Arabidopsis thaliana landsberg
ttttgcttctggttgataatatcaaccggtgtgccccttgtatcacacattcgcttctgaagtttgatcttgatgcccctgtggaagggacagttttgcagccgaagtttcactacaggtttggttgtaacttgtatacagaataatatgtatttcaactatgatctcattttgttttacaatttgcagttgtctgaaggtcattcttgaaatgctggagaagcttccaaaccctgatataaacttcttactctttgagtttggcttccaggtgggacatactaatgccagatgataactatctggtctttttcagagaagtgaaattctatttggtctactgtcttttgtacacttaagttttactttttgcagcttttgtgtgagttgaatttggatccactaactagtggtccaaccatggatctattgagcagcaaaaaatatcagttttttctccag

SEQ ID NO: 150074 - DNA, 1146 bp, Arabidopsis thaliana landsberg
  unsure (1)..(1146): unsure at all n locations
atggcgtcagaagcttcgccttcttcttcggccaccagatcggagccacccaaagactctccggtgcgtcaatcgtttttttttttttttcttactttctaaaaatggaacttttttctttgtgctattgaggcattgactttgatttgctttagtttgagtgaagagaacgaaactcgatggcttgtttgagcttctctatatgctcgtttttagatctagagattgctgcattgtgagatatgaagttgtttttgggttcgtttaggaaccatttttgctgcaattgatagtttctctcattgaacactgtgtaaaggaacctcattttgatgtttcaggcggaggagagaggtccagcttctaaggaagtatcagaagtaatagaatcgctaaagaagaagcttgcagctgataggtgtatatcaataaaggttgctatttttgtttagtttttttttgtatgttttatgtgtttctgaatctgattgttagaaattgatgtgtttgtaaccagaaaaggattgatgaaaacaagaagaatttgtttgctattactcaaagttttatgaggtcttctatggaaagaggaggtagctgtaaagatggcagtgatcttttagttaagaggcaaagagattcgccaggtatgaaaagcggaatcgatgaaagtaataacaacagatatgtagaagatggacctgccagttcaggaatggttcaaggatctagtgtccctgtcaaaatttccttacgtcctatcaaaatgcctgatatcaaacgtttgtcaccttataccacatgggtttttctggacaggtatgttgacattaatgtcgcaagagtacttgaaaatattcaagttgaaatgtaaacccctcgcatagtatcttaacgatataatcactcttgaaatgatgcagaaatcaaagaatgactgaagaccagtctgtggtgggtcgaaggagaatttattatgatcaaactggcggggaagcgcttatctgcagcgatagtgaataggaagccattgacgactaagacgaaaaaagagattttttggagcctgaagattatattattcggttagtattaaatggcangagtttaatccttcttgcatgttggtctcttagtgtgaatctc

SEQ ID NO: 150075 - DNA, 581 bp, Arabidopsis thaliana landsberg
  unsure (1)..(581): unsure at all n locations
gatcgtgctaaatgtaaggcgtttactaancggtgagagtatggtgcctatggatccttggtatagaggtgttaaggaacaattgagaaaactgcgtccaaagaaggtggttgtacttacacaatcactggtctatatgaggaggtggatgaaacacctattcgaatcacggagttgccaatcagaaggtggaatgatgattacaaaaatttcttgcagtcattgaagacagataatggtgcaccttttttccaggtagaatgcctgctttaattagaaaactgtgctagtattcattgacgcttctttctgacttgttccttttctttctgcaggatgtcaaggcttacaatgacgagaaatctgttgattttgaccttattttgagtgaagagaacatgctggcggctcggcaagagggctttctgaagaaattcaaactcaccacgacaatcgctacaagtaatatgcatctctttgataaaaaaggtgtgataaagaaatatgtgaccccagaacaaagtaagaagagatccaaattgataatcattctgttttttgttttcttctctagaatacat

SEQ ID NO: 150076 - DNA, 1563 bp, Arabidopsis thaliana landsberg
atgaagaatgtgccacctgaaacattgccttcggttacggcgccatacccgtttatgcggtgggccatggacatcgtgggaccaattcccccttcaggatctaagaaatttctgttagtcctaactgattatttcaccaagtgggttgaggcacaagcgtactacgaagttaaatcgtcttatgtcgttgcatttatttggaaaaatattatctgtcgacatggtcttccctacgagatcgtaacggacaatgggaagtagttcgtctcactcatcaccaggaatttcctcgccaagtggaacattcgcctcagcaattcgacttcgcgatatcctcaagggaacggacaagccgaggccctaagaaaagaaattgggcgaacaagttggaaggcgtgctatggtcataccgacctactccttgaagacctacgtcattatctcctttttccttagtttatggcatcgaggcaacggctccgggcgaggctagaattccaacgttacgcagatgcatgatgtcggaggaccctggactaaacaatcgactgctatgagatcacaacaacttcgccgaagaacatcgcgatcaagctatcatccggatccaaaactaccagaatgcggcgacaaagtactataatcgaaacattcgagaacgtcgcttcaacgtgggtgatctcgtacttcgagaagtcttcagtaacaccaaagaaaagaacgccgaaaagctccgagctcaatggaggggaccttacttgatttcaaaggtactttgataatagatttttagtcaattatcctaaaacaccaatcatgttgttgtagtattttaggttgtcaatccaaatgggtgtgatgcgaacaatcaagatgtgatcagaagtcactaagtcaagccaagcaataacaggttttggtgtgttctagcagtcctgagtgaacatgcagaaaacagaaaatcaaacagaaagagtaagacactcgaccaacacagctctttgcagagcactgggtgaggtcgagtgacaggtcgagtaacagacagaaaatgaaacaaggatactcgactgcacagtctgttgccagacaactgggtggtcgagtacaaggtcgagtaacagtaaagaattgcagaaactaagcaacagatgacaggatgcagtaaacaacagtagagtaaacaataaaatcaatcagacaaagaattcctaatgatggggtaattgagtagtttcgtttcctcagtttacaggtgattgacatgctcaataaattaaccctagacaacaagttcattaaccaaatctaagtgccaccacaacagagactctcaagctaacctagtcccagacttaatcaccattgacgagagctaacctaacaggcattacgaatcaacaagttaaagccaaaacgctccctgcaaccaataccttggtacagggtcacgaatctctggaattagtggttcagacatttcatcgaacaccttttgggcgaagaaatgtttgggctcaaattccagttgatgagaaagcaataggcattaagaacaactaa

SEQ ID NO: 150077 - DNA, 433 bp, Arabidopsis thaliana landsberg
gtcaaagaatgggactttcattgagagtgagacgtcgtggaggaagtgttagcaagaaagagatcattccggtgacaagttgctcggaggaagtggagataaccataccatcgcagtttcaatgtccgatatcttacgagctaatgaaggatccggtgattattgcctcggggatcacttacgaccgcgaaaacatcgagaagtggttcgagtccgggtaccaaacttgtcccgttacaaacacggttttgacaagtttggaacagattccgaaccatacgattcgaaggatgattcaaggttggtgcgggtcgtcactaggcggggggattgaacgaatcccgacgccacgtgtaccggttacgagtcatcaagtctccgagatttgtgagaggttattcgcttgtacgcggcgtggagactacgccgcgtg

SEQ ID NO: 150078 - DNA, 1166 bp, Arabidopsis thaliana landsberg; identical to SEQ ID NO: 1380

SEQ ID NO: 150079 - DNA, 399 bp, Arabidopsis thaliana landsberg
tactgaaagaaaaaaatgaacaaactctccaacgctttctctgtcctggctttcgccgatgaagatgctccaatggcttcttcttcttccactggtatcccctgtttccctcttcccatttgattacaacacaaaaccatgtttagatttttgagactgaatttgataatatattgactaaattaatcagtgatttagaggtcaagagtcaattaaagtattgacctttaaactttaggttttttactcatggcactgtctcttgtggctacaagatttgttggtttgagaatgattcttgtgaactttatagggaaacaagaagaaagtgtaaatgggtcacttgaggatggagattacaagcaaccacttgtttggattgacttggaaatgactggt

SEQ ID NO: 150080 - DNA, 1364 bp, Arabidopsis thaliana landsberg
taaaaactttgagaccagatgaatcaatgaaggaacctcccactacttttcctctggattgcataatggtaaacatggtgttaaccagacagaccgtttggttgagaaaaggaaaacctataaaaagatttgtttccttccagaaagaggaaagttgcattaccaatggagagatatctctcaggagtgatgcagatatcagtgattctggtgaagatgtgtgtatttctgataatttttgggagaataccctgtcaagggtttgtagtagtagtagtaataggagtatcaaatttttggggactgatagaacacttggagtagaggaatatttttcagcaaaactgtcagtttccagctctcaagaaacttgtaggacgtacatgaattgtgatcttatactacagaaaggttccacatacaagcaacggtgagttattgttccacttgcatggtcgtagtttataggtaaaggatagtaatgcgagtccctacaaaaagttttgtacattacctatgatatctgattctgagtagctgagggaaaagagatttcatcgttttctagtatggctaggctttgataatagtatacaattaaattgcagaactacacgataccattagataagatgctttgggcttccttaaagtgggtgatgtgtggaaaatcctatgtgcattttggttatatatatacaactgcatagctaggttgggaagccacttcatatcaagatgctatctattcttttcacttcgaacaatattctgaatacagggaagcagtgttgctgctgagtagccaggacaagttgtacgtgctactcgtgggtgtgactactgattatgaaggttagactaatcagctgtcttccttgctagcacgtcataaattttgctgatgctgagttcttaatggcgatgtgtgactgcagggagtaccttaagtgtactgtgttcccatgaaatcaaggatttacaagacgtatcagttggtctaggacttcaatttgtgaggttagtctttttctggttcggctttgtatatattttttgtatccactgcccatgttcctgaaccttctcttattttgtggttaggctacgctttttggaggatgtagaatacatttttgtaaccaagtgtattaaaaagacaacagaattactcaatatcacacaagttttcgattcccaggctacagagtataaatgttctttgcaaaggtgagccattcacattcaaccaagagtcggctctgtatatttttgctgtcataatttttgtcttctatgttaatggcagtctggagaatattcaggtggacttgtttgagaaagaaatatgtggaggtttgaag

SEQ ID NO: 150081 - DNA, 436 bp, Arabidopsis thaliana landsberg
gttcacttttttcgaccggttcctaaagaatatctgcactctgctgagctacgtgacatcatgcaatttggcagcagtaacactgctgtctttttcaaaatgagagtcgctggtgttcttcacatatttcagttcgagacaaaacaggtttaaacatcgctatttgtggatcattatattatgaagcaattccttatgagatattcaatttgggtaacttgtatgtttgtagggagaagaaatttgtgttgctttgcaaacacatataaatgatgtcatgttgcgtcgttactccaaagctcgatctgctgccaatagcttggttaatggagatatatcttgtagttctaagccgcaaaattttgaagtgtatcaccaacgtttgcaagatttgtctaaggcttttagtgagtcccaaaagaagaatgaaaaggta

SEQ ID NO: 150082 - DNA, 428 bp, Arabidopsis thaliana landsberg
atgttgaaggaaaatagttgcgaggctaacgacagtgacgatggtgatttttctccttctcaagattcgtcggaagatgaagaaactgttgaagtcaatgggtttcatgttcttccttcacaagtaagtactaaataatccaattctatgtgctcgaacaaaaatttatttatcatctctttaattttaagataattcgactatacttgaccatttttggtttacattttacttgatcacaggaaaatttggtcagccaaatgttaaaaaaacatccagatctgacttcaaactttgatttaaagaatcaacaacttaagaatgcttacatggatgtcctcgccgacatacgtgagacattgtcccagtcgacaaaggcactttccatgctagacctagataaagcagagagtacgctttctgatctt

SEQ ID NO: 150083 - DNA, 3177 bp, Arabidopsis thaliana landsberg
atgaggattgaggatttagaagcagctttgaatcaagacattcagttctttgatacagaagttcgaacttcagatgttgtcttcgccattaacaccgacgctgttatggttcaagacgccattagtgagaaagtaagaatcttcaaattcttagtctttttgtttcttcttccttatctgatctgttttttttgggaatctcagcttggtaatttcatccattacatggcgacttttgtttctggattcatcgtgggtttcactgcgggtgtggcaactagctttagtgactctcgcggtggttccgttgattgctgtgatcggaggaattcacaccactactctctctaaactatctaataagagtcaagagtctctttcacaagctggtaatatcgtcgaacaggtagagtgcacaaatccctagaaataaataaaaaaagtttctatttttgtcaaatccagtaatcattctatcatttgtttttttctgggtctgattcaatttctgaaaaaaatggcagacagtggtacaaatcagagtagtgatggcgtttgttggagaatcaagagcttcacaagcttattcatcagctttgaagattgctcagaagcttggttacaaaacaggtttagctaaaggaatgggacttggtgctacatacttcgttgtcttttgttgaaacgctcccttgctttggaacggaggatatctaggccgccaccatttgaccaacggtggtctcgctattgccacaatgtttttcgttatgattggtggattgtaagcaactctttgctctcttctctgttcatcactcttcttatcatttggtttgatattggtttgtttatggagatgagttatttatttttgatttaaagggcattgggacacatcagcacccagcatggctgcatttgcgaaagcaaaggttgctgctgcaaagatctttagaatcattgatcacaaaccaacgatagagcgtaacagcgagtccggtgtggagtaagactcagtcacgggtcttgtcgagcttaaaaatgtggacttttcgtatccgtcaaggccagatgttaagattcttaacagcttctgcctctctgttcctgctgggaagaccattgctttggttgggagcagtggttcaggaaaaagcacagtcgtttcgcttatagagcggttttacgacccaaactcaggttacaatcttaacattctgttccatttcaagctgtttttgctcgagcattgttcgtttaacacgctttttattgtcgctgcaggacaagttttactagatgggcaagacctgaagacgctgaaactgagatggttaaggcaacagatagggctagtgagccaagaacctgcactattcgccacttctatcaaagagaatatactcttaggccgtcctgacgcagatcaagtcgagatagaggaggcagctcgagtcgcaaatgctcattcctttatcatcaaactacctgatggtttcgacacacaggtctgatggtttatgtgaatctgttatcttttgattctttaatttattcattagtttaaggtattttgaaagagtcaaaagagagaagaggtatggtcatggaaaagcatttataacagagtaacatgggtttggtcaacaacgcatgtgagacccagacaagtagttttagtcatgtgtgttgatgttgaatttttttagtgttcatgtgcttgttttttttcttgctactttaacttgaaaaccagcaaccactgttccaatggatttttaatccagatagacatatgtttgtttatactcatgtggtaaatgtgaataatgtcaggttggggagagaggattgcagctgtcaggtgggcagaagcaaagaatagcgatagcaagagcgatgttgaagaacccggcgatacttctattagatgaggcgacgagtgcattggattctgaatcagagaagcttgtacaagaggctttggatcgtttcatgattggaaggactactctcatcattgctcatcgcctttctaccattcgaaaagctgaccttgttgctgtgcttcagcaaggaagtgtctctgagattggaacgcatgatgagcttttttccaagggagaaaatggagtctatgctaagctaattaaaatgcaagaagcagctcacgaaactgccatgagcaatgcaagaaagagtagcgcaaggtatatattcttattcattttgttttgtttatggttttgatgatgatttttttttgggttactgatgttaatctatttgttggagaccgtcgagtgctagaaactcggttagctcgccaataatgactcggaattcgtcgtatggaagatcaccttattcacggagactctcggatttctcaacttctgattttagcctctccattgacgcttcgtcctacccaaactatagaaacgagaagctggccttcaaggatcaagccaattcattctggcgactagctaaaatgaactctccagagtggaaatacgctttgcttggttcagtaggctctgtcatttgtggctcccttagcgcattcttcgcgtatgtcctcagtgcagtcttaagcgtctactacaacccggaccacgaatacatgatcaaacagattgataagtactgttatctcttgatcggtctctcttccgcagcacttgtcttcaacacgctccagcattctttctgggacattgtgggtgagaatctgaccaagagagtccgtgagaagatgctgagcgctgtactcaagaatgagatggcttggtttgatcaagaggagaatgaaagtgcaagaatcgcagcacgattagctcttgatgctaataatgtgagatctgccataggagatagaatatcggttattgtgcagaacacagcactgatgcttgttgcttgcactgccggctttgttctacaatggagactcgcacttgtccttgtcgcagtcttccccgtagttgttgctgcaactgtcttacaggtttgtgttcttttaaagcatgtgcatgctctcattgttgttcttggatctgaaactttgtcttgtcttttgaacagaaaatgttcatgtctggtttctcgggagacctgaaagcggcacatgccaagggaacgaagcttgctggtgaagccatagctaat

SEQ ID NO: 150084 - DNA, 4713 bp, Arabidopsis thaliana landsberg
atggcctctgagctcaacaaaatcttagaggattgcctcgatgagaacaccggccaaccttacttgccttctctctcaggcgaaaacgctttcttaaccggcgtcgttaaacctatttacgatactatccaagctgagattgatgagagcaagaacggtacagttgcgcattgtaagtggaggaactacgacgatatcaatgagtacttctggactgatcggtgtttcagcaaattgaaatggccgcttgatttgggaagcaatttctttaagagtagaggcaaaagtgtagggaaaactggtttcgtggagcgcaggacgttcttctacctttacaggagttttgatcgactttgggtgatgctagctttgttccttcaagccgccattatagtagcttgggaggaaaagccagatacctcgtcggtaacaaggcagctgtggaatgctctgaaggcaagagatgttcaggtgagacttttgaccgtgttcttgacatggagtggtatgcgactcttgcaggctgtgctggacgcggcttcacaatatcccctcgtttccagagagaccaaaaggcattttttcagaatgctgatgaaggttatagctgccgcagtttggattgtagctttcactgtcctctacactaacatctggaagcagaagaggcaagacaggcagtggtccaatgccgcgacgactaagatataccaattcctttacgctgtgggggccttcttggtgcccgaaatcctggctttggctttgtttattatcccatggatgagaaacttcctggaagagaccaattggaaaatattctttgctctaacttggtggtttcaaggcaaaagctttgtgggtcgaggtttgagagagggtttagtggacaacatcaagtactcgactttctggatctttgtcctagctacaaagtttacatttagttacttcctgcaggttaagccaatgattaaaccctcaaagctgctatggaacttaaaggatgtcgattatgagtggcatcagttttatggagacagcaataggttttctgtcgcattgttatggttgccagttgtgttgatatatctgatggatatccaaatttggtacgcaatctattcttcgattgttggtgctgttgttgggctgtttgatcatctgggggagatcagggacatgggacagctgaggctaaggtttcaattctttgctagtgctattcaattcaacctaatgcctgaggaacaactcctgaatgctagaggctttggtaacaagttcaaggacggcattcataggtagtccgtggaagcatgctactaatattcctaaataattttctgtacaacgcttgacttgactgtacaagctgtgaaattttacttttgttaacgcagatgctgcatataattaaatttttcaatattgtaataacttgaggttgtgtactgtatgcagattgaagctaaggtatggatttgggagcccgtttaagaaacttgagtcgaatcaggtcaaggccaacaagtttgcgttgatctggaacgaaatcatcttagctttcagagaagaggatatagtttctgatcgtgaagtagagctactggagctgccaaagaattcctgggatgtgacggttattcgctggccgtgtttcttgttgtgcaatgagcttttgcttgcactgagccaggccagagagctgatagacgcacctgataaatggctgtggcacaaaatatgcaagaatgaatacaggcgttgtgctgtagttgaggcatatgacagcatcaaacatctattgctctcaatcatcaaagttgacactgaagaacattcgataattacggtcttctttcagataattaatcagtccattcagtcagagcagttcaccaagacctttagagtggacctgctgccaaaaatttatgaaacactgcagaaattggttgggctggtaaatgatgaggaaacagatagtgggcgggtggtgaatgttctgcagtctctttatgagattgcaactcgacagttctttatagagaagaagacaactgaacagctatctaatgaaggtttaactcctcgagacccagcctcaaagttgctgtttcaaaatgctattaggcttcctgatgcaagcaatgaagacttctaccggcaggttaggcgtttacacacgattctcacctctagggactctatgcacagcgtccctgtgaatctagaggcgagacggcggattgctttcttcagtaattcgcttttcatgaacatgcctcatgcccctcaggttgagaaaatgatggcgttcagtgttctgactccatattacagtgaggaagttgtatacagcaaagaacagctccgaaatgagactgaggatgggatttccaccctatactacctgcagacaatttatgctgatgaatggaaaaatttcaaggaacggatgcatagggaaggaatcaagacagatagtgagttgtggacaaccaagctgagagacctcaggctttgggcttcctacagaggtcagacattggcacgtacagttcgtgggatgatgtactactaccgggctcttaagatgctcgcttttcttgactctgcgtctgaaatggacattcgggagggtgctcaggagcttggttcagtgaggaatttgcagggagaactgggtggtcaatctgatgggtttgtctctgaaaacgaccgatcttccttaagcagagcaagtagttccgtgagtacgctgtataaaggccatgagtatgggactgcattgatgaaattcacatatgttgtggcgtgtcagatctacgggtctcaaaaagcaaagaaagagcctcaggcagaggaaattctgtatctgatgaagcagaacgaagctctccgtattgcatatgtggatgaggtgcctgcgggaagaggagagactgattattactccgttctggtgaaatacgatcaccagttggagaaggaagtggaaatattccgtgtgaagctacctggtccagtgaagctgggcgagggaaagccagagaaccagaatcatgcaatgatctttacccgtggtgatgctgttcagaccattgatatgaaccaagacagttattttgaggaagctctcaagatgagaaatttgctccaggagtacaaccattatcatggtatcagaaaaccaactattcttggtgtcagggagcatatcttcacgggatcagtctcgtcactggcgtggttcatgtctgctcaggagacaagttttgtcactcttggtcagcgtgttcttgcaaacccactgaaggtcagaatgcattatggccaccctgatgtatttgacagattctggttcttgagtcgaggcggcatcagtaaggcttccagagttataaatatcagtgaggacatctttgccgggtttaactgcacgttaagggggggaaacgtcacccaccacgagtacattcaggttgggaagggtccacaatttggattatttctaactaactatactgctacaacgtttttttaacgtttttaacgtttattaattatgcaatctacttttgttataattatgtaatttaacgttttttaatcttctaaattcaaaaaatttgagtaacctttgtctttatgcatttttcaggtcgggaagggacgggatgttggattgaatcagatatcaatgtttgaggctaaggtagccagtgggaacggagagcaggttctcagccgagatgtgtaccggctcgggcacaggcttgatttcttcagaatgttatcatttttctacacaactgtagggtttttcttcaacacaatgatggtcattcttactgtttacgctttcctctggggacgggtttatctggctctcagcggggttgagaagtccgctctagcagacagtacggacaccaacgccgcgcttggggtgatcctgaaccagcagttcatcattcagctcggtctgttcactgccctgccaatgattgttgaatggtctctcgaggagggtttccttctagcgatatggaatttcattcgaatgcagattcagctttcagctgtcttctacacattctcaatggggaccagagctcactatttcggtcgaactattctccatggtggggccaagtatagagccactggacgtggatttgttgtcgagcacaagggattcactgagaactaccgactgtatgcacgcagtcactttgtgaaggccatcgagcttgggctgatcctcatagtgtacgcttcgcacagtccgattgccaaagactcgttaatttacatagccatgactatcaccagctggtttcttgtgatttcatggataatggccccatttgtgtttaacccatcaggattcgactggcttaagacagtctatgactttgaagacttcatgaactggatctggtaccaaggcagaatctcaacgaaatctgaacaaagctgggaaaaatggtggtacgaggaacaggaccacctgagaaacaccgggaaggcaggattatttgtggagatcatcttggtcctccggtttttcttcttccagtatgggattgtataccagcttaaaattgcaaacggatccaccagcctttttgtctacttgttctcatggatatacatctttgctatatttgtgctcttcctagtcatccaatacgcccgtgacaa

SEQ ID NO: 150085 - DNA, 506 bp, Arabidopsis thaliana landsberg
caattcctttcaactttcaaaatcgaagatctcttaagccatgaacgatcttctctccggctcggttaaaacctccgtcgcggaccgttcaatggcggcgcactcacacaacatttgagatgtcaaaaacgaaagtctccggcgaagttgccacggtgtaacaacctagacacgttcttcctcgacgtggaggttgtaaacgaagaccttaaagagctagatcgtctctgtcacaacctccgatcgagcaacgaacagagcaagacgcttcataacgctaacgcggtgaaggagctgaagaagaagatggacgctgacgtcactgttgcgcttaagacggcgaggcgcttgaaaggaaacctcgaggctttagatcgggctaatgaagtcaaccgaagtttaccggaaagtggaccgggttcgtcgtcggaccggcaaagaacttcggtggttaacgggttgaggaagaagctgaaggatgagatggaaaaatttagtcgagtgag

SEQ ID NO: 150086 - DNA, 498 bp, Arabidopsis thaliana landsberg
cactgcaattccattcttctcgctacattgttattcgtctctctgtgaaaatcactatacgtgacgggttcacgaaagtctttaataacatttccatacacaagacacaaatagtctagagatttgttcttagggagatttagctatctctctgttcaaaagattggtctaaagatgcaagcttttgctttaagtgggaagaaaaggattgtgaatcacggcatgtgtttttccaaaggaaatcttgatctcggttcacgcttgtctgagaattttatggatgatcctttgatcccgggattgcctgatgatgtcgctaagcagtgtctagcgcttgttccgcgtgctaggttcccatccatgggaagtgtatgcaagaaatggaggtttgttgtccagagcaaagagtttattactgtgagaagactcgctggtatgcttgaggagtggctttatgtcttaacgatgaatgctggtgggaaagataaccgatgggag

SEQ ID NO: 150087 - DNA, 634 bp, Arabidopsis thaliana landsberg
ttattcaagagaatgttgccattaatcagcatgatgcaattcagaaatttataatggttagggtggcttattttttaaggatctgctgtagcattctcatttcgtcacttggttaagctaagtattgaagaacttggttctaaaatttctttcacatcctgttgcagaacactgttgctgatgctgctccgatcgtccctgtctcagcacaactgaaatacaacattgatgtggtgtgcgagtacattgtcaagaagatcccaatccctgagaggaattttgtgtcacccccaaatatgatagtgattcggtcttttgatgtcaacaaacctggttatgaggttgatgagatcaaaggtggagttgcaggtggaagtatcctacgggtatctattctctctctctccctttctcttgttgtgcctcttaagtacatcaagctttatatggtgtaatcagtatctcttaactacatgtatattgtagggtgttttgagagtcaaccaattaatcgaaatccgacctggtatcgttaccaaagacgagcgtggcaactcaaaatgcactccaatttactctcgcatcatttcactctacgcggaacagaacgagcttcagtttgctgttcctggag

SEQ ID NO: 150088 - DNA, 103 bp, Arabidopsis thaliana landsberg
gtgtctgtgtactgcgtaaggtttagtgagtccatttgcaaagatgactcgtgagttctaatctatcgacctctctcgttttctcgcagttgcagagtctcag

SEQ ID NO: 150089 - DNA, 3084 bp, Arabidopsis thaliana landsberg
gactatccaaaagtcaacttgacaaatttggttgaagctaaattcaaccttatgttacttgacgaacaaatcgagcaaataagagagccgaatgatgaggatgatgtttttctccgtcttggaaatgtgttgaagctctttgctggcataagaaatgttcagaaactttacttatctgcaaatattcttgaggtcagttgctattttgtttactattgtagtacatttcttgctagtctcaaggaataccaattaatcagacagccttgtctaactttctgaagcatgagaacaaattcattgttagtccgagtgttatgctgagtcactacacagattgtaacgccagctgcaatattacaaatgttgcacccgaatagcgttgagttgagctttgtcttgttgcaggtcctttctctatgctgtgaatcatttccggtgttcaacaacctcaaaattttacgaataaggagtgccgaggatcgaggatggcaagcaatgccggttctcttaaggaactgtccacatttagaaactctagtccttgaggtatggacagaactcatatgtctaactttaaccaagacaaggatcagtatttgtagtccctttatttgtctggtttcagggtcttatacactatgtgacaggtgaatgtgggaatgcttgtgactgcaaatctcgggagggaatagttagttcgctcttatcatgtccagtgaagaaggtgcagattaaagggtttaaaggaacgatgagagagtcgtcaatgatatggcatttcatgacgtctttcccgtgtttgaaggagatggaggttgtttatgccgattttacaacaatctttgaaatcgtgggacgatgaaacttgtcgtgcatatgctctacaaagagttctttagttctgatgtcgagttcttggtgtacactcccatggataagaagtggattttcggagtggctttttcgaatgtaagagttttcataatcgacattgtcatgattattatcttcctcagttaaaccttagtctgctaatatgtatttcttatgaagaccaattactcagtcatcattttctgctctgcacttttctcaaaacctttacgttgtctaaatcatgcgatttgattgtgttttacgtctggtttatttgctttaataaccggtccaaaccaaaccattataatttactaaattttttcggtttgcgtttatcaagattgaattccggttcaaagattcttcctgtaaaatggatctttcatatattccattgtctctcgaaatccaaaacaatctaccatcgatttcggtcttaggtaggtgctgaagctaactattcccttctgttcttatacttctttgaacgtatcttagatcattttgcttttggttgcgttgttaaatttcgatcaatcgcttctctgtttatgtatggttagatgttccaatagctttgtgtagttcagaggatggatctgttcagcagtctaccaaatgatctcctttatcatatattgtccttcctatccacaaaggaggctgctttgacatcggttctctccaagaggtggcgcaatctgtttgcttttgtcccttacctcgagtttgatgactctgtctttcttcatccagaagagcgtaagcgggaaaaagaaggaattttgcagagcttcatggattttgtggatagagttttggatttgcagggtgattctctcataaagacgttctccctcaagtgtaaaaccggtgttgacttagaacatgtggatcgttggatatgtaatgtgttggctcgtggtgtttcagaccttgatcttttcattgatttcagagatttatattctctgcctcacgaggttggtgtgagtaggacacttgttgtgctgagagtagaaagtgaatctgatctttattggtggcagaagtttttatgcttaccgatgcttaaaactctcgttcttgactcctgctggttatgtattggtcagtttcaaattcttcttcttgcttgccctgcgcttgaggagttagacatgactaatacgcggtggaaggattccaatgtgactgtgtctagctcgatcctcaaggagctgactattgatctccatggttgttgtagcgtagttaatctgaagagtctttcatttgatgctccaagtcttgtttacttttattactgtgattctcttgcggaggactatccacaagtgaacttgaaaaacttggtcgaggctcaaatcaaccttttactaactcaagctcaaatcgagcaagtaagagcactaaataatgaaatgttggtggctgatgatgtttttcctggtcttggcaatgcttggaagctcattactggcctaagaaatgttcaacaactttacttgtctcctgatacccttgaggtcagttttctctctttagtgtatttctggctggttgggaggatataaagaacgcaaatattccaatcgcgtgattgctagcgttgtaggtgctttctaggtgctgtgaagggatgccggtgttctacaacctcaaagtgttaagtatttggagtgacatgaatagggaatggcaaactatgccagttcttctaaggaacggtccgcatttagaaactctcatcattgaggtatagaaataactaatttaccaaacatgtacaaaaatagagttcacacattgaaaccttaaatgtctcctttatgccttcagactctcttgcaccatgtcactgataaatgcggggatgcttgtgactgcgtctctcgggaggagaaaggtcgttcactcaaatcttgtccagtaaaagtgttaaagattcaagagtttcaaggaactatgaaagagatgcacatgataaaacatttcctggactatcttccgtgtttgaaggagatgaaaatcttctatatgaaaaagaatgatcgtactacacagctcagagtcatccctgaagtccctgaagttattgcagagatggtggaacactacaccaagttatctaattgcaatgtccagcttgtagtgagtagataattttataaaaagttgacagcacattgaattctctga

SEQ ID NO: 150090 - DNA, 1900 bp, Arabidopsis thaliana landsberg; identical to SEQ ID NO: 36219

SEQ ID NO: 150091 - DNA, 394 bp, Arabidopsis thaliana landsberg
caagttacgtgagagaggtaaagttgaatctggttcgaaatctaaagaggggaaaaaagttggaggttcgtctgttcataaacatgaaaccaagaaaaagaaagagcatgctgtgtctcatccacataagaagaaggatgtgccaaagcctgtggttgaagaagttgtggttaaggaggatcaagaacatgaagaggtggaatctgacgattctgatcagtctaataaggaagatggagaagaaggaactgagtcagatggcaatgaaggagaatctgatggcaatggagatggaagtgtgaatgattcaagtgcatcagttgatgaagaagtggaagaaaagaatgaggaagtaactgtaaacgagataagtaaaaagaggaagaggagaggt

SEQ ID NO: 150092 - DNA, 746 bp, Arabidopsis thaliana landsberg
tatgaattcctgtacttttgaatattgaactcaatttctttgattttggtgtttggtctagttcttgataagaatcttgttatgaaactttttttgtattttgttatgtattgacagtaatagaaggtactctgaggggatatcttgtctcagagatggaaagtctttgaaaagaatcacaacggcttctaagaaagtgaagacgtcaagtgatgttctcactgacaaagatctctctcatttggtttggtggaaggaggtaaagcttgttttgttttttggttaagaaatttcaagtcttgatattgtttcgttatatactgattttttatattctgtgtctactcagagattgcagacatgtaagaaaccatctactcttcagcttattgaaaggcttatgtacaccaatttacttggtttggaccctagcttgaggaatggaaggtcagttctcttctgagactattagaagatttcatctcaccttctagatgtcagcctttaatcatttttagcttggttatcaaatgaaaagtagctagtgtatcttagtatgacttaagctactttagttgtgaaggctctaagtactttagttggaaacaatccattagttttattcctagtccactactttagtccagtttgttacggtaactttgtggcctttatgtatgcaatatttggaattttcttcatttcagtttaaaagatggaaacctcaactgggagatgttgcagtt

SEQ ID NO: 150093 - DNA, 568 bp, Arabidopsis thaliana landsberg
aaagtatcatccggtcaccggaaaattgattatttccgatgccaataggtgaccgtcagaatccgagtgtggagaagaagaagaacctcttcaggctatgtccgttttggcagaggagaagcaccacttcttcatcttcaacacagaatccaagccaaaactaccgtagccgccatggacatcggaatacagatatttccgccgtctctaagccttccttgactatgtcttccgtcgccagatcacttcttccagctcgccgtcgtctccgactagatccttccagttatctctatttcccttgtacgtcttctttgtttaagtttctgccgtctatttagcttgattccgaaatagtctagttctctggaaatcgattgatttggttctggattctgattggtttagaagctctctctggaagtgatttcgtagatttttggatttccattttttagagaacgaagttaggatttgtggatttgtatttgtttcagatgaacctggtaaacaagttcgcagcgcaataaagcttaagaacactagcaaatctcatactgcatttaag

SEQ ID NO: 150094 - DNA, 191 bp, Arabidopsis thaliana landsberg
agccatccacatgcagtgccaaccaagtggacctttttggaggagatctgattggtgacttcttggattctgggccaacagaaacatcttccaccaacaacaacgagaactttcaagaggcggacttgtttgctgatgcagcttttgtatcagcctcggctcagggagctgaatttgggtcacagacacag

SEQ ID NO: 150095 - DNA, 587 bp, Arabidopsis thaliana landsberg
attctgactctgttaaagaaacgagtattcatgcctagtccagtagcttgtgactccaatacccttgcccaattcaaggcagaagagtttgctaagaaaggttctgggaggagtgataagatagaagatgtggaattaagcgaggaagaattgaatatgtatttggatttacatccattctctaatgcctcgccttacactgttgtggagacaatgtcacttgcaaaggcccttattctcttccgtgaggttggcataaggcacttactggttataccaaaaacctccaatgtaagtgattttggtttctccttttccctcgtccttatcagtttctgtagacactagtacgtgtgatacttgaacttgatacctatagatgaataataagtaaaatggtgaacacagtagagtctcttgaattttgtatcattcgtttctttggggaatcaataacaaaactctaagtctcgaaccatcacttagttctctatatatccgatagctctttggtttcttggttcgtcagttatcgaatatccaattcatatcaaattcgttaatttgcattgcagagacctccagtg

SEQ ID NO: 150096 - DNA, 3264 bp, Arabidopsis thaliana landsberg
  unsure (1)..(3264): unsure at all n locations
atggtggagaaggtgatcatatattttagatggaaagatcgagcgtacagcttgatgatgaatgggaaaataactctctccatgttagaaagtaggatttgctcgaagtttggattagatgaaagtaaggttaagttgcaaatgaagtacaatgcagtgatgttgggaccaactcaagagatacacattaatgatgatgaggatgtcggtgtctatatatcttcgggtgaaatggttagtagatatcctttgactgttgacgtcatcactccaccggaattgcccgagnnnnnnnnnnnnnnnnnnnnnnnnnnnnnaagttctattggtaagaactatgctgatttgggttcaaatgatgatgaaatgagagataatgcaaccatcgtgataggcgaattagagggacaaggaacagaactaaatggggcaatagtggtggttgatgatactcaagatcatgagattggatcacgtgatgatagggatgatgatgataggggtgatgaatacgttgagccaccgtctgatgtagaatctagtcagtttaagaaagaatgggaagacggtatcggtttgactttgcgacaagaatttccaagtagggcagcattgcaggaagtggtggacaaaggtgcatttgctaatagttttggttatgttattaaaaagtctgataaggagcggtatgttctaaagtgttcaaaagcgaattgtgactggcgtatacgggcttcatgtattcaagatacaagtatttactctattagaaggtacaacaagatgcatagttgtacccggattagtaagagtagtacaaggatgaggaagagtaaatgtacccctgaattagtagcagctcttcttcatgatacttttcgtggactgttggaaactccagctcctaaggttatcatggagcttgttcagacaaaattaggtgtgaagatatcatactccaccgcattgagagggaaaaggcaagccgtttatgatttaaaaggtagcgcggaagatagctacaaggatatcaattgttatttgtacaagttgaagaaggtaaatgaaggtacagtaacatatctgaagttggatgagagcggaaattccaatacctattcatagctttggcagctagcattgaaggctttcaagcgatgaggaaagtgataattgtggatgcaacacatttgaagaacgaatatggtggtgttctagtctatgcctcagctcaagatccaaatcgtcatcattatatcatagcggttggcgtactcgacggtgaaaatgatgctagttggggatggttctttgagaagctgctaagtgttgtacccgatactccaaaattggtatttatgagtgactgaaattcaagcctcatcaagggcatacgtaatgcgtatactgcggctcatcacgggtattgtgtttggcatttatcccaaaatgtcaaagctcattccactaacatcaacagagacgtactcgcttggagattcatggagttaagtcggatttatacctggtcagaatttgagatggagtatagagtattcaaggtgagatatcctaccgcggagaattatttggaggattcaaccgtgaaagaaaaatgggctaggtgttgttttccgggggaacgatacaatttggacaccagcaattgtgtggaatagttgaattctgtttttctcaatgcaaggaagtattctttaatacccatgctagatgcgatcatggccaaaatttctttttggttcaatgaacatcgcaaagatgccgcttcaggatctgttgataataagtttgtgcctttagtggagaactacttgcataatttatgggtggatgctgagaaactaaaagtaaaagagctaaacactttccggctcgagtacaatgtccggggagttgaagggaacgaatatttggtcaacttgtacttcaaaacttgcagttgcaaggtgtttgatatccaaaagtatccatgtattcatgcgtaagccgctttcattgtattcgatagcgatacaacaagaactcgaggtatggaattacatgaattggtttctaagtattattgggcggaattgtgggcattggcgtaatatgaaactatttatttagttccggatagatcacagtgggatatcccggatgatatcaaagcgttgaaggtattacctctgcctcggaaaaagaagaagggtttaacattaggattccatcttaagctatatagtatcgttatatagcttaggattccatccaccggagaaagacgtccaaaacgtcaaaggactcagaacaaaaggaggccgatacagtctctgcaatggttgttatttggcactcgtagtatttgattttaatcatgtaaaccctattcgcgttgtgtgcaactatgtaacactacactttcgttctgtaaaactatattttatttcactcggaattcaagtttaacgataatactaagaatacaggtgaaaactatgatttgacgataatactgagaatactgggtaacactattatttgacgataatactaagaatacaagggaatgctatgatctgacgataatactgggaatacaagaataactatgaaagatatgaaaattcgaatttatgtttgtttgaaacatcaaatattaaataaactgtaaagagataaagaactcttaaaaattaatttaaacgaattaaataaagaggaaaaatatttggtcaaaatacatcactacaagaatattaaccatctgtagcgtccgaataacgctatataacgatactatagcgtttaagaagcgctctatcttcttccgtcataataggtcgaagacataatataatggattttctttgtgctataatactgttagttattatagcacattctttgctggaatattatattttacaatagcacttcttctttgttattaatgatattattcaaatcgatttgaatttagattttaaattttaataattccaataatcaattcataatagatagaaatcgaaatctttttattgatataaatgttttacataaaaattcaatgaaacaaggaataaactatctctcaagaggaaaacaaaatacaaagcaaacatgattggaatcttctttggcttctaaaaaatcatggttgcgatgaccacacttcttcttcttcttctttgcagntcacaattaacagttcacagcccttccatgaagacgagcataacacctaacagaagacattaa

SEQ ID NO: 150097 - DNA, 1603 bp, Arabidopsis thaliana landsberg
ctgctactttgttcgagtgctttcttacatgccgtcggagattgttgacaggtttgtttgttacatttttcgatttttctccgttttttttcctctcttctgtatgttgctaaaatgtgattgttcattgtaagggttaagattttgtttttatcgaattttggtgttttgggtgtatatccccccagttcctttgtttgtgtaataggtggaagctgaaaggtttttcaattttagggtttttggggttttttgttgactgaaatttgttaatttggggcacaatttgtctcttttggattgagttctgtgcgatttgtggattctagttcgtgtgtggttaagagacttggaaattagaggatttttagctaaaataatcgttaaaggtggtacctttcctgatacagaagttagattatggattctatgttgtttttttaggtgattctctgtttctgagtttgctctgttctagtttcttaatctgttcgtgatggagtttctttcttgctcgctgagatgctgcagattatgaaaacttcttcttgtagctacttcggtgtaattacgttcaggtggttaaaaattgtttctttgaaaggtgctttgatccgaagtatagttgaacctgttgcttgaaattttgtgaagagagaaaattggagttctcgagcatgttgctaatcttgcttctatcccctttgattctaccaggaaaaggaagtctcgtggaacacgagatgtagctgagattctaaggcaatggagagagtacaatgagcagattgaggcagaatcttgtatcgatggtggtggtccaaaatcaatccgaaagcctcctccaaaaggttcgaggaagggttgtatgaaaggtaaaggtggacctgaaaacgggatttgtgactatagaggagttagacagaggagatggggtaaatgggttgctgagatccgtgagccagacggaggtgctaggttgtggctcggtactttctccagttcatatgaagctgcattggcttatgacgaggcggccaaagctatatatggtcagtctgccagactcaatcttcccgagatcacaaatcgctcttcttcgactgctgccactgccactgtgtcaggctcggttactgcattttctgatgaatctgaagtttgtgcacgtgaggatacaaatgcaagttcaggttttggtcaggtgaaactagaggattgtagcgatgaatatgttctcttagatagttctcagtgtattaaagaggagctgaaaggaaaagaggaagtgagggaagaacataacttggctgttggttttggaattggacaggactcgaaaagggagactttggatgcttggttgatgggaaatggcaatgaacaagaaccattggagtttggtgtggatgaaacgtttgatattaatgagctattgggtatattaaacgacaacaatgtgtctggtcaagagacaatgcagtatcaagtggatagacacccaaatttcagttaccaaacgcagtttccaaattctaacttgcacgggagcctcaaccctatggagattgctcaaccaggagttgattatggatgtccttat

SEQ ID NO: 150098 - DNA, 463 bp, Arabidopsis thaliana landsberg
cactgctcggtaacaacaaccccaatgctcctgctgatgttgagcctgacgaaaaagatgaagatcccgctgatatagatcttcctcagcctcaaaggagtactcgagagaaggagattcttcaggtttcttttgaaaatcttattatgtttttttcttctcaaagggggatttttttatatttaaatttgatttttggattatttcaggctgtaaatatgcttggagatgctaatgaagttttaaatgagcgtgccgtagttgttatggcacgtatgagtcataagcttacagggcgtgatttttcttcgtctgcaattccgagcaatcccattgctgatcataataacttgctcggaggagattctcatgaagtcgaacatggtttgtctgtgaaagttcaggttcaaaaactaatcaatcaagccacttcccatgagaatctctgtcaaaactatgttgg

SEQ ID NO: 150099 - DNA, 1011 bp, Arabidopsis thaliana landsberg
ctagactaaacacagacaaggtaaaaaaaaaaaaacagcttaccaaatttttctgctccttcacggcaaatcgtcaccgccacattatctcccaaactaagaatctagggttttctaagggtttttaatcttcgaccttctctccttctccagttttaggtttcaggtttatctctcgtttctttcatcgaatcttttgatctttaggttagttttgcttctcgttgatgttactctttccattgttatctatggttctggattcgtcgtatccttcacgatcttcatgtttctgggtttttaaaatcatgctgcgaagtttcagtaatcgtgtctcagactcgtcaatctttgtacttgattctgaattgttgagtgtttgtgttgcagtttcagatggcgagatacgctgctggtgcggttgattgtcctggttctcccaaatctgtgcgaatcgttgtggttggtgataagggcactggaaaatcaagcttgattgttgctgcagccactgattctttccctcccaatgtccctcctgttttgcctgattacaagttgcctattgaattcttccctgatggtatacccgtcaccattgtcgacacttcctcgaggtatatatccttatataagttcactgtattgctggataattactctcttaaataaagctactttgagagaaaataatttctagtttagagaaaagaatgttgcttttatatacaatattgttgttgggattgcactgtgccaactgtttgtgggtttaggatattttaagctttggcagctttgttgaggttcttgaagtatgttttgatgtttttgttcgttggttcaggccagaagatagggacattgttgctgaggaattgaagcgcgcagatgcagtagttttgacatatgcctgtgatcgacctgagactctcgaacgtttgagtgaatactggcttccagagcttcggcgattagaggtttgattttcatctctctgttttcagtttg

SEQ ID NO: 150100 - DNA, 799 bp, Arabidopsis thaliana landsberg
agaggtatgtgaagggagtttagttcctctgcttcacatgggtgaatgcattgctaaagaactgcaagaggcaaaaatgaagccccttgaagctgggaatcctctgcgtgtaggtgtgatggccactagcgccacgttatcagcagggttctaccaggagaaactccaaagcaatgtcagtgttctattgtgtccattggaacaacatatctatcatttgtctaagttcgtataaagctagtattatccatcgtatgaagtgactctgtcattatggaaatgaacagggatttgaggctgtgcttccagacaaggcaacaatggagcacacggtgatcccatccatagaagcaatgaagagaaaagacatggaaggagcacggaaccttctgaggatagcgttgcaggtactgctagtgcaggcggtaaacgtggtgatgctcgggtcagatgagatgcgggacctcttgcctggggatgatcctctgctaaagaagtgtgttgatccaatggatgcactagcaaggtctgccatcaaatgggcagagaatagatgctcttaagggagtttgtgtgtgtgtatatttgtgaatagaaatatagctcggctgggatgaaattatcaagtgtaaaccagtgtttgatagaaaactcaaaaccaaagtctcaacatgtattggtcaaaacaagtgtgaacatctccaaagccaaaaaagtctgaacatgtgttggcttggatgcaatgtgtaatatcccttattattaatacagacaattattagtggaataaaaagatgaa

SEQ ID NO: 150101 - DNA, 2173 bp, Arabidopsis thaliana landsberg
atgagtgtgtacaagatcgagccgcagatggaacattattcttccctggtcaacgttaccagtggacaagggcagtttgaagaggccatgtatatcataaagagtatgccttttgagccagacaaaacggtatggggtgcattattggatgcttgtaggatatataacaatgtagggcttgcacatgttgcagctgaagcaatgtcgagactcgaaccagagagctcaacaccttatgtactgttatacaacatgtacgcggatatgggactatgggacgaagcttctcaagtgagaatgaacatggagagtaaaagaatcaagaaggaaagaggatccagttgggttgactcctcaacgtaaaaagcagcctttatttatgtttacttaaacataaaaattgatttgggatcagaattgagatagaaattgataaggtactcttgaaagttctctcttttctcaattctcttcatcatatttggactcatattccaacgacatcgttttgcgaatccccatgattcttgtttgcttctatctgttttttttttccagtgcccaaaaataaaataaaaataatctttgtctagattgattgaaaatttgatgttttcctttttgcagccattcaaaatattggtggcttcaaattcacctcttacacttgtagcttgtgcttcatccaattctttgcagcgattaaaacacacaaaaagttttcctttttacacttgtagcatatgaattgctgactctgaatttctcaaaaaggtaagcctttttttgttcatatcttgctttttaatctcagatgtatttaaatgatcttaagtatctgtgaattggtccagtatgattaggagattcttgacactttccaaagatcagaggttttgattttcttcttgagctaatacaaattttctgatcgcaatattagctaatctccaaatccaaatccaaatcatttgaatttgttttcttttttgccacttatggatatctctaaggactaagagtgaattgagagatgaaattagggtttcaactttcaatttgaacagggaagctgattttttctttctagaacatcaatgtatcttagactcttacacatcttaattcctaatatagttgtgttattcaaagaaaaaaagcttctctcttatgcagataagggcattgcttcattgatatggttaagaaatgttagttgcgtatcctgcgggaactatcaacaaattccaaatccctattagctgctatgccgctttgcgcagattcaagacctcgccttttggtcctctgattagttgttctgtctccccaagatcaatagttccttgtagcaatgtagagtgttatcattcatctttttctacaaaatatcaaattcagcctcgaaggagatggatggttagtaattaaagttttcgtctcttcggcaagttatacatccatctgtatactgctcctaagttttttgtgtttgtgcttttgatttcatcaagttttgtaactcacgcaacaactcgatttcatcggatgatgagtaccgttcatcacccaacatagctataagtcttttaagacgttacaggactgtgattggacgcggtgaaggcgaaaccttaaaagtaacttcctttttttatttgagtcattcttgctttcttctcgattgtatatccatctttcattaatttgtttgtgtgtgtatcttcaggaattcatatccgctggtgtgaatgcatatgcgctcggctgcacagatgaagatttgagaaaagaactaatggctatgaaagattcgggtttagagattgagagaatggagaattatggcggaagcacacagactaaatccaaaatttcgctgtctgaggttagttagtttgttagttacaacgaacttgtgatatcatcggttaatatatgagctaagtcgtatcagatcaattttaactggcggttttaattccgcaggtagatgaatgcatattgtggcttaggattgtattcatcacgatcttgtgtacgccgcaaccaacagtcataagatggtcatcgactccttcggtttctgatgaaattctaagcaaatgaaaaggcttttgcgcggttatagcaaatgcatactatattagaggaatggcttggtaagatcaat

SEQ ID NO: 150102 - DNA, 435 bp, Arabidopsis thaliana landsberg
tacaacaacaacaacagaaaaaaaaaaacagagagagttaaaaaaaaaaagaaccagacataatgttgtgtttcagatctcaaagagtgtttatacttgagactctgtgtttactctcttcgtttcttgtggtcgtcactggaacaacatcgattactggtaagacttagatttttcaaaagttgtttctccatttttttaatagttataagatttttcaatttgtgtttgattgattcaggggttggtaacgaagaagaaagaggtgtagaagaagaatggagaacaagtgtaatagaaagagtaattgcagaggaaagtggagagaactcatctctgattttagctgcaaagagaacaagaagaaaagatcctgctgataatttcaaactctacactggtggatggaatataagcaattcccattatttgact

SEQ ID NO: 150103 - DNA, 966 bp, Arabidopsis thaliana landsberg
tgaaaaattatgaccctgatgatggacttggagatgttcccaagaaatcctatgcctctgtggtaagtagtcaccctagaggattcattctcgatcttgttacatcttattttaggctttactatatcacttctggagttttctattgatatgactttcataacagttgaaggttacgaaagataaatttggagttccagctgtctctttaccttctccaaagacgatacctaaagaccaagaacatcaagcgccttcagatccttctacaggccagatactcaaagaccaaggtgaacaagcatcttcagatccttctcaagtgatagaatctgatacagtttctgagtctgttgatgcttctgaaaatgggcacaatcaggaaggtagtagttcacagtatagctgatcctcaagttttcaattataatatttggtggtctatattctcatatctattcatgacatggttttatacttcttttgtcttttttattagcggtagctgagggtacatctatttatgtgagacatcttccttttaatgccaacattgacatgcttgaggctgaatttaagcaatttggagctattaccaatggtgggattcaagtcataaatcaaagggtaagattgaccaatcaactaacacttaagtattggaagcttgaatccttttttcggggacaaaggaacacagatcttacataattattgttctgaacaatgataatttactgtatgactggcagggccttggttatccttatggttttgttgagtttgaggaggcagatgctgcccgcagagcaatagaggtttatattctaaccttgaatataattttcactttcttgtttagcattatagaaaaccgatatgaaatcatctgaatgatgcaggcttcacctgtgaagattggtggactgagagcttttgtggaggagaagctatcgacatcaagag

SEQ ID NO: 150104 - DNA, 541 bp, Arabidopsis thaliana landsberg
cagatggggtactacaagaagaagtggcatgactatattgggaaaggttgctgttccaaaaccgattaacttaccaagccaaaggtatttgatgagcgcatgatcacatttagacttcatatatatgtataatctcgttccctgaacacttctcttctgaatttaaggttagagaaccaaggccttgacccaaatgtagaaattgttccaaagtaagtttgtacctgtttgagatgctatttccctcattctttttcgtcctcaaattttagatggtttaattttcttctggacatctattttaggggaacacttagttggggcagtaaatcatcactgaatgcttgggggacatcatccttgtcaccacgaactgaaagtggccctggttcaccaagccacctcagtaatcgaccttcttctggtggaagtgtcactcgaccttcaactgccgatagtaacaaagcacatgactcttcttcttctgttgcatgggattcgaactcgcggccttcatcagcatatggggtgtttccatcta

SEQ ID NO: 150105 - DNA, 1384 bp, Arabidopsis thaliana landsberg
atgttgcttgtcatgttggcgcagaccatgttccttgctaaaccagcaaacttgcgagtgaagtaaaaaagttccggttacttgcaacaaaagtaacagagcaattaacagatatctcagaatttcataagaaaagtttgggtattgtgtcggaaacagttttcgcccgcgaataaatcagccatctgatagcacaagctcaaaagtcaactccattgttttaatatatatatactataagataataaacgcaagcaaccttttagttgcaagtttcattttagtccctcccaaaaattacattatctcttactcttaatacttcttaatgtcttagtagcagttaattaagcactagtgtcacacttagaaagaaaaagaagaagacttttccctcagggagattactcagcaaattttgatgataaattgtggctgaggaaagactgcccaattccccactactaataaagtataatggacaatatttgctcttacccgacgaacttttcttcgaatcctatttttttggatgtgttacaagcaaaaataattgtatgggccactaaataatgaatatatagaagaaaaacggtgtaaaaaatgaaagaggtgagggttgaacacttgaacctctttgttaagtcagagtcccaatcttcagtgtgttgtgttgtgaagatgaaagaaaggtcatgaagaaaatttattgtatataagattaaatattaaatactgaaaaaataactttaaataatcgattaatctctgagaacaaataaatgaaaatgcataaatagcgttttcgttgaacattgtggagaaaaatagctaccaaatttatttaattttgggttgttatcccattggtttagtcatgataaatagttaaaagatagttagactatggttaaacttaaacacattagtaggatcctatagttaattcataacgagaaattaggacacgtggctctgtagcataggtgaatcttgccaacttatcacgcgcaaccatattaaccgccttttttaatcatcaaccgccttttctactttgtgtttcatctggaccgtcgattgatttagacttaaacaaatagcaaccgtaggatctctccgaaatctaaatccgactaggattttgggttttgcttccctctatatatatatacgaaaaaagatcgatgcctgttgatcgcattcggtatcctttttttttttagttccgatgattgtttagctgagtttcttattacttttctatatattatgtatcaaatctccttgtttgatctatgatcatctttctagggttttgctcgatttcccggattcgggtgggaaatcatcatctgatcgattatcgcggccggacatggag

SEQ ID NO: 150106 - DNA, 1854 bp, Arabidopsis thaliana landsberg
tcacattcgcgcaatgatgatctctttagcgctctttctatcattttcccctgtttttgtctgctccttcttcttcttcttcttcttcttcttcttctttgaggctatttgatgatacattcgaagtcaactgaacagaagttgatgtcgctctgttttttggcggggctacaaaatttgtacacattgaagagaggtcttctcttctttgctaccttttttttgttagcagccatggctgagtgaatattcttccacctgtctgagagaagggtattctgatttgctcaataatacttatatgtttttaattttgattaattctgttcaattggtagtctgagtgatgaaattagatagatctcagagcagcaacagaagcagtatctgagaaaaggtctagtctttgtattagttgaaacttgtaaaccatattctttcttcttagctactaccttttcaatgacatgcttctgaatggttattacagcaataaggatacatcagtgttttgcttgaaaagtaaattgtgggcctaaaaccatttttaaagaatgaatgaaacaattatgaaagtggtcaactttgggaacaaagtttgtgcctttgtggtgctctattcagctttctctaagtttgtgacaacaaactgatgtgagttgtatcttgtttttgttcaagattgtgacttttgtggtgggattatttcaatttatcagtttagcctacctaggttctgttgagtggaattattggttctcagatctcaattaatttgagaactcttatcagaaactattccaagataagaaggtgttttttttctctatctcatagcctcattggtatagacctttttgtgttttggcagtattgttttgggagaaaccaactggattctaacgaaatattgttaaaccaaaggtttgttttcttggagattgagcttagctttgtttggatcattcggccacttgtgtgagagtttgattgatggttagtcttttttatatcatcatcatgctttgatagttgagagagaggaagaggcagaatcatcacaagttctgataaaggacaaaaccttttctgatgcaactcacgttttcacttcacaagctccaaaagagtttacttgggaaaacaaaagtttgacgaatgcaaaaccaattttgttagcataagaccaaacctacttcttcgtctgcctctttgcctgtatttgagttgttcttgttttgagagaaagggtgagaaaatgtctgcctgtttgtgtcttgttttcctgttcttctctattgttgcagaagcaacgtattctccaggaggtttccaccatctttcttctctaagactaaagaagaaggtgtccaagtcaaaacatgagttaccttttgaaactcgttacttccctcaaaatcttgaccacttcagtttcacaccagacagctacaaagtcttccaccagaagtacctcatcagcaaccgtttctggccaaaaggtggtcccatctttgtttacactggaaatgaaggagacatcgactggtttgcttccaacaccggtttcatgctggatattgctcccaagttccgggctcttcttgttttcattgaagtatgagcttttgcaaaccacttaacctcatctgtaatttgaagaaagagactccaaatgtttataatggtgttttgtctgcttgttgcagcaccggttctatggagaatcaacgccatttgggaagaagtcgcataagtcagctgagacattgggttacctaaactctcagcaagcgttggctgattatgcaatcctgataagaagcttgaagcagaatctatcgtctgaggcat

SEQ ID NO: 150107 - DNA, 317 bp, Arabidopsis thaliana landsberg
atggcgaataaacccaggaaaatggagagctgtgaattggaaattgacaaagtcacagcttttagagaaagctgaggaaacaaagaggtgaagagatacctcgccggtttgggagaagcaggaagtgaggtaattttcgtcgacccagtactgcaaatcaccaatccaaagagttcgaacttcttcgagcgtctgaggatggtgataagagccttgcggcggctgcggaggatgcatcatcgccatcgtcgtctattttcttcactggcgcgccaatacgttaaacctaaacccacgacgcgacgggtcggctcgcc

SEQ ID NO: 150108 - DNA, 612 bp, Arabidopsis thaliana landsberg
ttttttcttctgtggtttagggaatgggctttgattttaaaccgtttgttcatccaatctacaatgcgataatgtcccgcttgacaaatcaagatcaagaccaggtctgtagcataaatccccctttttagtcttgtttatgaaaatccatacttcttcgggcaatagacttaataatcttatttgaactctttctattcgtcattatgtttaattacagaattggaaaagcagatttctgcgtttgtatttgtaattttgtgttatttacatttcgtaatatctcttcccttcaacaggaggtcaaggagtgtgctatcacctgcatgggtcttgtgatttcaacatttggtgatcaactgagggcagagttaccttcatgccttcctgtgcttgttgatcgaatgggaaacgaaatcactcgcctcactgcagtaaaggttgttcttgtgcttctgttgaagcttttattttaaaattgtttttagctcaagtctctgattgtgtgggtgtatgcaggcattttctgtcattgccacttctccgcttcacattaatctatcatgtgtcttggaccatttgattgcagaactaacaggattcttacggaag

SEQ ID NO: 150109 - DNA, 3502 bp, Arabidopsis thaliana landsberg
tggaagctgggatcgttgccaccggggctgataacattttacaacctgacgtatgcaatggagaggagctggcacgtactagggctgggatatgacccagcgctaaaccaaacagcaatagagaatgcagcggtagtgcattacaatgggaactacaagccatggctgggtttagcattcgccaagtacaaaccgtactggtccaagtacgttgagtacgacaacccttatctccgacggtgcgacatcaatgaatgaatgaagagatggtggaggtagtatacatgatgaagcactcaaaggaaactaaataagtaaaaattgttttcagtttaccataatactaggaatcagcagacaatcacacatgacgattaattaaatagaatctcttgtttttctcaaactcagaaaaactcaccaaaggaaactgaacaatcttttcactcggagtgttgttcttcacttgtttttttggtatcaacgtgactgaaaagcatatgggccttagaatgcgatgctttgtctatatacagtgtgtacagtgagtaaaactgccccgtgaatgcacataatgggccttacactggcccatcattgctttactctcctctctagctagcgacgagatgagtaaaacgccatctctcggagcggaacggctctgctctgctcttatcctctgtctgatccgtctccatcaccatctccgttctacaggtaaattgttttgcttcgcgctcctccgattgattattcactgatcagattctaataattataatcctgagtcctcgtttggttgatgttgaagcaccgcagatcctctttgaacttgttatttgtaagcttcttcttagtttctccttaatcgcagtgaaatggagattccggaggggacatcaaaagattcagaaaaggccaacgaacaagattcagtgtcatcaattggggcaaagaaacctccactggaatctccagccactactaatgctgcaagcggtcgacttgtttatgtccggagaagagtggaggttgacacatccaaagcagctgctagcactactaatccgaacccgcctcctactaaggcaccacttcaaataccttcatcacccgcacaggaaccaacccctaccagccataagttagactgggaagagcgttaccttcatcttcaaatgcttcttaacaagcttaatcaatctgatcggaccgatcatgttcagagtaagctcctcccagtatcactctaattcctaaccttgatgcttctgtttttttttatatatatatgtttccactgttattagtgctttggtcactttcctccgccgagcttagcaagcatgctgttgacttggaaaagaggtctattcagttctctctcgaggaaggtactctactcctttacttacactctctcacttcctaccattgctgaatcatatctgtttggcacagttctagttgaccatccataagtggattattcatgctgctgcttaagccattttttccatatctgctgacaactatataggctttagtcacatgcttttaggtttgtagctaggaaccatctggaatcaagttcatgctagaaataatgttgttgatcctctgttgcagcgagagagatgcagcgcgtagcagctttaaacgtgttaggaaggtctgtgaatagtctaaaatctacatcaaatgagtgaagggaaatgggcagcgtaagtgttgttagtactagtcacttggctttattagattgtcttgaatcatcttggtccctgttagactgatcagtagaaatatcttggtgtctatttccagaacacatgtggtggatgcggagaaagggcagtcagtaatgaggcagaaaggagcattatccaagatattgttacagcagtgattgtgactcgaagagaagatatatatatttgacaggtatccatattttgttctaccctaagaaggattcataatctggaaatcatactattagtaaatcattttggagagatgctcccacgagttaggagatttcaatagattagattagatccctccaaaggtcttgatgttaaactcctgagagacaactgtcgcaacgactgtcacttgggcttaagatcccattgcattctgtatctatctacttacacctgtacttgagactcagcctaatactaccaagtccattgcattttctgttatccccctgttttatatatagatttgaagagatgagatttttaaattgctaaaaaagagagtctctacaatttcacaaacttgtaccaatttcaggaaagcacaatgattggacaaacttggacctatatatttcacatgtttagaatatattcaactcccttagtgcgattctttgaatcaagttttcagttataagctccaacctgtaaaaatggttgcagaacaaaatgatgaggaaattttttagtatcacaaagtccagattcaagttttttttcaattgtatctaaaacacacacaactttcagattgaataaaatctgaatttcattctcagcaggggctaatataaaaatgacaaaaggagaggaggaggataggagctatatgtctactatttttagttttttagccaatgagagagctccacttcataccccacttttaccgatcgtgccatttcacagtcactctcacccatgtcgcgttgagcgcgtgtctacgattttttttgggaataaaaaaaatcattcatttttggatccacgcacctcattctcaaaaacccggcgcgtgtcttatttttttttgttttcttctctaaaccaaagtaaaccgaaccgagatcaatttgaatttcaaaaccaatgtaaacccatcaaacccatcgctgtgaaaacaaaaagctcggccactgtaacaacaaaaatggagacgacacagaggtacaacttggaagagaacttaacggtcaagtactcgattctactagagtggaaagcaaatttctattacaaaatacaaattaagtgtttagcttcggaattgtggtgaatgaattcgagatgggtgattcagaaactgacctctcaccttccttcttgcttatctaccgttttgtccccttcgaaaatcctaatccggcagagcccaaattaccaagtctcgacctttctcctcaaccatgtcgatatgagccttctcttatccatctgcggcagagaaggctggtttcctcatctgggtccttgtctccacgcctccattatcaaaaatcctgaatttttcgagcctgtagatgctgatatccatcgaaacgctctggttgtttggaactctttgctttctctgtatgtgaaatgtgggaagttagttgatgccattaagttgttcgacgaaatgcccatgagagacgttatttcgcagaatatagtgttttatgggtttctgagaaacagagagactgagtctggttttgtattgcttaaacgaatgcttgggtcag

SEQ ID NO: 150110 - DNA, 804 bp, Arabidopsis thaliana landsberg
  unsure (1)..(804): unsure at all n locations
ttaaacaagaacccattttatcaaactactactacgcttcgatcacatctcatcgatctttagagtctgctttagctcacatcctctccgtaaagctcagcaatttaaacctaccaagcaacacactcttcgaactgttcataagcgttttagaagaaagccctgagatcatcgaatccacgaagcaagatctgatagcagttaaagaaagagacccagcttgtataagctacgttcattgcttcttaggcttcaaaggcttcctcgcttgtcaagctcatcggatagctcataccctctggaaacagaacagaaaaatcgtagctttattgatccaaaacagagtatcggaatctttcgccgtcgatattcatcccggagcgaagatcggaaaagggattcttttagaccatgcgacgggggtggtgatcggagagacggcggtggttggagacaatgtttcgattctacacggcgtgacgttgggaggaacagggaaacagagtggtgatcggcatccgaagattggtgatggagtgttgattggagctgggagttgtatattggggaatataacaatcggtgagggagctaagattggatcagggtcggtggtggttaaggatgtgccgccgcgtacgacggcggttggaaatccggcgaggttgattggtgggaaagagaatccgagaaaacatgataagattccttgtctgactatggaccagacatcgtatttaaccgagtggtctgattatgtgatttganaaagtctttgtttttggttgttgttgttgtttatgg

SEQ ID NO: 150111 - DNA, 569 bp, Arabidopsis thaliana landsberg
atgaggatgagactactgaagaaactactgaatcgctagacagccaatccacaagatacataaaaggatgtctcctgagcacatgtgggacttcccttacagtattccttcttcgtgaaacttcccccttatataaggtaacccaagaatctcatagaccatcttatgttagttacatataaatcgtgtcacagggcatcatactgaaggacctattatataatgttttgctactgacaaaggaattggtccaattggtaattctacctccttggtccagtttcaaccaatttttttttttctagtacaaatgaaattgtgaaacagaaactatgaataaattctttagctctactatgtgtctagactgtagttataaacataattctattatttttcttggcatcttctcatagtcttattttgctatgctacaactgttacagattactgaagttgcaagcaccgttgtaagatctgatgaagaagctaggaatggagacattcgtgagagcagagaatatggaaaagctttatttttgtcagccaaagattttgtgagtgggaat

SEQ ID NO: 150112 - DNA, 1180 bp, Arabidopsis thaliana landsberg
ggaagaatctttcaactatcactccctacaaattccatgagaaaattcacttttccaatcaaaacgtaaagaagaagaggaagaatggctacatgtcctcctttcgatttctcgaccaaatattacgatggtgacggcggatgcagaggagagcagcttcttcggaggcacgacggtgctcgatcaaggcgttggctacgccgtgattcttggttttggtgctttctttgccgtcttcacatcttttttggttagtttccgtttctgaattacaaatactttcttatgaaaagcaagacgacttctgtgatttgctcgtgaccacaaaaaatagtagtcatatggtttatgctaacaaataaaacaaaggatgctaattttcattgtttagtagacgttgattattctttttttggctttttgttctaaaattttcattcttattaaaatagatattaatcaaattaattcatatatcaagtttcgatagaaccttttttggcctattaagtattaaaattgtggcgaccgtgtgtaattttaaaaataatatgtatattttcctaataagtccaccataataatattcgtgactaaatgaatgaaggtatggttagaaaaacgatatgtgggagctcgtcatacatcggaatggttcaatacagccggaagaaacgttaagacaggactcattgcaagtgtcattgtgtcacaggtaaaactataattctaatcattataattgatgatataaagttataaaacactccatgatcttcgactgtagaatttaactgtagaattttggttaaaattattaatttggtttatgttggtcgatgagtgaatagtggacatgggctgcgaccatacttcaaagttcaaacgtagcatggcagtatggggttagtggaccattttggtacgccagtggagccaccatacaggttaattccgaaacaaaaactatacaatacaaacttttcgtttctatatgcataattgatgaataatcgatgatgattgatgaacaaagtaggtgctgttgtttggtgtgatggcgattgagataaaaagaaaggctcctaatgctcacacggtctgcgaaatcgtgaaggctcggtacgtaaaaaccgaactaactcaaaacaacaattatttttatttgcttagtcaataa

SEQ ID NO: 150113 - DNA, 943 bp, Arabidopsis thaliana landsberg; identical to SEQ ID NO: 57964

SEQ ID NO: 150114 - DNA, 2278 bp, Arabidopsis thaliana landsberg
cttgtctgggtaagctttaaaatgtataaacccttccttagaatctgtctgaaggatttgaggcaaatttacagaattacagataaggtacgcctcctctactcaggcttcctctggaagaacaaggatcctattatcacagctattcccgttattgctatcgtgaagaaaagccttttgttcgaaacaccgttcccatctcttcttcttctaccgtttccatctccttctgctgctctcgggatccttctgtacatgacatgagtttagccaaataaaaaaggattaagatctgaatcagagagtttccaaaataaaacaatgcagataagaacatgtacctggatgattcaacggtgccagggcatttggtttcatggttatatctttctctcaatctaacatagctgttgcattgataacagagttctgtccggttgccacatacttcctaatattcggaacatcgagcggatcagaaaatcctttggttggagagaaatggcaaaatatgtgtgcaagtcagaacgaatacctgatgctcggcaagatcaaccgcaggcaatggaaactcacagaactcgcatgttacaatcctcttggggcaaatttctcctttatgactatcgaaaatctcacgttctatggtctctttgcacatcgagcatgctatcttctcaatacagaacagaaagaatatcgtaagaaaatgtaggtcatttcagtcatctagcagcatctagaaccatacaaaaatcctgagtctaaaacagaaacaaaacaaaatgtttgattaaaaaaaaacagaaacaaaataaattcctactaatcttaacctagtaattgaaacagtcacaaccttgcaaacacaagctgcggttgggagagttcttgtcaactagaaaactcaagaacagtatgcaatgacaacacctcaggaacaagcgttgataactagctgtttgtgttacagacttaagttaaggagactaataaatgcataagtgatctaatattttttaattgaaacaagcttaaaacccgttggagggacattaacaaaatatttgagagcagaatcatatcatatgaaacaatgtaaatccctttgatcaacctatttggacgtcacactagacaaagtatataattttgatggagctaacaaagagaagctcttgaaatcaaagatgatagatgtggaaattaatcaaacagaaaacagtttcacaactagtaagaaacagagtaatcagcgtaccggagcatgtgtgttcaagtagtgttcctcagcatgctttttgggtaccatatcaccacaaatcttacatttttctaaatttcgagcacaatgtacacgatgcagatcgatattcagtgatggaatgtctctgtcactgaaaacattaagataatcagtctcatgggatcaaccatccaggtagatgctaccactgaacatacacaagggattagatttactgatcccaaataagaattacggcattcaaaaatttccagcctcagcagactcaacacaacaataactagacaaagcatacacagatatctttagaaagtttagaaactaagcaaacaatcagacaaatcgtagaaagcatgacgataaacagaagacaataaaactcttgtacagacaccaggaagctgatacataatcaatagatttatcatgaaggactttaagcaaagtaacaaaaaagaatcaaccttttagtaggtgaccaaataaaaatgaactcttttagaaaaaaagattgtatatcactaatccatccatcgaatccctagttatacttgtaatcaccgacacaaaccgtggaaccaaactgaatcatacagctcacgagtatctttaatgtgacacatatattctcaattgcaatcaccgatcaattccaaaattgttataacctcgagtccagaatatcgaattacacaagtcatcatcgaacgattacgcaacaaagagaaagcaaccaatcgccgaaaaaaactatgatcaaatagaaacaagtcaacaaccacagacagagaaatcaatggttttaggggggaaacaaaccagtggttgcagacgatggtgatttctccagtcgcagtctccatcgtcaaacgagaaacaaacttctatttcgaagcaaataacagatcagaggagaaccaggacgatcagagacctgaagaaacgaaatttcagaatcacgaattcaaccacggatctttgaacctcgttttctcggattttgagatataa

SEQ ID NO: 150115 - DNA, 672 bp, Arabidopsis thaliana landsberg
tcacatccggtatgagaaagtgaaggtgattacagttttcttgatcacatctttagtttcattcttttttagaaccaagtgatatcttcatttgcattttcagccaattaatattaataacaactgactgatttcttaaatgaacttcaggttcttcaatctgtgattcccataaaagatgaagaggtggttcttggacaatatgaaggatatagagatgatccaactgttccaaatgactcaaacactccaacgtttgccacaacaattcttcgcattaacaatgaaagatgggaaggtactgtgtgcatgtgtccccttcactcttcatcttttcattttctagatcaagtttggaacatcatgtgccaaaatccctttttagttgtagtggttagtaacttgtgtattgatgtatctctcaggtgttccttttatactgaaggccggaaaggcaatgagttcaaagaaggcagatattcgcattcagtttaaagatgttcctggcgacatattcaaatgtttgtatcgagaccaaatcaaaccttcccaaatacttgaaatttggttggtctaacctctcatgcaatgcaacaggtcaaaaccaagggaggaacgagtttgttatacgcttgcagccttcagaggccatgtacatgaagctaactgtaa

SEQ ID NO: 150116 - DNA, 1944 bp, Arabidopsis thaliana landsberg
atggcccatgaatatgattgtggctccgttaatcacgtggtattaaaactcacacacgaccatttctcatctgcctccaattatagcgaaaccgttacaactcgttgttcacgtgagcatcaaaatgtgcattactcctttcaagttcggcaaatcctaattatccattttaatggactgcagagactttaattagagcttatagaactttaaacattttggtttaaatcttaaaatagaaatttaaccaatctcaaatgatttttttttcttttcttttggcataagtttcataactcgatgatgaatgctacgataatatagacatacagtatgatgattagatgaaaacaggtaaagaagaaaaagtgtatcgtacgccccactcggtgataatgattaatgagactatatatgagagtacccaaatatgattttttccactcatgaaacgtattgcactatttctgcattattaagatagacccacaccacctgttatagtatttagtatttttacacatccactaaacgacgagaattgacaaaatcacacaaacctttctcctttattcatttttgtttaattcgggtcccttgctttttagcattcggctctcattcttatcttcccatggatagatagtcatagttatataatacagttcaattgtatatatgcaccacacacgagtcttctatttatgtggatactacgtttcaaaataattctattaacttagagaagataaactttcttaatactttttccgtttcactttacacacacctcaaaaaaattcttgtttcatttgtgactgcatgtaaatgtcgttacgttacttgaatttttacacaatggtacgtgaaaaaaagaaaagaaaaaaaaatataattgagagaaaatataataggatcacaccactacaatacatgggctttaaattcatcttttctatatattataatttgggccaagacttttatatcatgatgggcctatcaatgtaattagaagcaattgcccgatccaataaccttaattaggaaaaaaaatcgttccctgctctcttttcttttcagctctgactcggcctctatctctctcccgtcgtcagccacattcaccggtactcatctgaccaatctagggtttcgcagtcatcatcatgtaccgtacggcagcttcacgagccaaggcccttaaggtcaatgtcctacttcacttgtttcccttgagattctgttttttttaggagaatgcttaagtattgaacaatttgtatgattcagtattttggatttggattaaagggtctcttcgattcttatagatcttgattcaatcttatcgctttatagcagctagtgccacgattcatgctttttgcaggtttatgaaatgtctctgtttcgaaagttcttatttttacaatgttaattgaatcaagagattaatgatgcttagaatgtgtgtgcgtgtgtgtttatagggcattcttaaccacagtttgcgagcttctcgttatgcaagttctagtgctgttgcaacgagttcttcttcctccagctggctaagtggaggctactctagttcacttccttctatgaacattcccttggctggtgtctctcttccaccaccactctctgaccatgttgagcctagcaaacttaagaccactactcttccaaatggtctgactatagccactgagatgtcttcggtgagagcttcttttagtaatcccaacatcaactttctgttaaaaactactggaaagtgattttgagtgaaattttgttcagaatccagcagcttccattggtttatacgtagactgtggttctatttatgagactcctcaattccgaggagcgacgcacttgcttgaaaggatggcattcaagagttcattggaacagaagcccattttcggcctt

SEQ ID NO: 150117 - DNA, 435 bp, Arabidopsis thaliana landsberg
tctcgtcttcgccagaaactcatgcggcggtaaccaatcgccaccgtcttcgttatcatcgtcatcgtcgtcgttatcctcgatgcttctccgtcggttatcgcggtattctccgcggagactcttgcaccagtccggcacgttaacaggaagcgtcgactctcctgcggcggaggaaccggcggagggtcgattcgacgattttttaccggatctgtctgatgaagagattttacggcaagaatctggcgaatcggagtggattggattaaagagatcggattcgtcgaattcgagacctgaatcggaagcggtgaagtaagacggctgatcggtgccgagaaatcgatagctaggcctagcgtagtaactctttcccgtcgccattgaagaagagattttgtttaatttttaaaaattcgaatgttgagattt

SEQ ID NO: 150118 - DNA, 424 bp, Arabidopsis thaliana landsberg
atcttaaggcagcgttggggaagcaaagaaaagatggaaagagtgctcctttacagccgcttaccactatgcaacgcacgcatataaggcgtttggtggagaaacatggtgatgacattgaggttagatctataatcctactgattctatcatttttgctctgtgtgatgatactctttctaagttctaacatctattcctttgaacagggcatgtaccgagacaggaagctaaactggatgcagcattcggttgcaacacttgcgacagctatgtacgagatatcagatttacaaagacaagaacccgattttagtttcatgatgatgatgatgatctctgtatcctttgttcaattttgttataaacttgcaacaacactacaatggttatgaagtttctataaatacaaatacagtttttg

SEQ ID NO: 150119 - DNA, 2615 bp, Arabidopsis thaliana landsberg
atggtgggtggcaagaagaaaaccaagatatgtgacaaagtgtcacatgaggaagataggataagccagttaccggaacctttgatatctgaaatactttttcatctttctaccaaggactctgtcagaacaagcgctttgtctaccaaatggagatatctttggcaatcggttcctggattggacttagacccctacgcatcctcaaataccaatacaattgtgagttttgttgaaagtttttttgattcccacagggattcatggatacgcaaactccgtttagatttgggttatcatcatgataagtatgatctcatgtcatggattgatgctgcgactacgcgtaggattcagcatcttgatgttcattgttttcacgataataagatacccttgagcatatatacatgcacgacgttggtacacttacgactccgttgggctgtcttgactaatcccgagtttgtttccttaccttgtctgaagatcatgcattttgaaaatgttagctatcccaatgagaccacgttgcagaaacttatctcaggctctccagttctagaagagttaatactcttcagcactatgtatcctaagggaaacgttttacaattgcgctctgatacgctaaagagactcgatatcaatgagtttattgacgttgtgatttatgcacctctactccagtgtctgagggctaagatgtactcaacaaagaactttcagatcatcagttcgggtttccctgccaaactagatattgatttcgtcaatactggtgggagataccaaaaaaaaaaagtgattgaagatatcctcatcgatatttcgagggtcagggatctagttattagtagtaatacttggaaggtatacatcttaacatttgagcatatttgtttaaaaatattcctccacaaaagtttctcaccgtaacatttttttgttcacttatgttaccaggaattctttctatactcaaagtcaagaccattgcgccagtttcgttacatatcccatttgaatgctagattttatatatctgatcttgaaatgttgccaacgcttcgtgagagctgcccaaaacttgaatctctcatattggtaatgagtagctttaacccttcttgagagctcctatttacacatattgtttgagataacctcttatatgtacctctctactcaatttgttttcttttatttattcttttgttcctgtttttgcaggaaatggtcaagaaccaatccacgcgacgtcatggggagaagcgagaaccaaatgtgatggtttcaacagtgccttggtgtttggtatcgtcgctcaagtttgtggaattgaaacgttcaatcccaaggtatgaaggagaaatggagctagtaagatatttcctgacgaattcaacagtcctgaagaaattaaggctcaatgtttactacacgaagaaggcaaagtgtgccttccttacagaactcgttgcaataccaagatgctctagcacatgtgtagtccttgttctttaattacttgaaaggtattgatgaacttttcgtttaaggtcaatcttttggtcgttaaattagttgattttcggaggctttgagccacatgtaaattttgcagttaagtccttcttatgctggttgctgctcatgtaataatcatcaatcaccaagtttgtttcgaatttgatggatacttccaccaagtcgctgtcaaatattttgtatgctcccatggataattattttgtatttttgtaactgaatggtgattccttacatttcaggcttgttagctttgcaattttgttatttgtattttggtttgagttaattacgagttggattgttcttcttacctactttatggttcctctgaataatctattcgtagtcttatcaaaaccaaatccaaaaaagtacttgtgaatctatttcctttttaattattgcgttcataaatgaaaatgacaccattttcatcatagtgaggagctcaaatttcaaaacttttgatccgagacatctaagtgtaccgaaatttgaaacgggttatgtctccggtgtaatttcgacggcggatttcgtcgattacagtcgtcgccaccgtatattaatacacatttggaagctcaaataatgggcttcttgcttgaagcccattgacgtcggtactattgtatttgcaatgattttaaacgtcgtcgtaaaagtaataaatcagaacccctaaaacccttttcatctctccggacacttcttctcccgacactttcctcttcaaatcccaaacgtgctatctgactttggaagaaagagagattcagagtggagaatattatggaaggaactttagatgaagagaatctagtcttcgaaaccaccaaaggtatcaaaccaatcaagagtttcgatgacatggggatgaatgataaagttcttcgctgcgtttatgattacggatacacgaaaccatctgagattcagcagagagctttggttccgattctcaaaggaccagacgtcatagctcaggctcagtccggtactggtaaaacctctatgattgctatctccgtttgccaaatcgtcaacatattctccagaaa

SEQ ID NO: 150120 - DNA, 1450 bp, Arabidopsis thaliana landsberg
cttcctccggagtcctgactctctactctcactctccggcgctttaaacttacgttctccgtcgtttactctgtaagttttctgccttagagtctccgatcgcctcaccgcatgcattctgtgctcgatttctctttttcttcgctggaaaaattgccctaatgttctcgatttcgaaggtttttgtgctatgggttacttttttccctatattttatagttcttaggtaacgatacctgcgtcttactgtttttgttcattttgttgtgctttcaccgtttagtcgctgatcggagtatttgactgtgaaaaatccttcgttttttggtttttgtttcatatacatcggattgatctaccttttgtgctttgatgtttgttttttgagcctatgcgttgttggcttgttataacttcacgttcatgtgtggattttgagattttggtagtgactgtgggtttctttggtggctataggttgtaaaaatgagttctagggctggtccaatgtctaaggaaaagaacgttcagggtggttctaggcctgaggttgaacagttggttcaaggtttggcagggacgagactggcttcttcacaagatgatggaggagagtgggaggtcatttccaagaagaacaagaacaaaccaggaaacacttctggaaaaacttgggtttctcagaattcgaatcctcctagagcttggggtggtcagcagcaagggagaggtagcaacgtatctgggagaggaaacaatgtatccgggagaggtaacggcaatggtcggggcattcaagctaacatatctggtcggggacgagcgttgagcagaaagtatgataacaactttgtggcacccccacctgtatctcgccctcctttggaaggaggatggaattggcaggcaagaggaggttctgctcagcacacagctgtgcaggagtttcctgacgtggaggatgatgtggataatgcttctgaggaagagaatgattccgatgctttggatgattctgatgacgaccttgcaagtgatgattatgactcggatgtgagtcaaaagagccatggatcacgaaagcagaataagtggttcaaaaagttctttggcagcttggatagcttgtcgatcgagcagataaatgaaccacagaggcagtggcattgtccagcttgtcagaacggacctggtgccatcgattggtataacctgcaccctctactagctcatgcgaggacaaaaggagctaggcgagttaagctccatagagaattggctgaagttttagaaaaggatctacagatgagaggcgcatctgtcattccttgtggtgagatttatgggcagtggaagggtttgggtgaggatgaaaaggattatgaaattgtctggcctccaatggtcatcatcatgaatactagactggataaggacgataacgataag

SEQ ID NO: 150121 - DNA, 388 bp, Arabidopsis thaliana landsberg
gtatgatgcctgcatggaagtgacagacagtgaccacaagcccgtacgctgtgtatttagtgtcaagattgcccgggttgatgagtcagtcaggagacaagaatatgggaacatcataaactcgaataagaaaatcaaggtcttgcttggagagttaagcaaggttccagaaacaattgtcagcaccaataatattattctccaaaatcaggattcaactatcctgcgtatcacaaataagagtgagaagaacatcgctttcttcaaaataatttgtgaaggtcaatctaaaatcgaggaggacggtcaggcacatgaccaccgagcaagaggctctttcgggtttcccagtggctggaggttagttagttgtcccctcatacttgca

SEQ ID NO: 150122 - DNA, 1109 bp, Arabidopsis thaliana landsberg
  unsure (1)..(1109): unsure at all n locations
acgctgctggtgctgaggntgttcaggtaccgtgccttatgaagctttgaactattttacagagntttatataagtttcattgaattacttaaacagagtataacctttagtagattatcacaagaagtcataatcagaaaatgagtgcttgccacattgcaaatcaaaccttggcttaaaagatcaatctttgtccattaaagaaatgttctttcatttatgcaggcttgtgatattgaagatgatggtttgttcagttttgatgtgcacagcgatggggacggtcgaaggtatttagattcacatttcagttttttggcctcttaagatccatcttcttttccctcaagaacccactgtaagattctctgtttttgcagacatttgaatgcttctgttaaagaatccgaaaatgatggtgaatcgagctccaatggctcagtgtttggagactttccaccaaaacaatcttcatattcttgtattcagatgaatggaaaagaggtctttcgctttgctgtaaaatgtgttcctcaatctattgagtctgctttacaaaaagccggtcttcctgcttctgccatcgactggctcctcctccaccaggttatttttcttatcagaattttatcgttaattcaagttgcatcgatagtagatatgaattcaagcttaaatgggggaaagtttagagctttcgtatgtctatcagtatacttgtcattattcagtttccattgataatggacttgaaattcgagttgaaatggcgaaagttttaaacttttatactggaaaaatggttaaacagatagtttttgaaatatatttgcaggcgaaccagagaataatagactctgtggctacaaggctgcatttcccaccagagcgagtcatatcgaatttggctaattacggtaacacgagcgctgcttcgattccactggctcttgatgaggcagtgagaagcggaaaagttaaagcaggacataccatagcgacatccggttttggagccggtttaacgtcgggatcagcaattgtgcgatggaggtgaatggaaaagtcaaacaatgtaagttaacttcagagccaaagctttcttctc

SEQ ID NO: 150123 - DNA, 918 bp, Arabidopsis thaliana landsberg
atggaagagattttcgattcgagttcatcggagtcgattcttgttcaagctacagagattcaatcaagattagctgaagcagcaagagggatacttaccgagtttgagaatgcggtgtttcgcgaaccttcggttgttcctgtccctggaggaactatacatccattgacaaggtatgtgatgaattacctcaacttgatctctgactatagggaaacgttgattgatctcatcatgacgaaaccatgtcggggtttgaaatgtaccaatgatcgaaacgatccggatatggatatctctgagcttgaaggaatatctccgttagctttgcatatgatatggacaatggtgatgctacaattcaatctagaagagaagtctttgcattacagggacgaacctttatctcacatcttcgtcatgaacaatgtccattacatagttcagaaggtcaaaagctctccggagctaatggagttgataggagacatgtatttaaggaagcttaccgggatatttagacaagcagctaccaagtatcagagagctacatgggccagggtgaggaatagcttttgagattaatgatgacatgagagcggaagcttctcttccggtgtatcgaagagcgctttaagagagagggttaaagctatcaatacaatggttgaagaggatcacaggattcaatcgacatggtcggttccggatactcagcttagagaagaactcaggatatctctatcggagcatcttatcccggcttatagatcctttcttggaagattcaggggacatatagagagcggaagacatcccgaaaactacttgaaatactctgctgaaaatcttgaaaccgcagtgttggatttcttcgaaggatataccacagccccacatttgagacggtctcagtga

SEQ ID NO: 150124 - DNA, 377 bp, Arabidopsis thaliana landsberg
gaaaaattcgataaacctcgattgatcccaaattcccaatggaggtttctgttctcacctaatttagctccatatccctcgcagtccgattcaagtgagattcttctaagttttttggaagaataatggtgttgccgttgatgaaactgggcacactcgccgtcaaaaccataagtaaaccattggctagtcagctcaagcaccaagctaaggttcatcccaagtttcgtcaatctatcatcaacttcgctcaggtaaattgggatcctctctgattctaaactcgcttttgagattcgttgcgcttataatatgtcttgcgttttcgattctgctgagtttttggaaacttcggaatataggatttgttacagaaa

SEQ ID NO: 150125 - DNA, 1271 bp, Arabidopsis thaliana landsberg
ctcaaaagataagttcaagaccaagttctgaactctctgaaggattttcagacaaagatcttgcgaaaacaacgggtcaagagaagagaaagatatcaggaagatctctatctcttccatcggtagaggtagtagaccagacaccaggttggccattactaagaacatccactttagctactccaatggttcaacatcagactaggaaaatatcagttgtcaattgggtcatgagcttgcctgaaagatttccacatcatccgaatcagacttgtcaacagagcttttgtgataaacaacttaaagacatactcaaggacataaacagatggtttagctatgatgttctcaagacagcaacatcagatttctctttaggtattaactaacgtaactactctgttttatcgtattcatagccactttatcggattctttttttttggtttacagagaatctgatcggaaaaggaggatgtaatgaagtttacaaagggtttcttgaagatggtaaaggcgtggcagtgaagatcttgaaaccatctgtaaaagaagcagtgaaggagtttgttcatgaagtgagcatagtctcttctttgagtcactcaaacatctctcctttgattggtgtatgcgttcattacaacgacctaatctctgtttacaatctctcttccaaagggagtttggaggagactcttcagggttaagaaaatactactttgttctcttaaacatgatcttgacacacaatttcataaagagttcattaatagttcagtttctgtaggtaagcatgtcttgagatgggaagagagactcaagatagcaatagggttaggggaagctcttgattatctacataaccaatgttctaatcctgtgatccacagagatgtcaaatcttccaatgttcttctctcagatgagttcgaacctcaggtattaaaaaactactgagaacttgtaaatatatgtaagaaatcataaagatgtgtggacctttaacggattttgttttgcgagaatagctttcggatttcggtctttcgatgtggggatcgaagtcttgtcgatacacgatacaaagagatgtggtgggtacatttggatatctagctcctgagtactttatgtatggaaaagttagcgataaagtcgatgtatatgcctttggagtagttttgcttgaactcatttcaggaagaacttctatttcatctgatagcccaagagggcaagagagtttggtcatgtgggtaagtgttggt

SEQ ID NO: 150126 - DNA, 414 bp, Arabidopsis thaliana landsberg
ttataatttggcaggtggggtagcagctctagcattcggggaaggagggcacaacaatcaccatgcttttgagttctcagctcgacacggcttagaatggtggcaacttgatatgacttggtacgtcgttaagttccttcaagccatcggtttagcaactgatgtcaagctcccatcggaagctcagaaacaaagaatggcattcaccagcgactgatcttaaaaaactacatggttatgcctaaagtcaaaactgtcggttcgattgaagctatgaaggttttaaaaaaggattttgttctgcttttttgtgtttacttaaaggtatatatctgtgcaagagattgtatgtgacaaactgattatgaataatatctataattacattcaatacaaaaggaagcaaaaaaaaga

SEQ ID NO: 150127 - DNA, 1071 bp, Arabidopsis thaliana landsberg
actgaactaaaaccgagtattcagagtggacaagagatggatggtgacggtatgccacaaaatccacaccgtattgcaaccctgatctcaaaacccagttctttgatcgtaaatgtgaataagctttgaaaaacattggaaagtttggtctttttgatttcatgtagagccatgtatctacttcattctccaagcaacgaccttgaagagagattttgatgcatttgagattgtaatgcaaaaagaaagcttcttcaaaagataactgaatccatttcttgattttctctgccgatagaacgagtctgccaaaacaacaacggtcaagaagctcagcttgctctggctcaaccgctagaagcacattgcaacttgataaggtacccgaagactctgtttcggctagggagcgctggagctctgagactgattttgaaataggttctgcaagagcttttgcttcagctcctttccatttccatctaggcgccatggaattgagctgcatatatagcactaaaaatcaaaccttttgaccaaacgattatgtaaaagcttttcttagtctattaccaactacaactcttataatctagaaaatcagataaacattgtcactaagacatagttgttaacgtttaaggtatcttgaagaaccaagtaggaattggaatgagcaaaaccaagagcttttgattcttttcccacttttgtattcaaaaatcaatcgtctatgaagcggaaactgtgacattcaaattttaattgaagaagcaatcacattcagtcattgaacttgtcctaacatgacagtaaccatgaagagaagagatttggttaaaaacgaaacctggcgtattgatttatgaagacaaaacagaggatatgaaggactcgggaagcagggtcaacaatggagagagctatgcttcgaggatccaatggagagctatgcggtagtgaaaaacgtaatctcgtaaaaattattgttgatttcgattgcacagtgaaaatcgaaaagaaatagccacgaagattcttcgaaatcgagaggaagagatcgagaattga

SEQ ID NO: 150128 - DNA, 1524 bp, Arabidopsis thaliana landsberg
ctctctttcgtcctccgagtaacggatctgtacttaatggtcacttgagacttcccttaggctaccaaatggacgcttcttatttctgtaagtagtctcttaattcttctctcaagattttgtctataatgattaatgttggctaatgtattaacttgtactctcagatcttaagctaagatggaacataccctgtggaccaaacagtgtgattacattcccgggagctgtttggttaaagccatggtactggtggtcatggcctgttcttccactaggtttctcatggcacgagcagcgtcgcgccactatagggtaattttaaatttttaaatgatgataactccctcttaagctctgtatagtggctaataataatgatcttgcaataggtactcagccgaaatgcctttggttataatccaagcaatgttttaccttggaatcatagtggttacacgactagctcgtcctaacataaccaagctatgttatcgccgctctgaccgcaacttaacaacgatccaagctggttttaagttgatcgcgcttctctctgtagttgcagcctacatcttcccattcttcaccatccctcacactatccacccactcatcggctggtcgctctacttgatggcttcttttgctctctcttccatttcaatcaacactctcctcctcccaacgctccctgttctcactccatggctaggaattctcggcactctccttgtcatggccttcccttggtaccctgatggagtggtcagagccttgtcagttttcgcatacgcattttgttgcgcaccctttgtgtgggtttcattccgcaaaatcacatcgcacctccaggttttgattgagaaagaggtgttgttcccgcgattgggagactcaggggtcacttcaggcttcagcaaattgtattagggagtctttatttgacatattgtttctctgtatataaaggattattattgtttcattcacattacatttatatcaactcactctaaccttctttcttttacctagtcaaagtatcaatttcggtagcctgatttcatactcttcattattgtttttaactcactctcttggatttaaagatttgtagcatgaaaagttaaagaacacaaacaattgagcacactctgtttttctctctgttgtttatttgggtccctctttgatttttcctctctagttacaaaagccccctagatccaggtcaagctgtgatgtagctagaatgaaattacaagtagagaccatagagattcctttggattattattaacttgcctactagacttgagatagtatgcttcatatagaaaactcctaatttgatgaagagtctagtctatattctctagggttagaacattttaagattaataacgaaaccacctttctccatagctccgaaacacacttgtacgcacctactcatcacacaaagatattgaacaaaataatgaatcattcactagaaaaactgtagacgaagaatattaa

SEQ ID NO: 150129 - DNA, 461 bp, Arabidopsis thaliana landsberg
atgcagggcgtggacgtggacgtggaaggggaggacgtggaagaggaggaggacgtggtggtgatggtggtttcaacaacagatcagatggaccaccagtccaggcagctgcttgagagtgaggtttctcttacacaaacataaaaagaagaaaaaagcccaagtcgttggatgttttttttctatctccttgttctctcactttctttctatgtttgcttcttctgtccatcaagaagacatgtttgccataagtgtatctcattccccttcttttttttttactatccattgattgacagtgttttagcttgtggtctgttttgtttagagtcgcttaggaatatatgttcaatttattttatggttggtcgtcgtcttgggtttttgttagagaagaactactgaggcatcctcttttcttttcttttttcctctgttttgtagttttgtttaggtga

SEQ ID NO: 150130 - DNA, 2943 bp, Arabidopsis thaliana landsberg
ttacacacgtgtgtgtatgtgtgagaaaagaactatagtgtaaaaaattcataatggaagtctgcaattgtattgaaccgcaatggccagcggatgaattgttaatgaaataccaatacatctccgatttcttcattgcgattgcgtatttttcgattcctcttgagttgatttactttgtgaagaaatcagccgtgtttccgtatagatgggtacttgttcagtttggtgcttttatcgttctttgtggagcaactcatcttattaacttatggactttcactacgcattcgagaactgttgcgcttgtgatgactaccgcgaaggtgttaaccgctgttgtctcgtgtgctactgcgttgatgcttgttcatattattcctgatcttttaagtgttaagactcgggagcttttcttgaaaaataaagctgcggagctcgatagagaaatgggattgattcgaactcaggaagaaaccggaaggcatgtgagaatgttgactcatgagattagaagcactttagatagacatactattttaaagactacacttgttgagcttggtaggacattagctttggaggagtgtgcattgtggatgcctactagaactgggttagagctacagctttcttatacacttcgtcatcaacatcccgtggagtatacggttcctattcaattaccggtgattaaccaagtgtttggtactagtagggctgtaaaaatatctcctaattctcctgtggctaggttgagacctgtttctgggaaatatatgctaggggaggtggtcgctgtgagggttccgcttctccacctttctaattttcagattaatgactggcctgagctttcaacaaagagatatgctttgatggttttgatgcttccttcagatagtgcaaggcaatggcatgtccatgagttggaactcgttgaagtcgtcgctgatcaggttttacattgctgagaatttctcttctttgctatgttcatgatcttgtctataacttttcttctcttattataggtggctgtagctctctcacatgctgcgatcctagaagagtcgatgcgagctagggaccttctcatggagcagaatgttgctcttgatctagctagacgagaagcagaaacagcaatccgtgcccgcaatgatttcctagcggttatgaaccatgaaatgcgaacaccgatgcatgcgattattgcactctcttccttactccaagaaacggaactaacccctgaacaaagactgatggtggaaacaatacttaaaagtagtaaccttttggcaactttgatgaatgatgtcttagatctttcaaggttagaagatggaagtcttcaacttgaacttgggacattcaatcttcatacattatttagagaggtaacttttgaacagctctatgtttcataagtttatactatttgtgtacttgattgtcatattgaatcttgttgcaggtcctcaatctgataaagcctatagcggttgttaagaaattacccatcacactaaatcttgcaccagatttgccagaatttgttgttggggatgagaaacggctaatgcagataatattaaatatagttggtaatgctgtgaaattctccaaacaaggtagtatctccgtaaccgctcttgtcaccaagtcagacacacgagctgctgacttttttgtcgtgccaactgggagtcatttctacttgagagtgaaggttattatcttgtatcttgggatcttataccatagctgaatgtatttcttaggtcttaattttgatgattattcaaatataggtaaaagactctggagcaggaataaatcctcaagacattccaaagattttcactaaatttgctcaaacacaatctttagcgacgagaagctcgggtggtagtgggcttggcctcgccatctccaagaggtttgagccttattaaaagacgtttttttccaactttttcttgtcttctgtgttgttaaaagtttactcataagcgtttaatatgacaaggtttgtgaatctgatggagggtaacatttggattgagagcgatggtcttggaaaaggatgcacggctatctttgatgttaaacttgggatctcagaacgttcaaacgaatctaaacagtcgggcataccgaaagttccagccattccccgacattcaaatttcactggacttaaggttcttgtcatggatgagaacgggttagtataagcttctcacctttctctttgcaaaatctctcgccttacttcttgcaaatgcagatattggcgtttagaaaaaacgcaaatttaatcttatgagaaaccgatgattattttggttgcagggtaagtagactggtgacgaagggacttcttgtacaccttgggtgcgaagtgaccatggtgagttcaaacgaggagtgtctccgagttgtgtcccatgagcacaaagtggtcttcatggacgtgtgcatgcccggggtcgaaaactaccaaatcgctctccgtattcacgagaaattcacaaaacaacgccaccaacggccactacttgtggcactcagtggtaacaccgacaaatccacaaaagagaaatgcatgagctttggtctagacggtgtgttgctcaaacccgtatcactagacaacatgagagatgttctgtctgatcttctcgagccccgggtactgtacgagggcatgtaaaggcgatggatgccccatgccccagaggagtaattccgctcccgccttcttctcccgtaaaacatcggaagctgatgttctctggtttaattgtgtacatatcagagattgtcggagcgttttggatgatatcttaaaacagaaagggaataacaaaatagaaactctaaaccggtatgtgtccgtggcgatttcggttatagaggaacaagatggtggtg

SEQ ID NO: 150131 - DNA, 702 bp, Arabidopsis thaliana landsberg
atgaacactgaaatcgagataagaaacgtacccaatacagagatcagccgagagcaaaaaacaaagaagaagacggcgcttgaaggtgaggaagaaggagcgattgttttcaggtctttttggatcatacgacgtcggttccttaaacgggcttataaatatttatatgggccgggtaagcccaattcaatagtaatcagtagatctaatttattgtctttctctcgattagctttttttttttataacaataatccgttgttgttgttgttgttgttgttaccaaattcggataatctctcatcggaggatcgttgttgttgttgttgctagggttcttatcgatttgtaatgtacaaaactaaattaatcccggtgatgaacgaggatgctgtgattgttcaacaaacggattcgattcaggatcctaaggtaactccagatgatactgtagttgattcgagcggggatgttcacgaagccattgatgatgatgttgaagcttcttcacctatggagctagattctgcggttacaaatgacgctagggttctcgaaagtgagagatcggagaaagatggtgtcgtagggagtgaggaggtagatgagattaaaagcgaggatgttttaattgataaggatgatgagagttctgaggttaaagaagaagaagaagaagaagatggctctgacgatcaatct

SEQ ID NO: 150132 - DNA, 183 bp, Arabidopsis thaliana landsberg
aaactaatgtcgacttctaagaccataaccttcactctcttcatagcaacactactctcgccctgcaacgcagccacaaacgctacaacgcaaccgctatttccagcgattctaatctttggcgattcaacagttgacacaggtaacaacaactaccactcacaaacaatcttcaaagccaaa

SEQ ID NO: 150133 - DNA, 1145 bp, Arabidopsis thaliana landsberg
cgtcttccccattttgacaagaactcacttaagattttgaagtcatggaaatggggaacgggacaggacccgggatgtcgggggcttttagtggaggcggcaacgagattttgggaatgggaggtggcggcggcataatgggaggcggtgatatttcacatatgagtcctgaagtaaaatggatatttgagatggcttggtatggtgaaactgtaagatatgatgggttaatttgtgaggagcatccccctaagctctcttcagatggtatttgggagaaacttattattaaatcggcaggtctatatttttggcaatatcgtcttccgaagctcgagattgtcatcttgctcgtcttctttctttggcaaggctttaatatcttgtttaagaaattgggtctttctattcccaagttatcctctatgatgcttgtgagctcttcttcttcttgtttgtctttttttttttcttcaaaacttgtgtgtttgctgctgagaaaatcgatgttgcattgcaggcagggctactcttgaatgttctagttactttatcgggagagaactcgatcattgcggatatcttggtcacgaaaaacagaatcgacgtagcaggatgccttggatcatttggattcttgattttctggttcctcaaaggtgtaagaatggacgtcaagagaatcttcaaggctgaagcaaaagcaagagtcactggagttgcagcggttactttccctatagttgttggcttcttgcttttcaatctcaaatcagctaagaatcgacctctcactttccaagagtatgatgtaatgctactaatggaaagcatcacgtccttctcggggatcgcaagactcttgcgtgaccttggcatgaaccattcatctattggccgggttgctttatcctcagccttagtctctgatatagttggactcctgctcttgattgcgaacgtttctagaagttcagcaactttagctgatggtttggctatacttacagagataaccttattcctcgtcattgcatttgcggttgtgaggccgataatgttcaaaataataaagcggaaaggagaaggaagaccaatcgaagacaaatacatccacggggttctcgtcttggtttgcttatctt

SEQ ID NO: 150134 - DNA, 427 bp, Arabidopsis thaliana landsberg
  unsure (1)..(427): unsure at all n locations
ggagctgtcatcatatgtangggagtttttggagaattcttgcgtgatgttcttctgttaggttctgagtcagctggtgccatacctgatgctcatgaggagtctcaaactgctgacttgaatggggaggaaacgcagttagaacctgaaaacggttcaacttctgaggataacgaaagatctcgtgaaattgaagaattacaagatggtgatgtctctaaagacctggatgctgttgatccacccgctggtgaggtgatagaggaggaggtggacttcgaagatgttgaatatcatgatgtggagaatatgatggataagcaagagacacatgatttgtactgtccaaactgcgattcttgcatcaccaaaaaggttgttctcaaaagaaggaaacggaagatccgtcgtcatgagctgggagatt

SEQ ID NO: 150135 - DNA, 1272 bp, Arabidopsis thaliana landsberg
agtaaagaaccaatcccaaagctcatttattctttccttttcaattattctttcaatttttccgatcgacggaggttgatcggcgacggcataatggccggaggaatcgtctcaccggcctctctactcgacctaatcgctgatatcgtcgagattccactcaacaccggaatgttcaagaaggattgcgcagatctcactcgacgagtttgtctcttaacgcatttgttagaggagattagagactcaactcctatcgattccgccgcttcgtcgtcgtcggagaatgattggtggtctgatctcgtggtcggacttcaagccgcgaagcgtcttctctccacagctcgattccaagctcgcgattcctctgtaagcaaaaaaatctaactaactccttaaaaaaaatcaaatcacgatttgttgttcttcaatctcatgaaaattcccagattcattagaattaccggttaaatgtaattagaccattggttacaatacggttatctccgatttagctgaaagattttgaattttgttgattaaaggatggtgctgcgaagagaatctcatttcagttccaatgtgttacatggaagcttgagaaagcattgagcaatcttccatatgatctttatgatatctctgacgaagttggagaacaagtggagctagcgagatcacagttgcgaagagcaatgcagagatatggatcgttgaattcgaacaagttctcgagtgctttatctgagccaatggagagagatggttttagtaatgttataaagatcaaagctgaggaaaagcttgagagtgtttcagaaacacttcattttggtgaggaggaggagaaacaaagttcgccgcctctaaggagaagctcttccatttctttggcttattatttgtccaaagatgctgatactgatagattagacaaaatggttaacaagaacactgatgaatcgaagaaatctgataaactcacgattccggttgattttctttgtccggtgtcgcttgaactgatgaaggatcctgtcattgttgccacaggacaggtttggttttgagatttatagcacttttaatgaatttgactgtatgttgcttggttattgatattgtctctctacaatggcagacttacgagagggcatacatacagagatggatcgactgtgggaatctaacatgtcctaagactcagcagaaactcgaaaactttacgcttacaccaaactatgttctcagaagtctcatcttttcgtg

SEQ ID NO: 150136 - DNA, 597 bp, Arabidopsis thaliana landsberg
cagaagcagaagcaagcattggctaaacaattagggttaagagcaagacaagtggaagtttggtttcagaacagacgagcaaggtaaattaaaaacacacaaacaaaagatctctctatttgcctgatttatcaattttacttataagggtattttggtaaatgtgttaacagaacaaagctgaagcaaacggaggtagactgtgagttcttacggagatgctgcgagaatctaacggaagaaaaccgtcggctacaaaaagaagtaacggagttgagagcacttaagctctctcctcagttctacatgcacatgagcccacccactactttgaccatgtgcccttcatgtgaacacgtgtcggtcccgccaccaccacctcaggctgctacgtcagcgcaccaccgttctttgccggtcaatgcgtgggctcctgcgacgaggttatctcacggcttgacttttgacgctcttcgtcctaggtcctaagtctttttacttgcaaccaaagggcattttggtcgtttattaagtttcagggaccagatatgcatgtagttgttaacgtgtatgtatttttttagaaagaaagaaaaa

SEQ ID NO: 150137 - DNA, 4217 bp, Arabidopsis thaliana landsberg
atgagcgatggaaacaacgttcctaaaagccataccgcagcggtgacagagtaccagaagaagcttctacattacaacacaaagagctcgaatccagtgtccgcacaagttcgacttcaatgcatcatcattctcgtcttttgtttatgagcttagtgtaaaagcttttttggtaaaattgaactggttccaccgtttctccactgaacatcaatttaaattttggtggaatctagaggtgtgatttgtttgcctatattttcaactaaaaatatatctgaaatctcttacaatcttttttgaaatcctcttttttaaaactagctaatttttgaataacagagtatttaatatgagatttacaaatcattagttgaataacaaggaattgtaaatgattttaaataaatttcattttcaataacagaggatttagaaagatatttagaaatcattaattgaataacaggtgatttataaaaatgaccaaacttttctaaaatccctacttcaacccccttattcataactttataaagaagactaaggtaaataattaaactatagatcattgatcttaggcatccaatataaaaattaatgatgttaaaaaaagaaatttaagaaatgttaatgataatggaaacttaattaaagtaaatttagtaaactttacgttgactttaatttttgtttgtttcatttttatgatctcatattatttaatatttcagattttgtgaaactaaagataaatttatagttaacgtcatgccacatggttaaaagttaggttgcatggaaacttgcttcgaggtccgtttcccgttttcgaaacgtttcgtaaacagaaactcttcgaaaacacgaaaaatatcacggaaatacgtttcctaacaatctatgtttggaaacacgaaatagacatatgacaaatcttttttattgactttaatttaataacttaaattggaaatattaagattattaatacatatatctaattttggaacactctgaggtttaagatctttctcttgataaactagatttcaagtgacttttatattatttttgatgaaactaataaaaatgttggtttagttaacttatttaatattgatgttttggacttgtattgtttaaaccattttttctttaatatagttttatgttaatgttatatatatatatatgtatgtatgtgtatacgtttccaatccctaattttaagaaaaaatcgtttccaatccctaattttaagaaaaaatcgtttcccgtttccgaaacgtttcgtattcgcgttttcgtttccatttcattgcaacataggaagaaactcacgagtcttttgatgataaaagtttatttatttaactaaaaatttatttattgcaaaagtttaactcaatcatcaaaaaacaaatgtatataaaaaaaaagtatgtcatgagtttctcaagtgaaaaaagagtctactttcttttagctcgaagacaattctcatattctcatgaatgctagctgatcacatgttaatgcttaatctggattgatgcattgtcataagtcactcaaatttcatattagcacactatagtaagcaaatctgattggaaaacatctagtgagatgctgctttgttagtttagggaaaaatgcttatttggtcctaaggatttcgacttaagaatagagaaatggtaaaaaaatgtagaacatcatgccaatcaaatgatacaaaagtaacataaccaccaaacgcatttgcatgatctatctaatattatatgtacctattttggtttaaggtcattaataaacttgttgattagtttttaataattttgtaaagtttctcaaacaatctctttatttttatgatatttttcacaactttattttgtaaaaaaaaaaggtagaaagtcataaaccaataacacaataatttaattcattataacaatcatagattctttgttttaaatgaattacacaaaaaatttaataactttataaaaatatgaatccaataactctacatttatgaagattttatattactttttacaaatcttaaactaataacaccaaactttaacaaaaaattgaaaaatctttattgaataacaacaaattcttcataacattttaagtcactgaaacttcgaatacatcacaaaccaataacactccctaaataaatttatatagattactagaagtctggttatttgtttaaatgttaaaagatatatgaatttgtaaacttaagagatttatggaatttaggaaaatataaaaacaaaatccttattcttattataaagtttctaagaaatatactgtatatttttttcaccgaataaagatatttaataaattgagaaaaggaatagaaaagaccaaaagcaacaggctaagcgagacacacacacacgcgcagtcttcttcatcttgcttgcttctggttgcttaaccaaaacaccatggaatctccctaaatttcctcacctactcacttccaatttcaacctgctcgattcttcccctcttcttcgcaaaagccctagttttgatcatcgcacttcactctcctccgcatgagaaatcgagaaatccgctcgacgtagtagatagataaaaccacaaagttagggttttttcaattgggtatggaacctcgtgttgggaacaagtttcgccttggccgcaaaattgggagcggctctttcggagagatttacctcggttcgttcctcccctctctatacatataaaatctcttcaatagtcgtttgatgagactgttttgattgcaggaactgatgttcagactaacgaagaagttgctattaagcttgtgagtgtttcatctcttcaaagtcccaacttggatcatcaaaacttagttttttttgtgtgtgtgcaggaaagtgtgaagactgcgcatccgcaattgtcatatgagtcgaggatatatagagttcttcagggtggaagtatgcaatgaaatgtttatctctattgttattgaattctcatttggttattcatttcttgtgtatgttcgttaatgtagctgggattccaaatatgaaatggtatggtgttgagggggactacaatgtcttagtcatggatttgcttggtccaagtcttgaagatttgtttagttattgcaagaggcagtttagcttgaagactgttcttatgcttgctgatcaaatggtaatatgctttggatttgattcattgtcactgttaatggtgttttggatttaaccaacttgtttattaaacattgtgtcagattaatcggctcgagtttatccattctaagtcgtttcttcatcgtgatataaagccggataattttcttatgggtttgggaaggctggcaaatcaggtaatctttcttcatgaactctcaactttgagtttgggatctcatgactattgtatcatcactctctaggtctacattatagactttggcttggctaggaaatatagagatagctcaactcatagacatattccatataggtaacaaggttttggatgtcacagattcagcattttcagcatattgtatgtcagcttcagatttcctgacaacgggttctttattgtttggattctacgtgtaaatgattcagggagaataaaagtctaattgggactccgaggtatgccagcttgaacactcacctagggattggtatactccatcactttctataaaccctcatgataatcgcggatctttttctcctctttcactgattactttttgacatttttcacttggtagagcaaagtcggagagatgatatagaatcgcttggttacatcctcatgtatttcctcaagggaaggtgagagtcattaagtaacttttctttctgttctgattcttgtctcccaatccatctctaatatcttattctcttgtagtctcccttggcaagggctgaaagctggaaacaagaaacagaagtatgataagatcagcgaaaagaaggtttcaacttccatcgaagtaagttcttcttatatggtttacatttagaaacttatacgaatccatgtttcaaaggattatgatcaggtagagacggttgatcatagatagtactgtaactttgcaaacgttatgcagaggtcatccaacagagtttgcatcttacttccattactgccgctcacttagg

SEQ ID NO: 150138 - DNA, 567 bp, Arabidopsis thaliana landsberg
tattgatgttagactcaagtggcttggtctctttcaccgtagaaagcatcagtgtatgtccgtctctattctctttcattgacttgtgattgaactgtgtaaaggtttcgtctttagtcctatgtatgcttctttcaatgacttgtgattgaattggtgaccagattgtgtaaaggtttagtctttactcttaatctttagtacatttggatttatgagtgtgttgttgttgttgttgttgttgtagatgggaagtttatgatgaggttgaagttaccaaatggtgtgactacaagtgcacagactcggtatttagcgagtgtgattaggaagtatggtgaagatggatgtgctgatgtgactactagacagaattggcagatccgtggtgttgtgttacgtgatgtgcctgagatcttgaaaggtcttgcttctgttgggttaacgagtttacagagtggtatggataacgtgaggaacccggttggtaatcctatagctgggattgatccagaggagattgttgacacgaggcgttacacgaatctcatttcgcagtttatcacg

SEQ ID NO: 150139 - DNA, 272 bp, Arabidopsis thaliana landsberg; identical to SEQ ID NO: 50643

SEQ ID NO: 150140 - DNA, 936 bp, Arabidopsis thaliana landsberg
aaccgaaagagagtaatagagacaaaatgggttcatcatcatctccatccccgaacgacgccgtactggaatcagcccgaccttttctccgaggagagcttgaaaagatcgaccccaaactcccgtcgttaatcgccgtcctcaaaagcgtcggtgccggcgagtgttggcacaaacacggaagcttcctagatcacttaatcgatatctacaagatcctcaagctatggaaagctcctgaatccgtctgtctctgtggtctattccactctgcttactccaattcctatgtcaatttagctattttcgatccttccactggtcgtgacgtcgtccgtgatcacgtcggtgaagctgccgagtcgttgatccatctcttctgcgttgtaccgagacaaactctgattcacgatgagcttttgtttaagtactctgattgtgagctcgttgagcatcttgattgttctgaggtttcgttgaggaacgcaaaggagaaagggatttttgatggagatgaagagtggaggaagaagattaatgctttggttcctgagaacggtgttgttgtgaagcatatcaagacaggtgaagaaatcgttgtttcgaggagagttgttggtgttttcttgttaatgacaatggcggattttagtgatcagctttttgggttccaagatgagttgttctgtaatcatgatgggagacttgatgtttagagggaacaacgtgactgcgttgtggcctgggaatgggaagcctggactgtggatgaattctaattcgagaatgggagcgatttatagtacgattgtgagagaagaggagattttgatggaagagaggagaagggcttttggttctgggtttgaagtgaggaaggaaagagatgaggatatagatcttgtcgtgcctccagttttcagcttctgcaccaag

SEQ ID NO: 150141 - DNA, 619 bp, Arabidopsis thaliana landsberg
atgtcggttcccctaatccagcttgcggtaagcaatgtgttattttaaagacagtgtatatatcagaatccaaacttttgtatccaaattgtatgactggtttttgtgttttgaaaatgtttttttttcttagaggtaaaacttgtggatgttcccgaaatgaattacacatcagacgatcaaccatacccacgtggtgaaatctgtgtaagaggaccaatcatcttcaaaggctactacaaagatgaagaacaaacgtaacacattttccagtatcattagtggctctagttatatgtatagataagtggacatgagtcttgacacatttacttgagcaggagagaaattcttgatggagatggctggctacacacaggagatatcgggttgtggttacctggtggtcggctcaagatcatagacaggttttataaatcaaaacattcttgttatttctttctttgcggaagaaagagttgaaatgtttgttaaaacttcaatgtgcatgacaggaagaagaacatatttaagttggcgcaaggagaatatatagcaccagagaagatcgaaaatgtttataccaaatgtagattcgtttcgcagtgtttcattcacg

SEQ ID NO: 150142 - DNA, 750 bp, Arabidopsis thaliana landsberg
acaaaaaaaaaatataaacggaggaactaggcagtgggaccggagatccaccgaccggaaacgaagaatccatagtaagatagagcccaggggttcggtcgtatcggaccggtcggatttggattctaacgacaagtgagtggacccccagaaacgacagacgtaagcaatgacaacatcaaactcatcgccacgtcagcaacggagttctacttgcgaaacgtgtcccggcagcgtcatccacccacgtgtgttctagaagctcttctcctcctccgtatctcgacacgtgtccactccctctccttatataattgacttttctctcattctttccaagtttcaaaaacgccaagtttcagaggtaaagagagagagatactacaattgattaggataggatcaggatcatcctcaacaacctcctcctaattcctcctccattcatagtaacaataatattaagaaagagggtaaactatgtcagaattattacagttgcctccaggtttccgatttcaccctaccgatgaagagcttgtcatgcactatctctgccgcaaatgtgcctctcagtccatcgccgttccgatcatcgctgagatcgatctctacaaatacgatccatgggagcttcctggtgacatactagctctctttctctttaatctttgccggattctaaatctgagattgttctctgctgactcaaattcaattttacaggtttagccttgtaaccaaaaaatg

SEQ ID NO: 150143 - DNA, 1822 bp, Arabidopsis thaliana landsberg
agcttccgaatcagagagattgagaagaaatcaaatcgagaaaatgaggatatcgttggcgattgcatcaactgcgaagagatttgttcatcggagtcttgtggtgagaggtaatgctgcaactgtttctccctctttttcctttttctggagacgagctttctctggtaagactagttatgattacagagagaaactgagtagaaatgggctgagtgaattaaagttagatgacgctgttgctctgttcggtgaaatggtcaagtctcgtcccttcccttccatcattgatttcagtaaactgttgagtgcgattgctaagatgaacaagttcgatgttgtcatctctctcggcgagcggatgcaaaacttgggaattcctcataatcactacacttacagtattttgattaactgtttttgtcgacgctctcaactccctcttgctttagctgttcttggcaagatgatgaaacttggctatgagcccaatattgtcacgctttcttcgctgctcaatgggtactgccacggtaagaggatatccgaggctgtagctttggttgatcagatgttcgtaatggggtatcaacctaataccgtcacatttaacactctaatccatggactttttcttcacaacaaagcttccgaagcagtggctttaattgatcgaatggttgcaaaaggttgtcaaccagatctggttacttatggagtggtagtaaatggattatgtaagagaggtgatactgatttggcttttaatctgctcaacaagatggaacaagggaaattagaacctggtgttttgatctacaacacaatcattgatggtctttgcaaatacaaacatatggatgatgcgctcaacctatttaaagaaatggaaacaaaaggcattagaccaaatgttgttacctacagctccctcataagttgcctttgtaattacggaagatggagtgatgcctctcgcctccttagtgatatgattgagaggaaaatcaatccaaatgtagtcactttcagcgcattgattgatgcatttgtgaaggaggggaagcttgtagaggctgagaaattgtacgacgagatgatcaaaaggtctatagatcctgatattttcacttatagttcactgatcaatgggttttgtatgcacgatcgtttagacgaggccaagcacatgtttgagttgatgattagcaaggactgtttcccaaacgtagtgacttacaatactcttattaacggattttgtaaggctaagagaatagacgaaggtgtggaactcttccgcgagatgtctcaaagaggattggttggcaacacagtcacttacaccactcttatccatggattttttcaagctagagattgtgataatgcccaaatggtgttcaaacagatggtttctgatggtgtgcatcccaatattatgacatacaacactctgttagatggactttgtaaaaatgggaagctagagaaagcaatggttgtattcgagtatctgcaaaggagtaaaatggaacctactatttacacatataatattatgattgaagggatgtgcaaggcagggaaggtggaagatgggtgggatctattttgtagcctcagccttaaaggagtgaaacctgatgtaataatttacaatactatgatctcaggattttgtaggaaaggtttaaaggaagaagcagatgccttgttcagaaaaatgagagaagatgggcctcttccagatagcggtacataaaatacgtttattagggcacatcttagagatggtgacaaagcagcatcagctgaactc

SEQ ID NO: 150144 - DNA, 1187 bp, Arabidopsis thaliana landsberg
catactcatatcccaactttataacgctattctcaaacaagcaaagaaccttaaccaaaaagaaaacgtctacggagacatatggagaggaaacatcacttcgtgttagttcacaacgcttatcatggagcctggatctggtacaagctcaagcccctccttgaatcagccggccaccgcgttactgctgtcgaactcgccgcctccgggatcgacccacgaccaatccaggccgttgaaaccgtcgacgaatactccaaaccgttgatcgaaaccctcaaatctcttccagagaacgaagaggtaattctggttggattcagcttcggaggcatcaacatcgctctcgccgccgacatatttccggcgaagattaaggttcttgtgttcctcaacgccttcttgcccgacacaacccacgtgccttctcacgttctggacaaggttaacaataaaataacaaaaataattttgatactagtagttttttataatttgaccaacttatcttaataccatgaaaataattcttggtttggttgatgataataataaagtatatggagatgcctggaggtttgggagattgtgagttttcatctcatgaaacaagaaatgggacgatgagtttattgaagatgggaccaaaattcatgaaggcacgtctttaccaaaattgtcccatagaggtattgttcccacaaatctctaaaatttgttacgccaaaacaacaaaatctatattcaaactatgtgctaaagttttcgaatatgaatcatcgtatgagatgattattaattagttttggtgtgtggttacatgatggttacactgtgaaggattacgagctggcaaaaatgttgcataggcaagggtcatttttcacagaggatctatcaaagaaagaaaagtttagcgaggaaggatatggttcggtgcaacgagtttacgtaatgagtagtgaagacaaagccatcccctgcgatttcattcgttggatgattgataatttcaacgtctcgaaagtctacaagatcgatggcggagatcacatggtgatgctctccaaaccccataaactatttgactctctctctgctatagccacagattatatgtaataatcttaaagaccgttttacttttttttcatcgttactaataagacaaacccctttttccgggt

SEQ ID NO: 150145 - DNA, 5538 bp, Arabidopsis thaliana landsberg
atgaagatatccatggggtcggtaagcatttgaagcccttgttgattctgtaaagttgctgatgcctgttggtaagtcgtacaccatcagtggtatgactttcgtgttacaggcttgggcctatgattcaatcaacaccattggagagcgatttgggaacgtagtcaatgagaatgagattttgttgcttagatggggaagcaaccgttcccgcgcaacaataaaatcgatcattggtgaagatatcacaacgcttggtagtgaggtaaggttttggctctgttatgatagttactgatgactgagttattaattttgatggctgagttattatttttgatgtttgggttattcttatatgatggctgtcttatattgtttagttatgacttagttgtggtttagtgatggttgaattattgttaagcaatgtctgagttatacttattgatgactgactttgaacatattgatgggttttataatctcttgtgttgtaactgcgtgtgcataaaatggttatgaaggatgatgtaaacgagctgtttcatacttggccagatgaaataaaagatccagcacttgatcactgataacactatattttactcattttaggtgtatgtttatcatcatttagctttgcatttgctcattgtatcatatcattttgcaccattttagcttattttgcatacttaggcatctaggatcatcttgcatacgcattgcatgtttggtgtgttttcaggtgcagaaggagcttaaaaggattatactcgacctctttactcgatctaggcagctacagaggaggctttagttcactcgatcctcttactcgatcaaggcagccttagtggaagcagcagattgatctactcgcccgtcctactcgatcctctactcgaccaagggtgaccaactctacaagacttgttgatctatcaaagtgacttcggatcctcctcattccccacacaaccaaacatctaagcatgattagaagagaggaagatgcatctactcgaccaattgatcactcggagcttaaacacaaaggcgcagactttgcagcaccccctttactcgatccccaaggtcaagtattcacccaaaccgcctcaagtctcttgtcttctatggaatctagggtttcaacattttagtataaatagaccactttgggatttgtccaagggatctatgctttatctttcagtttttctttgtgtttatgaatcttgaaactttaattactcttaatctatttcgtttttgcatttgctgtttaagtaaagttgtttagcttgtttagatctacattttggtatgattttagtaatttctaggtttgtgttcttgagaatgttgcttgagtagtgattagggttcttgaggatggattagggtaatctctaggttagttaggtggttagtgtttaggtttatacccttctggattcgcttggcccctatgcggttttcgctggctaatgtggagattcgatcatagacgtccaacgtccaaaagacgttcaaatggatgtctgacctacgaattccagagatatgtagactcgaccaagggattggcttgtctccctattggctttggtagattgtttcttaaaccctgctctgctatgtttcatcaacgagagttgagattaggaagtggtagagttatgggggtctctgtcacgagagtggattgacccggtttttgaatctatcgtcatgggtatctacctttcgcctattagccatttgatgaaccctagagttgcccttatcaatgaatccatccttagaacttctattagatttatttgtatcccctattgattgcacttttatttacctgttatttgcatcccctatttgtatcccctgttgattgcatttaggttacttaattttgctgcctgttggttctactcgacccagtgatcgagtagggctcttaagttcttatttttacttgtttgaatcctgacctaggattgttactagaaacccaccatcattataatctggcttgacttagttgttttcgtacacatcttgattgctagcaatacactggactggattgacaccctgtataactgcatcgacatgtttgtgttttaggggaattgaactgaatcacacattcaccataagcagacctgaaaaacctgtttatcaatttggcgccattgccaattcattgttgcattgttacattcaagatatcagaaacttttaagatcaagttcttttacatttatcaagttactaactcatattttcgtctgcttgtttttgtggtataggtactaatctttgtgcatgcaaactcgatccaaaggttctgcacacctactaccattcaaagacagaattgacagaatagctcgcgagttacaagaaaccaaagcaaaggcagcctgtgatcagccaagaccagctactatggatcaacagaacaggccagttgatgttcaagacccacctaatgttgatcaaccaagaaacattggtgctggtgatgccccaaagaatcatcaccaaagacaagggataatgcctccaccagttcagaacaacaattttgagataaagagaggtctcatctccatgatccaaggaaacaagtttcatggcttacctatggaagaccccctggaccatcttgacaactttgataggctctgttgccttaccaagatcaatggtgtcactgaggatatgtttaagctcagactatttcccttctctttgtaagacaaagcacaccagactccacccacctcatgggacgattgtaaaaaagcttttcttaaaaaagcttttcttgtcaagttcttctctaacgctcgcaccgatagattgaggaacgagatctcaggtttcaaccaaaaaaacaatgaaactttctgtgaagcttgggagaggtttaaaagctacacccctcggtgcccccatctcggattcaagaaggcttcattattgagcacactttacagaggagctttaccaaagatcagaatgctacttgacaccgtctccaatggaaacttactgaacaaggatggggtacagggatgggagttagtcgaaaatctagcacaatctgatggttgctacaatgaagactatgatcgctccgtgagaggaactggagaaactaaggatagatagaggaaggatatcgaggcactgaatgaaaagctagacaagttgttgctggctcagcagaagcagatacactacatcactgatgaagagcatttccaaatgcaagaaggggggaatgatcaaactgaagagctctgctacattcagaaccaaggaggattcaacaagggctacaacaactacaagcccaacccgaacctctcctacttaagcactaatgtagctaacccccaagatcaagtgtatccaccacaacagaatcagtcaaagccatttgttcagtataaccaaggttatgcccctaacaacagttcaatgaaggctaccaacagcagaatccaccaccagggttcactcaacaaccacaacaagccccaacagctcaagatcctgaaattaagcaactcattcaacaaatcattcaaggacaagctattggcgctatggcttttgacaagaagatagctgaattacacaacgagattgattgttcttacaacgatctaaatgtcaagttcgaagccctgaattccaaaatcaaatatgtggagagtcaatttgcatcaacctcggctccgaagcatcctcagcaacttccagggaaagcagtccagaatcctaaggattatgctactcctaatgctatcaccatccaccaagaagatgaatctccaccaagtcatcaaactctcaatactaaggacagtatggttcaagaaggggggggattcaactcaaattgctccacctgccactaagcaattcttttggactacagagcacacacctttgctgaatactcaccattctaaaaaagttcagaattgaaaaacttaagaaagatcagaatcaagagatgattagcagtgccaccacccaagaaacttacaagaagaaagtcatccaagaaaagcttgatgatcccggttcattcactctaccatgctctctaggaccattgacattcaataggtgcctttgtgatttgggagcatctgttagccttatgcctctctgtacagctaaaaggatagggatcatggaattcaagttctgcaacttagccttactcttagttgacggttctgttgcacatcctcatggtctaatagaaaatctgcctcaagattggaaatgttgagatacctacagactttgtggtataggacgtacatgaagaaggcaaggatcccctgatcctaggcagaccattcttagcttcaggtggagcagtcatagatgtcaggaatggaaaaattaatctgaaccttgaaaaaggcatcaagatgaagtttgacatcagagaagcttcaaagaaatcaacaagaggaggtcagagttttggaattcaagatatggatgttgatgaagaaacataagctgaaacctcaccaaaagtcaactatacttctcaactcagcaagctgaagagaacttttgaccacaagaagagagcaacagaaaggctatctcagacggaagatcctacagaagatgactggtatgagatgagaaaaaaatttaaatggcaaagcagagtcatagagggattatcttggagggtgattaagctgaaagatcaactttggatgtttgaaaaaagagttcaaaagttttcagatggtattgacccagagaagatggaaactgcactagctatcaaggaggacaaaaatctcacaacataatggtttgcaccagaagatcaaaaaggagttcacttagaggaaagaagcttggagagcaagttgttgagtgagaaggaaattattccgacttattctccagaggtacctaaaccgcccactaaaccctcttctgaagaagaacacttgattcttgattctattgctgaagaactcctggagctttggattgggtataaagctcaggaggatacaattggaaagttaattcataagatggaagagttaaatagcaccattctggaacttcaagaaatggttaaaggctaccccagttttgaacttgaggattggtcaaaggagcctggttcaaaagaagaagactactctgctgatcaaaaagaagcttattttgaagaaaaatcaaatgagtactcatcctaccatatgtcaagaaaggatgcaaagtatgattcagacactgaaaattcaaccactgaagatgaggacttctctgttcctctcttcaacctttttctgactaagctttgtaacagtcaagcttagtgacttaaaacaagctcaaagggggggaagtcccatgtctatccatgtatataactttatatttttcgtgttatttttgatgtttttgtttaagtgtttcaggtttattttagagaccctaagagagtcaacggtcgag

SEQ ID NO: 150146 - DNA, 2074 bp, Arabidopsis thaliana landsberg
  unsure (1)..(2074): unsure at all n locations
atgcttgatagttatggaaaacagataatacttgttgatagacatggtcgtgtccatcattgctatgcaggtccaattgaaaaagcattatgccatgtacagagccatggaattccaagggatgttgtcaccaatttcctttgcacggattatcatcccccaagtgcagatgaacctgatatggaaagaagaataattaaaggatttcgaaaaatcaactcttggaaggatgttgtagaggcgcttcaaaagcagcagatagtgggggcagatttgcttaattacagtcaactgatgatgacttcaggaaagtatatttacaaaggtcccatgtcacgaatgagtgtttacgtcggatatcacggcgtagtaatagagcagattaaganaatgaatggagaatgggttgctgtttgcaaaatgagcaatggcacgttggtggctgattatggatacgcttatgtttccatagaagttcagtacatgcctgttggtgcatctgatctgaaaaggaagaggatacgaggttcagaccatccaatgcatctccttaccaatttcatcatcgtagacatggtggaggcagatgagaatgatagaaaggatgcagaaagtgaagaatcagaagaaaaagactcagaaagtgaggaggaagaggattatattcctaaagcaaaaagaggtcttactaaagatcctaaaccaaaaagaagtcgtactgaagatccaacaatggtaagcatcaaagtggcaatctcacttcatcgtttgctccatgattaatatgcagatgctttttgagaattattgttggcttcaaaagatatgcaatgactaactaactgccatgagtagcaggtaaaggaatctgatgcagtgggcgttaccggggatgccattagtcgccataactcagattcgactacaaaagtgatggaattggttgctctagtgaagctgttatctggctttccttctatttcaaagtatgctcaaatttgtttaatctcgttgagctatctgtttttatcttaactcgttcatctaacatccattttcaattctaaacatgcgcactaagtgtataaacaatgaattgggctgtctaccagaaactctagcgtgttacactctgaaaaaggatcagaaatttattgtaaatgtacatcctgtcctcaactctcttttggtaactaaatagttctctaaaattcaatggcaggagaattaaagacataattgtgaagcagaaaggaagccttcttcttggaatgcagcagagagctattgagtacaattctatagttgacaggcataaaaatatcaggtggaatcccttgtgcctctcttcctcatctatcttctagtgtaagtttttcatattctctctccctcaaagctcatgatagaggtatgtgtgcatacaggtcttctctggttgacagaatgccggtactggatgaggctactttcaatgtgaggagggccggctcttttcctgcatcagtttcaaccatggccaagccttcagttagccttcaaaatggtgttgagaaacttcctgtcgctcctcttgtggacttgctagacctagattctgacgatatcatggctgcacctagtccatctggtgcagatttccttcaggatcttctcggtgtagacttaggttcatcgtcagcacaatatggttagttctttggcggttctacagctcttgcgttcatattatggcgtgctcatctgctgtgtgtctctgaatgaacaagttttaaaaaaaatcattttcctcattgccttgcaaaaggataactcatgtttggtcttccattttttatccaatgattcaggtgcaacccaggctccaaaagctggcacagatctgttgctggatattctatcaattggaacaccttctcctgcacaaaacagcacatcatctattcgtttattatcaatagctgacgttaacaataatccctcaattgcgctagccaccctttcttcaccagctccacctcacgtaacaaaaacttcgtccaccggtatgtttgatttgctagatggtcgttct

SEQ ID NO: 150147 - DNA, 310 bp, Arabidopsis thaliana landsberg
actttaggttctgtttcattcgcctctcatctcttcgaccaacaatccactttcctctcttgcccacttagactccttccttcctcgtcttcttcttcttccaatagaaactctctcgtctgcatagtcaaatccttctcaagctccgccacagcagataccgatagaaactccgatcaatcagcctcttgctcagtcctctccgcttgcaattctcttctccgtgatacctccgacgaagcttcagctgcaggaccaagcgattggaaaacagcaaaagcttattgtaaaagtggtgatacatttgaag

SEQ ID NO: 150148 - DNA, 641 bp, Arabidopsis thaliana landsberg
ggatgaacaggttgagttgggttcacgcctcatgtcattgaggttaaaacaggagaggtaatgtgttgatgtagcaaatctttaatcttcaatttgtttctatggttaaagttatgatctttcattgtattcaggacatagctacgaagatattggcgtttacgaaccaagggccacgcgcaatctgtattctctcagctacaggagctgtaactaatgtgatgcttcgtcaagctaacaatagcaatcctactggaactgttaagtatgaggtataaaattactcatgtgctttgtgcattgcttgcttcttggcctcattttgagctctgttgttatcgaatggagctggaatttaaatcttgtattgagctgtattggatgtgttgctgtttcagggccgatttgaaatcatttctctgtcaggttctttcttgaattctgagagtaatggtactgtgaccaaaactggtaacttgagtgtgtcgctggctggacacgaaggccggattgtgggtggatgtgttgatggaatgctagtagctggatcacaagtccaaggttgtcaaattcttaacctttacacttgagttaagatcagaaagtattcaagatactgactttgattgggggttttatat

SEQ ID NO: 150149 - DNA, 342 bp, Arabidopsis thaliana landsberg
cgcgaaattagttttcaccggcgagattttttatcctctctacgagataacacttagaagaagaggcagttaaaacagagagacgacgtcgtgttatttttccaaattccggtgatctgagaatgacgtcggggactagaacgccgacttggaaagagagagagaacaacaaacggcgagagcggcgaagacgagcgattgcggctaagatcttcgcaggactaaggattcatggaaactttaagctgcctaaacactgcgacaacaatgaagtcatcaaaagctttatgcaatgaagctggttggactgtagaagacgacggaactacttaccgcaaggta

SEQ ID NO: 150150 - DNA, 953 bp, Arabidopsis thaliana landsberg
atgaacgtggcttctttcccatatggaattgggagcacaaagcacgagattgagctcttaaaagaagacgaagcttgggtgcttttctccaacaaagcttttccggcaagtcttgagcaatgcagaacgcagaatttggagccgatagcacgaaaattagtcgagagatgtcagggtttgccattagctattgcttctttgggaagcatgatgtcaaccaagaagtttgaatcagaatggaagaaagtctacagtactttaaactgggaactgaacaacaatcatgaactcaagattgttcgaagcattatgttccttagcttcaatgatttgccatacccgcttaaacgttgtttcttatattgttctcttttccctgtgaactatcggatgaaaagaaagaggctcattaggatgtggatggcacaaaggtttgtggaaccgatcagaggagtgaaagcagaagaagtggctgatagttacctcaatgaacttgtttacagaaatatgcttcaagttatcttgtggaatccttttggacgacccaaggcgttcaagatgcatgacgtgatatgggagattgctctatctgtatccaaacttgagaggttctgtgatgtatataatgatgacagtgatggtgatgatgctgcagaaacaatggagaattacggtagtcgccatttatgcattcagaaagagatgacacctgatagtatacgtgcaacaaaccttcactctcttttggtttgctcttctgctaaacacaagatggaattacttccaagtctgaaccttctgagagccttagaccttgaagactcttccatcagcaagttaccagattgtttagtaactatgttcaacttaaagtacttgaatttgtccaagacacaggtgaaagaactgccaaaaaacttccataaactcgtcaatttggagacgttgaacac

SEQ ID NO: 150151 - DNA, 698 bp, Arabidopsis thaliana landsberg
  unsure (1)..(698): unsure at all n locations
ccagatccgaatagaagattcacgctctggtggtcgccaacaattatcgagcgaatgtgtatgtgggttcncaagtgcagtgggatttgacaggaatatatatgcacggaaagattcctactcttaaaatatctttgattcagatattccgtgctcatttgtggcaaaaaatccatagagtgttgttatggacctttgcaagtactggatcaagagttggaacctttggagatagaaactgtgcagaaagagacaattcatccacggaagagttacaaaatgaatagctcttgtgctgatgttcttctgtttgctgcccataaatggccaatgtctaagcctagtctaatcgctgagtccaaggatgtgtttgatcagaaagcgagtaacaagtactggatagatgtgcaacttcgatggggagattatgactcccatgatattgaacgctatactaaggccaaattcatggattacacaacggacaacatgtctatctatccatctccaacgggtacttaatagcctttttcagtttgtcaatttatttttttctgcagtaagtctcatatcctgatgaaatcatcgcaggtgtaattattgggcttgatttggcctacaacttgcattccgcctttggtaattggttccctggttccaaacctctgcttgctcaagcaatgaacaagatcatgaag

SEQ ID NO: 150152 - DNA, 3449 bp, Arabidopsis thaliana landsberg
ccgaaatccacagccttctcatgtcgatcctctccgccaccattttcgccggaatcctcctctccgctgccgcagagatccgtgacacacggtggttatggcggcggagcaaaaccgccactcctctccaatggcttctctgtttccctctcgggactcgtccctctggtcgtgtcttcttttggtcatacgtgttttacctcacgcgctttctccacatgttccgtacgattttcgccgttttacgtagccggaggctcgccgtgtctcagctcttttgtaactccgtcatggccttcacgtctttcctctggctagaattctcgcagtcgtaccagattctagcgattctatcgacgactctggtttactcggtggtttacggttatagattctggaccgggtttggtttacccggttcggctttcccttcgtttgtggtgaattgtcagttggttctcgtgggctgtaatctcgtgtctcacgctggggttcttacgatgcacctctttaaaggtggatgcaatggaattggcgcgtggggtttaaactcggttctcaacggtgcgattttgttgctttttcttaacttttatgtgagaatgcattctccaatgcgacgccgtattaataaaatgaatagccaacgtaacgcttaagaattaattgatcctttttactagtttttactttttactcaataaaacaaatctaatcttcttttttgtctttcacttttaaaactgaagtataatctaatttgttttctaataactaaaatgttctgcgtctaggtctgtacatcttctcaaaccgggacaattttttttttataaaccatcgatctctgactttgcatgagatattttacatttgaactattggctcttagttaacgcaatctagttcttgtttttcattcttttaaatctagttttgtgttttttaagtggaaagaaattatgtcgattatttctaaataaaaatatttatttatttcataagaggtttttgatccaaagactcaaacttggggtaactttatgacgtagatataccacaatacccaccaaaatgtggtgatagaggaaacaaaggtttacatggtggatcatggacgaggatgatcaaaagcttatactctttaccaagtgaaaatgcattttggataagaggaaaaattattaaaagcgagaaaacataatatggtttgagactgatgtgttagattgtaagagctgcaattgtatctctctacttggggacacacttttgattttctatttaccgtttgaatgccgtataaggaaatgtacaggtcaaacgaatatggtcgagtgttcgccttagaccattgtataaggaaatgaactatgtcgactatatttaatatttgggcctagtataatattactacacttaatcaaagttaaggcatttataactgtagaacaagatgggcctaaggcccacgttttctacttaactaggcacacatatgacatatcccatagtaaaaaagcttacataataaggcccacatctgaaatctgattctccactgtaaaaataaaatcctcttaagctctcgatcgatggttctgcaatctcacaaaccagaaacaaagagtccaggctcttgcaaccaaccgcggaacttgttgaaaggcgacgaggagagagaatttcaaatctctccagatcaaagtgaaacacaagtacaacaagtaaccgacaaagtgaagcgcaagtacttgtttctttccttttcctttaatatttgttaatttgagaaaagtaaaaaccataaaatatatatagtttctgtccgaatcggcctatcttcacaaaatctcgattccaatcaagaatttatggcaagaaaggtcgatcaatcaatcagatgattatggatctagagatctctaaatttgtgttgttgtgaattgagaatgcgagagcattcgacgatgtacaattacgcccccgaagtgccaccgcaaagtaaaaggaagaagacgatgaatgaggcgtctccgtcgtggtctggattaccggattctgtggctgtgagttgcatggctcgcgtctcgagattggaccaaacagccttatctctcgctccaagaaataccgctctctcgtaacatcccttgagctctgcagcacgcgatcgctgattggttgcactgagccatctttcttcgtctgcttgcgcatcttacctgatccaacccctcgctggttcgtccttacgggtagtcgtcgactgaggccggtcccatcgcacccctatcaggctccggaatcatcttcttttgtggtagtgaattgggggatctatgttatgtaatcggtggaatcataaacggcaatcccacttccgatgtcttgttcctcaactgtttttctcagacatggcaccgcgtcccgtctatgaagatggctcgtgcttccgcatcggcaagcctcatagacgggaagatctacgtttttggagggtgcctagaggacgctgattcctcaaactgggcggaggtattcgatccagtttaccaaacttggggtatatttaatacgccgaagatggcccatagtatcaaccaaagtgtggtgatagaggagaagaaggtttacgccgtggatgaggaggaccaaagctttagcttcttgccaagtgaaggtagaatctggaaaagcggaaaaaaagattctaaggtaggaagtagacacgattggtgtgtcattgggaaattactatactgtcgtgctactcgcggtagaatactatggtgtcaaccagatgagttggactggaaagaggtaaaaggtttggaacagctacaattgtatctctctggtacaagatacatcttcagacgtacctctgataaacgaccgtcaaagaccaacgtcaaatatgatattagaaaaatctctagtaactctgctgggaacattgtcatcttcgggaacgcacatattggagaccctgagtgtgtggagctttggtctgccgagatttccatggagaggcgcgagggaggtgagatttgggggaagattgagtggtccaatgttgtcttcaaacttgatcctctctcaaactcatatagcgttgatgtcttattttctgcttctgtccatttgtgatatattcattccaatatttatttgtattgcatattactcaacgaatcagattgtgggatataagcatatagtaggcaattaatcatttaacagtaacaacataacagttacagcctctttcttttaacaggtatgtggtggaatttgatgctgaattctcattaatgactcgtcaccaacataacaggtaaaaccaacgtatcttgacccttctagaagttaagcctctctatgcttgtgcatcctcaactgctatagcagcatgcatgatgcttcagctgctcatgagtgtgtag

SEQ ID NO: 150153 - DNA, 341 bp, Arabidopsis thaliana landsberg
aagcaaaagatacctgtaattgacatgtctcatggaagaagaagaagaagaagagaaagatggcgaatagaattggttgccacctaaacggccgtcgttaacacccaccgacgctgatctctccatcgtcgcggagatcactcaacaacgccgcaaatggtaataataatttatcgatgttgggatcgaagagaggataaaagattcgattaggttgatgaagaagaacgtgtcccaatcgatgcgggtgactttgactacttcttccccaacgaggccacgaccaatgtcgtggtcgcagtttctagtaacgatcgaattcgaagcagtaagaggagatc

SEQ ID NO: 150154 - DNA, 3145 bp, Arabidopsis thaliana landsberg
  unsure (1)..(3145): unsure at all n locations
atggtgattgctgatgctgttgttacgccagcaatgtcaggtacttatatgctgtcaggctacattttttgttcctatgtcacatatcaagtatagagaaaaagcatgtgagcattatcgttgcatgaataatctgcagctaaattttaccctcttttttggacacagtaatgtctgctatcggtggtctgaaggttggagttggtgttatagaacaaggtaactaattctagttgacgtttattagcgcctatgtatggtcacgagcatgatttcgtctggctttcaaaacttgtaatcgttccttggatatatgtattccttggaccagaaaactttttatgggtctttaatggttgcatcctgggtcccttgacttcaattagattatagatacaacaaagaagannnnnnnnnnnnnnnnnccctgaataggggctaatgattgtacaaagctttcaaaaaacataatcttatcttgatgagtgattagtgactattttttgtgtaaagtttctgactatggcttcatttgcagatcaggtggtcgtgatatcagtcagctttcttgtgatcttgttcagtgtacaaaaatatggaaccagcaaattggggcttgttttgggtcctgctttacttctgtggtttttttgtctagcgggcattggaatttacaacctcgtaaaatatgacagcagcgtttttaaagcgttcaatcctgcatatatctatttctttttcaagagaaactctgtaaatgcttggtatgcacttgggggttgcgttttatgtgcaactggtaagtttcatattctgggaaatattttagaaagcttaaatacattgaatgactttttgactaaatgtcattgctcatttctatacatgtggatcttgtctcaggatcggaggccatgtttgcagatcttagctatttctctgttcactctatccaggtactttaaggcaataaatactcatttattgctcttctgatagttgtctttcttagagtcatctgaacttttgattcagtactggtgtttatctgcagcttacttttatccttctggtgttaccttgcctcttgctgggttatttgggtcaagccgcatacctctctgaaaacttcagcgctgccggggatgctttcttttcgtcagttccaagtaagatccactagcttccacagtacgtcaagatcaacaagggtattccttcatttgctggcttgattttacctctcatttcacgtttctaactgtttatcactcttttttattttcaggttctttgttctggccagtctttctcatttctaatgttgctgctttaattgccagtcgtgcaatgacaacagccacatttacatgcatcaaacagtcaatagcactaggctgtttcccacgtcttaaaatcattcacacctcaaagaaattcattggacagatttatataccggttcttaactggtcccttctggtggtgtgtctgatcgttgtctgctctacctcaaatatcttcgcgattggaaacgcttatggtaatattttcttctcgtagcatttgatttggggaaagttgaaataattggaacccgttttagttactttaaaatagttttacggcacaagttgttgaaccataagttctggtacatgatgtttaatgtgttataaagatgatgtaatttccgtcattgttctttactttttaacttttatgtccactttttctgtggcttgtccattaatcctagagacattcatgcatgtggttttggatttggattttcaggcatcgcagagctgggaattatgatgactacaacaattttggtgacccttatcatgcttcttatctggcagacgaacatcatagttgtgagcatgtttgcaattgtttccctgatagtcgaactggttttcttctcatccgtttgttcaagtgtggctgatggaagttggataatcttggtttttgctacaattatgtttctcataatgtttgtttggaactacgggagtaaactgaagtatgaaactgaagtccagaaaaagctaccaatggacctactacgagaactgggcagtaaccttgggacaattagagcacctggtattggtctactttataatgagctagctaaaggagttccggcaatatttggtcattttctaaccacccttcctgcaatccattccatggttatcttcgtgtgtataaagtatgtccctgttccaagtgtgcctcagaccgagagatttcttttcagacgtgtatgcccaagaagctatcatttattccgctgtgtagccaggtaaacaaaggaaccgtttttgatatggaagaaaatttaggtacaataaccaaattttcatatataaagtgctgtgtatttaaaacaggtatggatacaaagatgtgcggaaggaaagtcaccaggcgtttgagcagatactgattgagagtctagaaaaatttatacgtaaggaagcacaggagcgtgcacttgagagtgacggagaccataatgatacagattctgaggatgatacgactctgtccagagttctgatagcacccaatggaagtgtgtattcacttggagtgcctctcttagctgagcacatgaattcgtcaaacaagcgacccatggagagaagaaaggccagcatagattttggggcaggtccttcatcggcgttggatgtggagcagagtctagaaaaagaattgtcgtttatacacaaagcgaaagagtcaggggtggtgtatctactgggacatggggacataagggctactaaggattcttggtttctgaagaagctggtaataaattacttgtatgctttcttgaggaagaactccaggagagggataacaaacctaagcgttccgcatacacatttgatgcaagttggaatgacttatatggtatgaacaagaccccgatcaaactactggttttcatctactcgcaagtctcatgaattgtcgaagaacatgaaacacttaccaattcaagagattttttttttcttttacacattgttgcaaaagtgtgatggagttataaaagtacaggagaaacaaaatgatttttttgtattgagagttgctatttgattctgtgtttgtt

SEQ ID NO: 150155 - DNA, 162 bp, Arabidopsis thaliana landsberg
  unsure (1)..(162): unsure at all n locations
caagcttctcttctctcttctcttcttctctttagacatctcaaccaccatgagtcaccagcagccgccgagctatgccaccgagccaaacaccatgttcgttcaagcagacccctctaatttccngtacatcgtccaaaagctcactggagcaccacccga

SEQ ID NO: 150156 - DNA, 771 bp, Arabidopsis thaliana landsberg
agcttgaagcaaacactaaggaagctgcgcggcctaagcgcacgtgatctcgaaaccaccttatttctatgcgattatagcagccggcacacgttacgaggtactcagctcagcttctattggttacatctctttgctagccaaatacaaaaccgtcattaaagaaggactcgaggcttctcagagagtacagattgctcaaacccgagccaaactgctaaaagaaaccgcaatggagaagcagagaaccgtagactcggttttcgcagcagcaaagaccactgctcaaagaggagactcgttgcacatcagaatcgtagcgatcaagaaactgttggcaaagctagaagcagagaaagtggacgttgattcaaagttcacctctttaacgacgagtctgtcggagcttctcaaggaggcttcacaggcttacgaagagtatcacgaggcggtgcataaggcaaaggacgagcaagcggctgaggaatttgcggtggagacgacaaaaagagcagaacatatttgggttgagtttcttagttcacttaattgaactaatgagattcttgattgtggttaaagcacatttgcaattagttgtggttcttgtgttttattttcttgtgttgttttgtttgagactttgtttggtgcttatatcaggggagagaggttgacaaacctttgagagagatagagataaatgagagatttgtgaaacacaaataatgttttagtcgtcttataataaaacttttttttttttatata

SEQ ID NO: 150157 - DNA, 708 bp, Arabidopsis thaliana landsberg
ttatgcagatggatcgccataaatacgtgaaagtagcttaccatgggtttagggagctctctaaggaagataaagttgaaatctatgggagcagcctagtacgagattcttttgatgaacccgactacgctctcatagatactctcttttcactggccgaagcctatttgttcgctcaacttgttgactttaaagataataaccctgaaaaagttcccaaggacgttgagtaagacagcttcccacattttactacttcagtttatgtttcctaatggttgtagttatattaacttatacctggcatgaatgttttctcttaattttgcttatgattgaaactcttttagcttgaatactctattgtttgtacttttcacaaattgatttcctccaatgatatgctttagttatgctcggatgtataaagatgttcgtgctgctgttgatttgtgccaccgtgacggaactttaaagcagatggtggcaaaagaacctaataggtaaggctggtggtatgttcaccactgtcttttgtaagttggataagcacaactctgccatgcctctctattggaaatgtctattttgcttaagatttttcttaacttgccatatgttcaggtatatcaatgaggataccacgatagtaccccttattaaaatgatcagagattctggacgttctacattcttagtaaccaatag

SEQ ID NO: 150158 - DNA, 459 bp, Arabidopsis thaliana landsberg
tctatgcatgatgttacagaaaataatataaacacacacatacaagaactgaagaatgagcagacccggagattggaactgcaggtcatgcagccatctcaacttccagcgccgtgactcttgccagcgatgcggtgactctcgttccggccccggtggagttggtggcttagactttggtaatttcggtggcagagccatgtctgctttcggattcaccaccggctccgacgttcgtcccggtgattggtactgcaccgtgggaaactgcgggacacacaacttcgccagtcgctccacctgcttcaaatgcggcactttcaaggacgagaccggcgctggaggcggaggtggtggcatcggcggtccggccatgtttgacgccgacattatgcggtctagagtccccggtaacggtggtcgctctagctggaaatccggcgactggatttgcactag

SEQ ID NO: 150159 - DNA, 436 bp, Arabidopsis thaliana landsberg
ctactattttttgtacacttagactaaggaaagcagagtttcatattcctaaaaattctggttttataagtatcaaagacaaactcagtctccatggaaatagagcaaagaaggatcatgaacagagaaggagaagaagaagaagacaacaatcacctttcatgtgcaagaagaagaaccagatgcagaggaagagatgtctgggaggtcaatcgagccgtggacgaagcagataacggtgagaggagtgttcgtgagcatagtgatcgcagttgtgttcagtgtgattgctcagaagctaaatctcacgacaggaagtgttccaaatctcaacagctctgcagctttacttgcttttgtctttgtccagacttggactaagattctcaaccaaatcagcgatttgttgcgaagccattaacaaaacaagagaaca

SEQ ID NO: 150160 - DNA, 588 bp, Arabidopsis thaliana landsberg
tttccaatatatagctttaaactaaatagattactgctttatatagtgtacataatattcttctaatcctagttacattataaatcaaataaatattctgaccttacaattaaacattcccatcttttatgaactccaccagcagcccactttcttgcccacgtgttcctcacccaaattaagaattctcccatgaacatgaatgaaggatattttcgtaactgtagggtgttgttaactttttttctcaactctgacccaatccgacgtcgttcgggaataaccggttcacatgggccggaacgagataaggctttcgtcagtgagggcccacattcttcagtgttttacgcgggagacaaagttaggtgtcaaaagagccgccacatccgacaaaaggccagcgcaagtgtgactgtgattccacataacgaaagatgacacgtggacggtgatcctttgttttgatccaaagctccttcgtatatcattgatgtatctaccggtgaccacgtcgtactactatctccggcaggagttgtcgacgacgtcccggttggtgtcgtcggtttgggatctgggctctga

SEQ ID NO: 150161 - DNA, 1051 bp, Arabidopsis thaliana landsberg
atgcaggttcttatcatccaattaaagaaagtttctccagccatacaaaagtccatatcggaatgtactgagatggttaatagtcttcccccaaccttgcctccagttacgagaagtaatggacaagcatcttcacttctacaatctcagggcagtgggagaattatggtaataggggatgacttgatttttattctcttctgatgcataatttattgagatgctcatgtaaatttttttcttgtgatacaggaaggtgtatcaaatgatgttgctgagctgacctcgacaatgtctaatgttcagctcgagaaagtctcagctagtcctacattaaagcttccacagttatttagttccactcctacttcttctggtaaaggaggaaatggacaaaagcgacagacaatggcttcccaggtcaataaaatggaaagcttgtctgagaagaactctacagaccaagcactatcaaatgctcgaccagacaacttaccgactggtttgtgacataataaccttctctactaaaacgaaacatgtatagtaatagaatatcaaaagaaggctttgctgatgtgaatttttaacgcttttagttttggtaccaatcatccattctacgcctattccacttcaaactaattaatgagtagttcatcacaatatgtgttatctactaattcaaatttacactctaattttggtgtcagatacaagcagttcttttgtccataacctgaagaaatctgtgagggaagcggctttattgattccttcttcagcaggctcatcacgggatagtcaatccgatgagggctccgagcattattttgtacctctttcagcaactggcttttcccgttttccatcagaaagcaaagccctgcctctcagagggtcgagagcacttacctctctgagcgagccttcgtttcttgaacccaatgttcccgatagctttgcaccaagcaagtacagcgatatacctgacacgtatgatgatcttgattcattcaaagattacgataatgggaacgggtttctgtcg

SEQ ID NO: 150162 - DNA, 3432 bp, Arabidopsis thaliana landsberg
tacagaagcatatcatccgcaacatcaattccaatactctcacaaatctaatgtccaggaacaaactatgtcaaaagacatatcgaccaaattgtataaataattcttaagtaagaaccttaaagatcaagtgacagatacaaacattgaatcaaatttcttaaacacctttctaaatttatccaaaaaagcctttacacaccgtgctattcccacccaattcaacctcatatcaaagaacttatattgcagcctttttttgctacttgctaacacagcatcggaagtgattcacgatctatcaatatggaatcaaaatataacaagaagagagaagagagtatagatcaagaaacaagcgtacgcgatcaagccacggtgctcttctccaccatcagcaagagataccaccaatgtagagcaggctctagtggaccacaacacaaacaaagccgcaagcacaaaccgaaccggccctgctccctggggaacgaacaatgacaccgccgataaaaccaccaccggaagcaaacagtatccaaccaagctcgtacacgtatggagattaaggttcccatttctaccagcaagcatgttaaagacgacgtatagaaagatagaagaaacaacaacccaaccaagtataacaccaaactgtatcttcccagcgagcaattgaaataagcaaagcgcaaggtataagaagatcggaccagagagatctgaatctttgtgaacagtctgattgattcgaaaaggattgagaatcgatctagttttcttccagatttgatctggatggataccgagttcgtcgagtaaaggctcctcatcctcaaacgaagcagagactcctctaccgaaagatgcagatgaagcgattgttccgtcgaatggtcccgccggcattgaaacggcggcggatccgatttcaaatggaatgaaagggattgaagatgaagcggaggattgacgtggtggttggtaaggagctgtgggaactcggcgttgctgaacatttgcggtggccggagatgatccactggtggggaaaacaaccggtggaattggaaaatccttcgtcatcctctagaatccctaattcagatctcgaatttgaagttagtgttttctctcaatcggatttgatttcagaaattgaaaataattccagtaacaggcgactactacgcattcttcgtgttcgtatcttcgtgatatgtgataagggcattttcggtaagtgaattaataatgttttgggccgtataaggctttatcagcccattagtttgtagttttgaacagcctttgctacacaaacaagtcaatagccccacttgtgagttgtgaatagttttcactactgactaattatcgtaattttataagttattaggctcactgaacaacaaagtcgttgtagtatagtggtaagtattcccgcctgtcacgcgggtgacccgggttcgatccccggcaacggcgatctttttgtgaggaattttcgaatattttttacatatatgaaaaaacataatggcttcgcccgggttcgaaccggagaccttcagtgtgttagactgacgtgataaccaactacaccacgaaacctttgcatgtaacatcaaaaatataacatgttattgagtagctataatattttcttgttttttggttgtatgtacagttacaacataagctggaactatggattgtttccacaaacatgggaagatcaaactctaaggttgatggtgcttttggagataatgatccaggtaggtaaaatgattttggcttctttatgggtttcattctcagagcttagcttaacatggattcgtgttttttatttgtagttgatgttgttgagattggtgacgttctaaaggttaagcctttagctgcttttggctatgattgatgaaggagagctagattggaagattgttgcgatttctttggatgctccttaagctctatcttgtgaatgatgatgttgaaaaacatttcccggtatgatctcaaagaaccgagattcatgtcgtaatggactattaagttattttttctgtagagaaatagggatggtcctttcataattttgcaaacagtgaaacaagaatatacaaatgaaggtaatttgacatttgtttatgtttcagccacaattctatttgtacaagaaagtagataaagaactgagaataaaccataaaattctcacagtgaccttttgagtttttttgtctcatgcttcctggagaagaggcgcaacggttgattctctggttactgcatcaggctcggaatcttcgttatatcgatccacactattcaggaaaatccctgtagagtcacaaacacaacaaatcattaccacattatactaaaaaaagaaccatttgaactttgagatcccggtgtggctaaaagcctaacctatggaccaaattgcagcagctggaaagagaacgaatgtaagaacaagagaagtcactctccaattgttcacgtagtcctgcgtgagtaaaagagaaaacattctgaagttggatacagtgatggctcaaactaatctagatgaataatcgcgtttaactgaagcttaatttgattaagacattagagctctgaatcaagaattttgtggatacagctgagaaaccaaacctgaagaactccaacgagtggtgaggaaggtacatctccaaagatatggatagagacagtagacatcgccattgcaagtggtctcagacttggtttgacacaatggagaactatgaaattcacaggaccctaaacatcatgaaataaatcagaagaggtggatttgcaaaacatgaagtatatgaatggtggaagtcgagattacctgtgtggcaaagacaagaagttcaccaacagcaaaaagagctaaaaatgcatacatgctcttgaaacagaaaacagcaaagcaaaatattgttcttataaacgttgaaactgaaagaacctccaaaatacagaaagagacgatcaagtactagttttccaagatcataagtggtagaaatatatgtttggaatgtggaatttccatccatgtgcgaataatttgtcttccaagttgatgatcttaccttaaaagcatttgaaattgtggcatccatgtaatctagaatcactcctcctgataatgtgccaacgattccgcatacaactgtgacccctccaaatatcatatcagcgttttcctgcaatgggataaaggcatcaagagatatacttctactgttctacacatggaaacgaaacgctctggtaatattttaccatcttgtatatgttataaccagcctttggtccccaatatgaataggcgcctaaaacaaagttgtaagcaatataccctgagaaaagaaggaaaacagttgcaggtaatca

SEQ ID NO: 150163 - DNA, 571 bp, Arabidopsis thaliana landsberg
atgggtgatctagccaagcagatattgtctcgcccgattcaacttgcagaccaagtggtgaaagccggagatgaagccacaatcaacaaacaagaatgtgccgatatcaagtccaaaacggaaaagctcgctgctcttctccgtcaagcggcccgtgcaagctccgacctctacgaacgtcccacgcgccgtatcctcgacgacactgaaaacgttcttgaaaaagcattgacgatggtccaaagatgccgtgacgatggctacataatgcgacttttcaacataatccccgccgcagcattccgtaaaatgatttctcaactagaaaactccgtcggcgacgtctcttggctcctccgtgtctcaactccagccggtaacgatgacgacgaagggtttggttacttaggtctcccgccaatcgcagccaacgaaccaatcttgtgcttaatttgggaacaaatcgcggttctgatgaccggttcgccggaagataaatcagacgccgccgcgtcgttggcttctttagcaagagataacgatagatacgtgaaactgatagttaaaagcg

SEQ ID NO: 150164 - DNA, 794 bp, Arabidopsis thaliana landsberg
tccacagtggtcggagattattgttatgccggcacgacttggattggttacgatgataatcagagtattgtgacgaaagttagatatgccaagcagagaggtttgcttggttacttctcgtggcatgtcggtgctgacgataattctggtctatctcgtgcaggtttgatttgataccaaattctaaatattaatattaattgaaaatgttatgatttttgacgattttggggatttcacagcttcacaggcatgggatgctacgacggcaaccaccagaactatacagaaggtttaagctgtccacagtttcgacaacagcaagtgaagaagtttttttcgtaattatacagaaaataaactttatctgcttattatatatattgtccaataaaactataagtttattaattgcaatgcttcttttcatttatagaattacaaatcattttgttttgttaaaaagaagaatcaaacaattcaaatcaaatccaaggaaccctttctattggtacagtacatgtttccatatatagtagtctaactacgaactaataagtctatgatttttacaacattcacgtaaatgttataaccacattctaccttaggaaattacatattaatagaagagaatcctggttttggtcaggcgattggtcaccatttgggagtctaatgaattttctcaaacgcaccggaggataccttatatcgggaactactgtaacattggactgagaagagcaacatgcttcatcgagatatacccaaatcagcagtacaacttctga

SEQ ID NO: 150165 - DNA, 429 bp, Arabidopsis thaliana landsberg
ccctattcctctgatctactttatagccctgagactctctttctgtactctaatcatttatctagctctctcattctcttattctggatcagccaagtttctccatttctcaatcaagaaaatcttgaaatactcaaatcttttcaagattcactttcaaagatatcttgataatagcctcaaactctggtttcaaagatgggaaacgacgagaccgtacgattcttgattcacttcttcaatggaagatggttcatggtgtttgcttcgtttctcatcatggcttgcgctggagccacctacctttttggtacttactctaaagatatcaaatctacacttggttacgatcagaccacgttgaacctcttaggtttctttaaagatcttggagcaaacgttggtgtcttgtccggtctaatagctgag

SEQ ID NO: 150166 - DNA, 542 bp, Arabidopsis thaliana landsberg
tgtgcttcttctctctctcttttcttctttcatcttctctcttccttatcacttgactttagtccaaatctctagctcatttgtcagacaacaaatttctgacaatggaagcaatcagattctctaatttgtcaggtcttcttattctcttaatgtcactgcctcttttagtgacttcaaaggacgaaactgtttcttgcacaatgtgttcctcttgcgacaatccatgtaatcctgtcccatcttcttactctcctcctcctcctccgccatcaagctccggtggcggtggatcttattattactctcctcctcctccttcaatctccggtggtgttaaatacccgcctccgtacggcggcgacggctacggtggctattatccgcctccttactacggcaattcggggacaccaccacagcaggatccgatcgttccttattttccgttttactatcatactcctcctcagggatattcaggctcggctcgtttacagaattctatcctctttgctctgttcgccgtcttgctctgtttt

SEQ ID NO: 150167 - DNA, 1726 bp, Arabidopsis thaliana landsberg
ggcacaaaatctttagattcggtgaagtcattcattacttcattgccaaagcttgtaaccaaaactcccatggccgacgaatcttcttctccggccacgggggatcccaattcacagaaaccagaatccactactccgatttcaattcccaatccaaatcccaatccttcactaacaccaccgccgcctcaacaacattcgcaaccaccagtcgctcctctggttccacctggtccgccttatgctcctccggctcagattcctagctcgcttctccccaccaatctcccgccgccaccaccattccgtcccggtatgcagttcactcccgttgcgaattttcaaaaccctagctctggagttcctcctccaggatctatgcctcagtatcaaccgcagcctggtatgagacctttccagcctatggctaatggttatcccggaattcatggtgttgctcctcctggtgccatgcctcctcatggtgggttcttctatctcttaattttataagttcttactcttttttttgtttatgatgcactttaggctatatagtttattttcgtggcgttttttttcgttctgtgtatgttgaatgtgaatttgtgatgcttaaagtagtgaaggggaactatatatgtctatgtagttggattagattaaaggtttagagtaaaaagaagttttattgaaagaggaattagggagaaaactagaaacaggaacaccgatgaccgggtgttttctcctacagcgtcttgattgagttccctgagaatggttgcaaggcatcaaattttgggtagggactcacttctacgactccctcattttggtatgcgcaaattcgctttttgttcttcttattctcttaatttatttagttagtgtaacacatctttaaccaaaccgcttacctaaaggttcttgaaagatttgccccaatttatatgttaagttgagaattactgtagttttaagaacaaaactttgaacttgatgggttaatcaactgccagcagcaagcatttgtagcgactgagtgctccttggtcttgattttgaggtattgcaattctttcaaattacaccttccgttacatcttcgacatgtttcttttttctattcccttctgtggtcaagctgctaatggttgaaataaagctattatgatgggtaataatagtttttataagttctatatgggcatgaaatgatgggagtttcaatattactgaatctcaaattcaacagatgattatagattcttacctatttcaagttgccctgtgaggtatgactacttaatgtggtaataatgactacgatcctggtgctatcttctcaatgtgtccttcaggatctctgttcagctgggtggtatttgtactgcctctggtgtgcatatctaatttgctctagtttgtggtaacaatacaaaatgatttttatttactgcttcttgatactcttgatttatgccaatgcagttgttcagggtattccaatgtaaacatctactgatgaatttgtagagacttgtttttgtttatgcagggcttctccggtatccttctccatatccaacaatggttcgtcctggattcattatgcggccgcctggtacaatcggtgctgttcaactagcaccacgaccccttattccaggaatgcctggtctccgtcctgtaatgcctcctatggttagaccggaatctcttc

SEQ ID NO: 150168 - DNA, 530 bp, Arabidopsis thaliana landsberg
aggcaaagtaaagtggttaagattgagagaatggttgagaaagaagacatgcatgtaactcgtgttctattctgcggtcctcacttccctgattcctacaatttcaccagagaatacttgcaaccttacccttttattaaggtacaaaagctatttgatttcttctaccaatttagtaaagttgataactttacttctaccaatgagtaaagttgaaaacttgactctcctagactagtttattgttgtgtagatgctagtgtttgagttttggttttaaactgtgtataaatcatgtggtggtgttactagttttcactatcagtaaaaagttcttatttttgagatggttattgtttgttttgtatggttttggttcatataggttgatgttgtccattaccgcgatgtccctgaggttattaagaactatcatatatgtgtggcaatgactatgcaaatggattcaaatgttatatctcgtgcaagcaacataaagcttattatgcagtacggtgttggtctcgacg

SEQ ID NO: 150169 - DNA, 1024 bp, Arabidopsis thaliana landsberg
atcgttgaattgaatcttcgagaagactcttcttttgattcaatcactcaccggagaagaagaagaagctatgccggtgttcaaagctccgttcaatggctactctgtgaaattcagtccattctacgagtcacgcctcgccgtcgctacagctcagaacttcggaattctcggaaacggccgaatccatgtcctcgagctcgctcctggagctccaggcgtaactgaatccgtctcgtacgatacagccgacgctgtatacgacgtatgttggtcagaatctcatgactctgtgctcatcgccgcaattggtgacggctcagtgaagatttacgacacagctcttcctcctccttctaatccgattagatcattccaagagcacgcgcgtgaggttcaatctgtggattacaatcccacgcggcgcgattcgtttctcacttcttcgtgggatgatacggttaagctttgggctatggatcgtccggcgagtgtaaggacttttaaggaacatgcttattgcgtttatcaagcagtttggaatcctaaacatggtgatgtgtttgcttctgcttctggagattgtactttaaggatttgggatgttagagaacctggatcaactatgatcatccctgctcatgattttgagattttgtcttgtgattggaataagtatgatgattgtattttagctacttcttcagtggataagacagttaaggtttgggatgttaggagttatagagttcctttggctgtgcttaatggtcatggatatgcggtgaggaaggtgaaattctcgccgcataggaggagtttgatagcttcttgctcttatgatatgagtgtttgtctttgggactatatggtggaagatgctttggttggtaggtatgatcatcatacagagtttgctgttgggatcgatatgagtgttcttgttgaaggtttaatggcgagtactggttgggatgagcttgtttatgtttggcagcaagggatggatcctagagccagttga

SEQ ID NO: 150170 - DNA, 600 bp, Arabidopsis thaliana landsberg
gtacacacacataacacttatttccaactctgtctctctcaattttctttctctttctccaaacatgaagttctctatgcgtttgatctcagccgttcttttcttggtgatgatattcgtcgccacaggttcgtttactcgttaccatatatctaactttgcacaccacccatgtcttcttctattttcatcatttggtcatatatatatatatgcacatatttaagtggttcttatcgactggcctttccatttatacgattttagttatatagttagccataaatggatgcctttattaagtagcaataatatcaaattctaacattaactttcaagattagttaatatgtatcatgcatgagaacatgaaacaaagctatatatagtcttaaaccaagtttcttttgtactctagggatgggtccagtcacggtcgaggctcgcacgtgtgcgtcgcagagccaaagattcaagggtaaatgcgtgagcgatacaaactgcgaaaacgtgtgccacaacgaaggcttccccggaggtgattgccgtggattccgtcgtcgttgcttctgcaccagaaattgctgatccatcaatcga

SEQ ID NO: 150171 - DNA, 829 bp, Arabidopsis thaliana landsberg
ggtcttacctctcatggaagggaacttcttcatcaggtctgatgctcaacgagcacatgacaatggcttcatagccaaacaaaaacctaatctcaccacggctccaacagcaggtcaagctaatgaaagtggctgttttgactgcaacatctgtttagacacagcccatgatccggtggtcactctctgcgggcaccttttctgctggccttgcatttacaagtggttacatgttcagttatcttctgtctccgttgatcagcaccagaacaattgccctgtttgtaaatccaacattactatcacctctttggctcctctctatggaagaggcatgtcttcgccttcttccacgtttggctccttgaaacaagacgcactgtccactgacataccccgcagacctgctccatcagccttacgcaatccgagtacctcagcatcatctctgaacccaagcttgcaacatcaaactctgtctccttcatttgataatcatcagtattcccctcgtggcttcaccacaaccgaatcaaccgaccttgccaatgctgtaatgaggagtttcctctaccctgtgattgcaatgtttggagacctggtctacaccaggatatacgggacctgcacacacacaatagcttagccttaccaaagccagaggatgatgcacggggagaagcctatcaagcgggtatcgatatggatcctttgatgcatcatcctttgcctccttcttttctagctctctctctctctctctctctctctctctctctctctctctctctctctctctctctctctctctctctctctcttcgtgtat

SEQ ID NO: 150172 - DNA, 435 bp, Arabidopsis thaliana landsberg
ggagtcggatgttcagagttcagaattgatgcatggcacccaaaaatataaagaaagaaaagttgaaaaagtaagcaaaagaacaaacaacaacagctgtcactttcctccattcttttcttcactttttcttactcaaagtttttaaaaaatgatatcaataaaaccctaaatcaggaaagtaaagttacaattaaagtaagtaaatcatttcttaacttagtaatagctattatcatcaatttctctctctctttcctctttctcttatttgcattattgaagtagcagccacacttgttgtctccactttctcttgctaaactccatcatcttctctttcttttttttcacttgtcccatttttttatattttcatctttctcttttggagtttcttcttctactgactctactggtaggtgtatggatttg

SEQ ID NO: 150173 - DNA, 791 bp, Arabidopsis thaliana landsberg
  unsure (1)..(791): unsure at all n locations
cagaggcaggtcatcacagtgcaccgtgtgtggagacaattcatctttcaataagcaaacttttaaagattttgactatggggacttcactcaatttcctttatttgcggtattattctttctttttctcttatcttgaatccaatagttgttgtcagtagtctcatattannnnnnnnnnnnnnnnngatttgatcacagggcccattgaacctgcttcctgcagagtcaagaattagtagcaaggagttcaaagaaattcttcaaaagaaggaacaacatgttctgctcgatgttcgaccttcacatcactataagattgtctctctcccggattcactcaacatccctctcgcaaacttagagactcggttaaacgagcttacttcagctcttaaagaaaaggaaaatggccatgcgaacactgaatcttgcacaaatcctagtgtcttcgttgtatgcagacgcgggaatgattcacaaagagctgttcaatatcttcgtgagtcgggtttcgattcggctaaggatataattggaggactggaagcttgggcagccaatgtcaaccccaacttccccacctactagagggaaacttttgtgaaccaacttggttaaatccatagctcaagatgtttggagcagaaacatgtattattagttatgtcatgtaacaagaccttatcaaatccatgtttaaacctgtctgaatcagagtgagttttagatgttatgataccatgtactcgtttgattcatatcattatagattactgaacacattcaac

SEQ ID NO: 150174 - DNA, 581 bp, Arabidopsis thaliana landsberg
acaaccaatcatagttattataaaaaaaaagagtcatggcattttcatcttcgtgttcgtccgtcaaagccgtcaactcacggtggacgtctccgtctccgtcaccgtcttctagattcgccgtcctccctgctttccttcaccgccgttacgcaacaagcgtcaaactaacggccataagcgccgccttaaaaaccgtcgagcaaacgacgttaacagaggataacagattctcaaccgtcggatctgactctgatgaatacaatccaactcttccaaagccgaggatcctcgtcaccgagaaactgggagaagccggcgtgaatctcctcagggaattcggcgacgttgactgctcttacgatctttcgccggaagatctgaagaagaaagtggcggagagtgacgctctgatcgtgagaagcggaactaaagtgacgagggaagtgtttgaggcggcgaaggggaggttgaaagtggtcggaagagccggagttgggattgacaatgttgatctgcaggcggcgacggagcacgggtgtttggtggttaatgctccaacggctaatacggtggcggct

SEQ ID NO: 150175 - DNA, 1272 bp, Arabidopsis thaliana landsberg
  unsure (1)..(1272): unsure at all n locations
cagcatcatattcaagctatgcagatcatcattctcctggtttaacaactcaaggcaccaaatttggcatgaagatagttaaaaccttggcgtatcgggttaaatcgacgcagccgtcttctggtaacgctaagactgctggtgaaacttcagaagaagatgggttgaagacagatgcttcttctgttgagccacctactctgtctagtactgtgcaaagtgaagcctaccacacgaaaaattctgttgtaagtcttggaaaatctccatcctacaaggaagtagcattggcaccacctggttcaattgctaagtatcaagtctgnnnnnnnnnnnnnnnnnnnnnnnnnnagcaagaggatgatgagatggagaaaaaaactgaacagggtacatcaatggagcttacaagggatgagcaaatgataacagggttagaggaagaggtaaaaaaggaaatttctgcagacccagaatctaacataacccaaggcgaagaagagatcaaagtagagttacaaccatctgaaggagtactcggaggaagtcatataaatgaaaacgacgaatctgggggtggaattcaggttgaagaacaagtcgaagttgaattgataaacgatggtgtaacagatatgattcattcgaccagagagcaacaagtgatagatcaattagctgctgattccgaagatctgaaggcaaaactgtcaatttctactacggactcaggcgatgcctcacgaggattgttgcctaacaagaagctatctgcgtcagctgctccattcaacccatcatcacctccaagtattatacgtcctactccaataggcatgaacattggaccgtcgtggccagtgaacatgactcttcatcacggacctcctcctccttacccttcacctccgacaactccaaacttgatgcagccaatgtcctttgtttaccctcctccttacagtcaatcagtccccacaagtacttaccctgtaacaagcggtccttttcatcccaatcagttcccatggcagctcaatgtgtccgattttgtaccaagaacggtttggcctggatgccatcccgttgagtttcccccaccgcacatgatcaccgagccaatagctgcaactgtgttagagccaactgtgattctgccaacggatattgacacttcaggtgtagaagaaaccaaagaaggcacgcaagatgtggcagtcgccgatgaagttatggattctgttaaccatgtgaacaacgcagttgcacgca

SEQ ID NO: 150176 - DNA, 662 bp, Arabidopsis thaliana landsberg
ttgtaggaggtatggatttggtgtggttattaagtgttttacttgttggagctgcacttggatattacatcagcactttacgacaaacccgccgaatctttctctcctccaaatctgtcgccatagatgcaggatccagcgggaataagaaaaccaagtccaaggaacccctcgagatagagaaactcgctgattttcgcaaaaatttcaaaatggtacctagcctcactctgcctccttgtctttgtattgcaccaagataccagtagctgatataaatgcttcttcttgttgttgttgttgtctgtgtaggttttggttgtgaggaatgatcttaaaatgggtaaagggaagattgcagctcaatgcaggtgattatcaatcctctttcagttttcaattgcatttcttgaattcaattaacaactccttttctcttgttttgcatattatatgtagtcatgcaactttaggtttatacaagaaactccttcaacgggcgccaaaagccttgaacaggtaggtatgcggtatgccacaccatctcatactctacttcaattctatgtttcttttcaggctacggatggaattaacagttacttattgctcttgcagatgggaatattgtgctcagccaaaagttgttgtcaaaattgaaa

SEQ ID NO: 150177 - DNA, 1026 bp, Arabidopsis thaliana landsberg
aaaagaaacacaaaagctatctccgaggttagagcaatggcagctgtgaactgccatttcttccagctatcacgacatctcaaaccttctaggccttctttttcctgctctgcttctcaaccttcacaaaacaacattaaggtaatcacatcaccatcaacatcatcagaatcaggagtttccagacaatgcagctttgatatgataatgcttctaatttccctattaggtaatcataaatggagctgcaaaggaaataggtagagcggctgtggtggctgtgactaaggctaggggaatggagttagctggtgctgtcgataatcattttgttggcgaagatattggcttggtgacttagcttaaaacccatctgtatactattccaactggttggtttatctattgattgactccctaactctaatgttcttgcatagctgtgtgacatggaggagcctttagagatacctgtagtgtgtgatctaacaatggcgttaggctcaatatctgaggtgggattattttcttaaccctccctgtctctctgttctcaccagatttaaattctacggaacaacctaaacgaatgtctttagtagggaaaagaagtcggagttgtgatcgactttacagacccatcaacagtgtacgagaatgtaaaacaggtaaccaattaacttctctttttgtcaagctcatatccagtaatatggaaacaatcactgcgttaatgatttctgaatctatcaaggcaacggcatttgggatgaagagtgtggtgtatgtacctcggattaagccagagacagtatctgcgttgtctgcactatgtgacaaggccaccatggtgagcacagggtgagatgagatactcgcagattattcattacgttccctttctttgtgaggtcgagtctgtcctgaagcaacaattggtagacgagagatggttcactaaaatctaatttcgtctctgcttgcgttatagggatgtcttgtagcaccaactctatccataggatc

SEQ ID NO: 150178 - DNA, 491 bp, Arabidopsis thaliana landsberg
tcatcgagtcaatacccgaaccatcacaaaaacggattcatcacaaaatgaggttcgttcttgactcaatctcctccatcgtctgatctcgatgatcaggtgctatcacaatgaagagcagctttaatcttctgaacggtgcacgatatcaaattattaaccgtctccacagattccaccgttagcttagccgtacgcaaactattcaccagtatctgaaacgccaccgttagtaacgaccctccttcctccatgcacccaccgttaccaatactgttacgttcctctgcggcgcagcgttgcgtaccagcctgaccgttagggagaatggcgaatcctgaaggaaggagtgccacgtaagcagaatctccaccgttcatcacagcttgcattgctgggatatcaacaggcgcgtacacgacaaccgctcctgcagcgtctatgcttgtctcttgtaatatcagcatactactctgattcgcatttatcgc

SEQ ID NO: 150179 - DNA, 398 bp, Arabidopsis thaliana landsberg
ccactggtcgttcaaaaatatataagaaaatattaaacctctgtttttgctggcgatcatggcttacacaaacaaagttacgatatcagccgcggttgcgacaatgatgctgtttctagcggttacgatcgtggatgcacagtcaatgccaccaatgccaaagtttaatcctgtgtgcgcgttggcggatctcccaaacatcgtccaactttgctactttaacttggatttgacgccatctgaagagtgctgcaatgatctcaaatcgtcgagcgcgatacaagtgaattgtctctgtgacaatttcatggcacatccttccaatggcaatatctcgcaagctcgctacgacctggtcaacagcgcctgtggtgttgccgccaaattcgcatgtaaag

SEQ ID NO: 150180 - DNA, 256 bp, Arabidopsis thaliana landsberg
ccaccgacgtcgtggtcgtaatcgccgacaagatttttcagatgggttatcttcaagattcgtgaaaaagcttcctcaattcaaattctgcgaacctagcacatacacacggtacgagagcgattgtgtggtttgttttgatggattcagacaaggacaatggtgtcggaatcttcctggttgtggacacgtgtttcatcggaagtgtgtggacacttggttgctcaaagcctcgacgtgtcctatttgcagagct

SEQ ID NO: 150181 - DNA, 1059 bp, Arabidopsis thaliana landsberg
gccatattccttcattgtaccttgtggtagatttccaaagaaggtggaagtctggacaactgatggtagatttgtaagacagctatgtgacttgcccttggctgaagatatccccattgcctccaatagtgtgcggaaaggaatgcgttcaataaactggcgagcagacaagccttcaaccctctactggtatatatttgagattcaaagtgaatcacatgtagtacacgtgccaaaatgggatttggaagtaattaatttacaactcttctgagatatgtagggcagaaacacaagatggaggtgatgccaaaatggaagtttcaccgcgtgatatagtttatatgcagtctgctgaaccattggcaggagaagaaccagaagtgttacacaagctcgatcttcgttatgggtaacaactaaaaacacagcagatattgtagattacttatgccatcttatcaacaaactgactaacttcatcaaagccttctatgtcctaacattgatccgatttcaattctgcagagggatttcttggtgtgatgatacattagctctggtttatgaatcatggtataaaacacgacgaacaaggacgtgggttatctctcctggatctaacgatgtcagtccacgcatcttgtttgatagatcatcggaagatgtgtactcagaccctggctcaaccatgctgagaaggaccgatgctggaacgtatgtaatagcaaagataaagaaggaaaatgatgaaggcacttatgtattactgaacggaagtggggctacaccacaagggaatgtgcccttccttgacttgtttgacatgtaagcccaacctgacaatgatttctctttcttttgcttctctttttgtttttattgccattaagcgataacaaactgaatgttctgtacaaaatttatctagaaatacaggcaacaaagaacgaatctgggagagcgacaaggaaacgtatttcgagacagttgttgccttttagtctgaccaaaaagaaagggaattaaaaatggaggagctgaaaggtcgtgacatca

SEQ ID NO: 150182 - DNA, 1273 bp, Arabidopsis thaliana landsberg
tgctctcagttattccggaaaacgagagaggtagtagccttgtggatgcgtatcacaaaagattgaattctgatgatctggaaactcaagtatgttgagatctaatcactatacacgagaaaatgcattgaccatcgttctttttcggcatttacagcaattgaactctcatcttttagcttttatagccgaaagaatttggactaataaatgtctaccatagtaattattgcattcttatgatcttgtagtacgcagctgcaagagcttggactaaatgggaaatgatgactgcttatcttcgtccaaatcttgaaaacgttcaaaaggcagaagatgataaattttcattggttagtcttatctggattcgttgacctgttgctatataaagctcatacattatctttatactgatttcttaacaaccttttggctttgtgctgcaggcgtttgcaaggattgaaaatcactactttgttaacaaaggtttcttcccctcggactcatacttgctagacaatgtcgataaaatacgacatatcaagactaccattgttcaggtacatccttcatataagcactggaattgtggactccatttgtttggagattgattaaatatatcttgggattgagattgggttgggattgtttaatggacagggaaggtatgacgtatgctgtcctatgatgtctgcttgggatctgcacaaagcatggccagaggcagaactcaaagtaagcctaaagtcatttccaagttttcttcaggatcttttctatgttggtttttgctaacgcgaccaacggactacagattgtttatgatgctgggcattcggcaaatgagccaggaatagcagcggaactcgtggttgccaatgaaaagatgaaagcacttatgggatgaagtatttgatggaatgaaagctgctcattttgttcatttctttgggacctttgttcatattttcaagtttgttgctgcaaagtaaacatcacattcagagtttgttgttaacgcgaaaccgaatgttatttccatggacgtttatacccaaatgaaaaagacaatgacataggtgcagtgttttgaaacccggactataagcaccaatgtaaccaatgaatgggactctaacgaataccttagaaccatggcctttttgaaccgtttatatgcagaaatccccaacataaaccagcggtaaaaacatatgagtcaactaaaaatccttttatcaagaggattggagactatgggtgttga

SEQ ID NO: 150183 - DNA, 649 bp, Arabidopsis thaliana landsberg; identical to SEQ ID NO: 51173

SEQ ID NO: 150184 - DNA, 321 bp, Arabidopsis thaliana landsberg
  unsure (1)..(321): unsure at all n locations
atggtcagggctatggctatggtcatggtcatggtaagttcaagcatgggaagcacgggaagttcaagcatggaaagcatggaatgtttgaagnaggcaagttcaaaaagtggaagtgatctagttaataccttttgtgaatctgtctggactgaccaatgtttcaaataagccctaaacattatataagttgactttcgtcggttagattgctggttcgagttggaataattgaaacttaattagtatcaaatcttattgtgtactttaaagctatcgttggctttataatgatagattctggtttcggtgtgttgtttt

SEQ ID NO: 150185 - DNA, 856 bp, Arabidopsis thaliana landsberg
tggcttcttcagtctctcttcagttcctgaccaacacctttatctccaaacctcaggttcttaatcttatctctctgtatcacctaatgtttctatgtcatgtgtgtgtgtgtgtgtctgtctttgtctgaattttctgagtactcctcatgttttttccggtcggacaaagggtttctgcaacggaattgtgtcagcaccaagacccagaagcaatttcttaagagacagacaaaatggtgtacgacccatcaaagttgcgtctattgagacacaacctttccctctgtttcaatctcctgcttccgaagaatcttcctcgtccgaggttaggattttcagttttgagtgttttagggtttatagagttctaaaaggcagtacctttgacaattctttgcattgcccctatctgggagattgatttagagtacaaatgagctctaaagctagtacctttagacaattctgttcattgcccccatatgtgatattgatttagggtacatatgagttcttaaggcagtaactttagacaattctgtgcattgcctccatctgtgagattgatataggggacttcttaaggcagaaactttagacaatcttgtgcattgccctcatctgtgagattgatgtagggtacaaatgagttctaacggcagtaactttagacaattctgtgcatttccctcatatgtgagattgatttagggtttttgtcttttgtttcttcactagctggagacagcagatccggatttctaccaaattggctatgttcgaagtgtgagagcttatggagttgagtttaaagaaggtccacatggttttggtgtctatgcttctaaggata

SEQ ID NO: 150186 - DNA, 353 bp, Arabidopsis thaliana landsberg
aatcacccccgtctctcaaaactccaacgtcatcttctccccggcttcaatcaacgtcgtactcagtataatcgccgctggatccgccggcgctaccaaagatcagatcctctcgtttctcaaattctcttccactgatcaacttaattcattctcttccgaaatcgtctccgctgttctcgctgacggtagtgctaacggtggtcctaagctctcggtggctaatggcgcctggatcgataagtctctctcctttaaaccttcctttaaacagctcttggaagattcgtataaagctgcttcgaatcaagctgattttcaatcgaaggtgagttttctgatttgattacttg

SEQ ID NO: 150187 - DNA, 792 bp, Arabidopsis thaliana landsberg
atgggcttcagcccaaaatctgtaatcatcgtttctgagttggagtcggccacatatgacataactgagaattacttttctctctcctctgacggttcttttcttccttcgtcctctcgttttttttgtttcgtcgtctctctctcgcgctctgaaaaattcgcagaatccgtcatgtcttccggcgtaaattcaactggctccgccgcagcagcaccggaggttgacaagatgttcttctgctaccagtgcaatcaaacagtcacaatctcaatttcctcatccgctgatcctttttgtccaatttgtaacccagggtttcttgaagaatacgaagaccctaaccctaatcaatccctcaatttcaaccctaactcttctgattcctttttccccatggccgatcctttctccaccttgctcccgctcatattcggctcttccgctgccgctccttccggcatggacttcatgagcttattcggtccttcgatgcaaccacaggctcgttccactcagcagaatcctcagtctgacgcgtttgatccgtttacgtttcttcagaatcatctccagactttgcgatctagcggtacgcactttgagttcgtgatcgagaatcatccttcggatccaggtaatcgtatgcctgggaatttcggtgattacttctttggtccaggtcttgagcagttgattcagcaactagctgagaatgatcctaatcgttacggaactacacctgcttccaaatccgccattgatgctcttcctactgttaaggtaacgaag

SEQ ID NO: 150188 - DNA, 2171 bp, Arabidopsis thaliana landsberg
atggtaagttttggataggctcatcactcataaatcaattttgtttactctctttattcttagtcaacaacgcgaatttccggatctgattagtattatttccacaaaataaatgaatgtatgatttgtcaatttgaaaataatacatgacatgtgatgtattgtttggattccaagttctcaccattttgaggattattgctttactacaaaacaagtccctagtcacattggtcatttcttcgttagtttaaaattatatataactcaacttgatgattcacataaatcgaagatcaagacttttctagtttaaaaaaaagtggaatcacgttcaaaggtcgttgatagtcacaacttaacaatgacgcattaaaatattcaaaagtctatttaattgatctatgattgacacatagaaatgaagctatataaaagttgtactctctttttgaaccatctcacaaccgaccaaactcaagtcaacatgtatcaaaaatttcagatctccggcaaagtttttaagactttggggctaaagatgaaagttctgatagcagtctcctttggttccttactatttatactatcatactcaaacaactttaacaacaaacttcttgatgctacaaccaaaggtaagaaaattatccatatcttgtgttttattgttaagtcaatgaatcctcattttggttttatgttttcattttgttgtagtagacataaaggaatccgaaacaccgggggatagactaataggagggcttttaaccgcgaatttcgatgaaggttcttgcttgagtaggtatcataaaactttcttgtaccgcaagccttcaccatacaagccgtctgaatatcttgtctcgaagcttagaagctatgagatgcgtcacaaacgttgcggtccagggacaaaagcttacaaggaagcaacaaagcatcttagtcatgatgagaattataatgcaagcaaatcagatggtgaatgccgatacgttgtgtggctcgctgattacgggcttggaaaccgactactcactcttgcttctgtgttcctctacgctctcttgactgatagaatcattcttgttgacaaccgcaaggatattggtgatctcttatgcgagccatttccaggtacttcatggttgcttcctctcgactttccattgatgaaatatgctgatggataccacaagggatactctcgttgttacggaacaatgttggaaaatcattccatcaactcgacttcattcccgccgcatctatatatgcataaccttcatgattcaagggatagtgataagatgttcttctgccaaaaggatcaaagtttgattgacaaagtcccttggttgatatttagagccaatgtttactttgttccatctttatggtttaatccaactttccaaaccgaactaacgaagctgtttccgcagaaagaaaccgtgtttcaccacttgggtcggtatctttttcaccctaaaaatcaagtttgggatatcgtcactaagtactaccatgatcacttatccaaagcagatgagagactcgggattcaaattcgggtttttcgcgatcaaggtggatactaccaacacgtcatggaccaggtcatatcctgcacacaaagagagaaacttttgcctgaattggctacacaagaagaatcaaaagtcaacatatcgaacattccaaaaagtaaagctgttcttgtcacttctttgtctcctgagtactctaagaaactagagaacatgttttcagagcgagcaaatatgacgggagagattattaaagtatatcagccaagtggagaaaggtatcaacaaacagacaagaaggttcacgaccaaaaggcgcttgctgagatgtatcttttgagcttaaccgataacattgttgcaagctcaaggtcaacatttggatatgttgcttatagtcttggaggattaaagccatggttactttatctgccaaatgataacaaagctcctgatccgccgtgtgttcgatccacgtcgatggagccttgtttccttactcctccgactcatggatgtgaacctgacgcctggggaactgaatcggggaaagttgttccttttgttaggtattgtgaggatatatgggggcttaagctttttgatgagttatag

SEQ ID NO: 150189 - DNA, 1280 bp, Arabidopsis thaliana landsberg
aagagctgaattagccgaatctggatgtcttattctgaaaaaacgacggtggatccacttctgagagatttggatgagaagaaagagagtttccggcgaaacgtggtgtctctggctacggagctgaagcaagtgaggggccgtttggtttctcaagaacaatcttttcttaaagagaccattactagaaaagtaagtcttttttttttttgaaggaatcccatttattctctgagtgattctcttccttatgttcatgtaattaaatggtggggtcaaatattatttggttgctggttttctaagttttgtaataattgaatcagattgaaatgaatgatttggtttatttctgttgtcggtttgtttgtccaggaagcagagaaaagggtaaagaatatgcaaatggagatttgtaagttgcacaagagattgcaagaaagtaattgtcagcttgaagcttatgcatctgctcctgataaggtttatccttacacatcaatttggtctcttcatagttatgaatccaatctatgagtaggctatatcaattgacttataaatacttgatcggttcagagagttatttatatggttcttgagtcctatatggatcaagtagacaagatcctatagctctttgagtcttttggaattcgattcaactagaggatgaattatgcaactttagctgtgatccattgatgtattagtgatataagcttaagatttattagtcctattttctggtcgaatgcattgttacctaacaaatttatgttattgtaatgatatatactcttagttagacttacttaatttgtatcttgtttttgaggaaacagtttatcaaagagttggaggaatttagattaaagcttgatacaaccaagcaaaccgcagaggcaagtgctgattctgctcaatctacaaagatccaatgctcaatgctaaagcaacaacttgacgacaaaacacgttctctcagagaacaagaagaccgtatgactcagcttggtcatcagcttgatgatctacagagaggtctgagcttgagagagtgctcagaaaagcagcttagagaagaagttaggagaatcgagcgtgaggttactgaggccattgcaaaagcgggaataggtggcatggacagcgagctccagaaacttctagaagatgtgtctccaatgaaatttgagaggatgaataggctagttgaagtaaaagacgaagagattacaaaactgaaagatgagataaggttaatgtcaggtcaatgg

SEQ ID NO: 150190 - DNA, 1624 bp, Arabidopsis thaliana landsberg
atgaagaggattgaggaacttggagccaaacgcctagcaaaggaaaagaattctaaagctgcagcgaaagctaaagctgaagcggaagtagaagtagaagatcacttgaaaatctgatccgtgcgatgtattgttagcagacacttaggcatagttgatcttgagatatccaatatatctatctagacgatgatcgtaaacccactacataatacaaaaaaagatatgttggtgtagcccttgaatacaaaaaaaaaagaaaaaagaaaaagcaattaaaacttacttttagtttgatttgaagatgtgtagcatatgattgtattgggcaaaagaaatatgttgaggcctatttagagacccttgggccaaataaatctgttgatggctatttagatacccttgggccaaacaaatctattgaggcccatttaaagacccaataaaagtcgtttgagtgagacagtttttcttgggaaaatcagcaaaaacagagcaagaaaaaaagaaagcgaaatgggattattggccgcgatcggagttctgttgccatttccgttctactggtggctgtggacgaatcctcagtcatgggtcaatctctgcggccgagaaagagacccatcgacggtaatggcacgtgtttctcacgtgctcaaggctgctcaactcctttctctcttctccgttgcttctctctcctggccgtctccgctctacttctggcctctcatggcctttggccagtttctcaacttcaggtccaatctttttgtttccgttcctctctcaatttgttgaattcgtaatcgaatcgaatggcatgagatcgatgataataaagatctttagtcaaatccatttttagtttgaaattgcatctgtagacgttgtgaaagttttgtcttttcttttttcaagttttaatcatcgaatctggtttagttttgtgaaagtttgatacttgaaggtcacatctttgactgctaggtgaagttgtgtttttgtcccaacaaaatggatattgagtgatgtttgatatggtggacacttctatgttctgtaactgagctctcttgttgtaaagttttgttaacttaaaaggtcacatctttgcagggtataccaattgttaggtgaagctgggacttattacggtgttcgattcgggaagaacataccatgggttacagagttcccatttggagtcattagagatccacagtatgttgggagtatcatgtctctattggcatgcctctcttgggttccatttcaatacattctcctctggtctctcggttatgttttcatgatgtttctcgagtcaaaggaggatccaaatgctcgtgccaaatccatctcatgattcctaagcataacccactagtcttagaagagctcaactcccatgaacgtcaggtcttgactgttttctttatgagtttgtattctcttttgtactcaaactgatgctacactttcatggataatgcagttaccttttctcgggttatcggtagtctacagaattgtcgaagcaagtactattaagtttatatttaccctttatgccaaagccaatgatgatgcatctgctgcaaagaaccaactggaaatatag

SEQ ID NO: 150191 - DNA, 386 bp, Arabidopsis thaliana landsberg
gaagcttttgctggttcttgaatgatcaaaaaactcgaaatcatttagaaagaaatatagactgtttcttgcttgtgatcctaagtgtttaccgagccacggatctcatgtttccgggagaacatgatcttgaagaagcaagaaaatatactcggaatttactagagaaaagtcggtccatcaatgaaaaaatggtaccaatatatcttaataaggtgaaagtgattaaaaatgcacggcctaatgcttcaaataattattgatttgtagattatgcatgaattaagtactccatggatagctcgactcaaacaccttgaccataggatgtggattgaggacaagaactcaaatgttttgtccatcgaaaaagcctcctttctaag

SEQ ID NO: 150192 - DNA, 995 bp, Arabidopsis thaliana landsberg
  unsure (1)..(995): unsure at all n locations
tgtctcaaattcgtggcactgccagagaacctgaaaggtaaacacacaagatctttctttttaatcgatctgaatcaagtctgttcacatgatgagacttgtgtctgttttttcccttttgttatgatcagctgtgatgcaaacagatgggtttgattatctgaaagagagttgcccatctttactaacggagctattgcagtatgtggcgaggctaagtgaacactctgttatagtatctggacatcgaaaagaaatatttgccgatggttgtgacgcgagtggaagacgagtgaagccccggttgcactgaatgggagagaaagaagaaagatttgtgcattgtataatctctgttatggataatggctgatctaatcggatctagcaagtacaatgaatcgttttcaacgcgttttctcataaatcaaagatccaatgaaatttggggtttattgttggtgcatatcagattattaggtgaaacagattgagttcatgggatataagaatcgtagacagtgtaagtgttacaacgtagataaacaaaggttgttttaagaatacaaaactatgaagacaaattacatgacaggatctgtaagaacttcttttatcttctcacgcttccttctctcatttcgctcttaagcatgtcttcacgtttcggctcttgataacacaatggatgactcaaagggatactctttnnnnnnnnnnnnnnnnnnnnnnnnnnnnnnnntaaaactagaaccataacatcatgtttaataccagcgactcattgcagtatcttgtgctgcagacactttttgtggtatatactgagtgtttggcttcaatctacttggaccttcagcagcggtggcgcaatcttcatctcctctgttgcttttgcaaggttgagtcctctttgggtattgagacgcagcagctggatttctgaccatccttctctgttgttgttcaagagcttcaancgcctgtgctgcgcc

SEQ ID NO: 150193 - DNA, 1208 bp, Arabidopsis thaliana landsberg
ttgcaggggcttacttttcctgacgatgaaacccaaatcctgttgttgttaatatcaaattgaataatcaaaccaagatggtgaatttgttcttatctgaaccaaagtggaacgatgatgcccagaaaagtagcaacatcaatgttattttgcctctgttgaacaaattaggctctcaaattcaattattggtgactcatggagctcgatcagaagctaggctttggctttgtagtgctctttccactatttctatatctcctagaaagcaacttaatatcttcatgaagttattgagatcaaaacctagaaagatgcagtttttatctcagcttttgacaatgatgtttgagaagagaccaaggaaacttggatttttgttagctaaaagaagttatatacttgagaagttctttgaaggtaaaagagtctttggtttcacattgtgtatttacattatcttaagattgtgcttgatgttgagtttttgatatttgtagggaatcagaagcgtatactagagtggttttctgagtttgcttatgatggtgggtctgatcacaagagaggtgcaaaagcattggcgcagtttgcgtttgcgaatcgggatatttgttgggaagagcttgagtggcgaggtaaacatgggcaatcgcctgcggttgtagctacaaagcctcattatcttcttgatttagacgttgaaagaactattcagaattttcttgacaatgtccctgagttctggtcttccaatgagtttgctgagtcgcttaaagatggacagattttgtttcttgaaaccaaattctttatagatctctttattcgtttcatgtatgaagaagatatgtatgatgtgtgggatgctgttgaggagtttcttagggaggagtctttctcttcgttaacacagcatctccttatcactcttgaagaacgtgacttgtgtcgatttcttgaattgcttggtaactattttgagccaggtattgaatcttgggatagtggtgactcgtctcgctggcttggggttcttctttcaagatatgttgacacagaatctatcgacgagctgctgctgctgagttctattatcaatcaaggtcgtcagttgctgcggcttgtacgtgatgaaaacgggaatgatgagggagaactgttgaaagaaaccatggcagagatatgcagaggtttggaaaacgaaa

SEQ ID NO: 150194 - DNA, 622 bp, Arabidopsis thaliana landsberg
atgactcaccggttaccggagacagtgccgaaagtgacagcggcggtggaaatgggaagatctaggagggagctgtataacaaagggttttagaaggcggagggctattttggtattttctcattaaaagaaaaggaaatgactttatatatgaaggaaactaaattttttttattacatttcagtcgtcgattcgaggtcgagggttttagctctatacacggaatcaatcaaaaggtacttgtttttcttgtgtcttcctccttaaacctcagaaaagaagaagaagaagaagaagaagaagaaagttgaagtctttagggatgatggctatgttcgtgagacgagctctatctagtcgtaacgcgattgggtttcttagaagaagctccgttgttgttcaatctcgtgatttctccgtcatttcttcacccaatctcatgatgatgggaggccgagatctgcaattcgatttgtccatgcccgatttccttagagattctcgtcgaggctttgcaaaaggcaaaaaatcaagtatgttgtttattcctcatttccatttatcaatcactcgctcgtgaatcttattaacataatttgtagacttttgcaagtagaggga

SEQ ID NO: 150195 - DNA, 646 bp, Arabidopsis thaliana landsberg
atgagggggtatttgggtaaaagagtttctgataaaatcttacagatccaaccaaccattgaggaccatttcttctctctcattctctcttctgacgtgtttcccttcttcggtttctcatcctcacgtccgccggatttcgaggaaacgaagaagaagaagaagaacaacaacaaaaggtctctctcgagtttctatgtttatctttttctataatcccttagtctagtgttgtttagactttcaattctgctccaaaatctctggatttttgaatctaccgttcattttctagagattttggtttctctcagtctaagagtcgtcttttgaaatcttgaatgatgaatctgagagtttctatgaaatttgatggaattttgtgtgttcagttgttgattagggtttgggattcaataactttcaaatttggtttcgattaggttcgatttggttatttttacctgtgaattgatctcgattcgttgtattaacgtctctttgtgtttttttattctgtttatgctagccttttgagatatggacagcttctggcaattaggtgatgagctacgaggtcagacgagagcatcagaggatcacaaatggtctactgttgcaacgaagctagctgagcaagctagaa

SEQ ID NO: 150196 - DNA, 728 bp, Arabidopsis thaliana landsberg; identical to SEQ ID NO: 56878

SEQ ID NO: 150197 - DNA, 518 bp, Arabidopsis thaliana landsberg
tgcaatctgttttatgcaggagaaggctgcagactcgattgcccgtagatcagacacagtgaagtgggtgatgggtccttcaggaaccatagtaaccttcccagaagaacttggattgccaagtatattcaactctacaccacacaggtatgattcgatgcaaagactcattacctcatttggatcaagcaatgctgttaaagtgaatttaaccgaaattgacatggttcaccttgctaacgaagtagttatcctccaccgcgggaaagatgtgcgggtccagaatgtacaaacccatacaaatatagagattcagagtcaaatcttccattgtgcagcctccgatgctacaaggcaatcaaaggctaagtgatggatatattgtgatcatactatttgtataatataatattttagcgttcatgtaaatactaataataaagcactatatcatactgtttgttgttaagcaagatttgaatgtttataaacatatatgaatatatcatactgtaaca

SEQ ID NO: 150198 - DNA, 306 bp, Arabidopsis thaliana landsberg
cagaatcagaaaatggagaagatggacatgtccctcttgaaaaaattatggaatgcgtcaagtcttgcatccaagtggcaactatagatgacattcttagcgcaaaagcagatttgattcatgttcttataatttccttatcacctggttttctgtggactggtacttggttcttctctcactctatcttccagtaaacttttcattaccttaatcaatctaatcttctgtggcagtaaaaatgtctggacttcatgtgtgggatagctttgctcaaggtttccgagcctatggactgactccatg

SEQ ID NO: 150199 - DNA, 414 bp, Arabidopsis thaliana landsberg
gtccaggttagaattgattcctcaaatttcaattcttcgcattacattacccaataattccgtctacatcttcgaggatggggggaagaaccgcgaaagtaattcccagaaatgtcatttttacgcttagtaggagttccatttctgagtctccattgctttctccgagtcgaataaaccctagattatccagtagtttctctttcagcatccgattattgagctatttcactgttagaaatggcttttgtcccgattgttctgtaccgagagaccctaattttgttggattgactacacaaagtcggagtattgtcaggagattttgtagtgaaaagagtggaagtagtgaatctagtggctggacagaggaggttgagtatttagatgagtcgggtagtgtactacacagtg

SEQ ID NO: 150200 - DNA, 452 bp, Arabidopsis thaliana landsberg
gtaattgattcgtgatatctatgtgtttttgctttgtttcaggtgtggtcactgccagaagcttgctcctgaggtgagaaatcggctttgaaatcactttcttaggatttgtgtgtgaaaccaatctattttagctaaaatggtttatatttgattgtttacagtacgagaaggctgcatcagagttgagtagtcataaccctcctcttgctctcgccaagatcgatgctagtgaagaagcaaacaaagaatttgctaatgagtacaagattcagggtttccccactcttaagattttgagaaatggagggaagtcggttcaagattacaacggacctcgtgaagctgagggtattgtcacttatttgaagaagcaaagtggtcctgcttctgttgaaattaagtcagctgattctgccactgaggttgttggtgaaaagaatgttgttgct

SEQ ID NO: 150201 - DNA, 720 bp, Arabidopsis thaliana landsberg
acggatactcagacgattacaaaatccttcgttgtgacttttttgccaggtataacaagtttaggagcatggtctgatttcattggtatagacccttcacttgctgtatattgccttgtatagtctgtcgctgttactgaaatttatatatgactttgcagttaggtcggccaagtttattccgcgcaagcaatgggttgtggctggagcggatgatatgtacatccgtgtatacaattacaatacaatggacaaggtcaaagtatttgaggctcattcggattacattaggtgtgtagctgtccatccgacccttccatatgtgctgtcatcttctgatgatatgctcataaagctttgggactgggaaaacggttgggcttgtactcagatatttgagggacattcgcactatgtgatgcaagtggtatttaatccaaaagataccaacacttttgccagtgcttcgcttgatcgtaccataaaggtgtgtaagaggtccaagcactgagcttttatggcttagttagcacgaggtacttttaaaagggttttcttagactaattttcatgcttgttcatattcagatatggaatcttggttccccagacccaaattttacactggatgctcatcagaaaggagtcaactgtgtagattatttcacagggggtgataaaccctatggaattactggctctgatgatcatactgctacg

SEQ ID NO: 150202 - DNA, 377 bp, Arabidopsis thaliana landsberg
ctgcaacggcaccgttttggagtagtgggacaacactcagaatctattggcttttaatattaatcctcatcatcccggtgttgtcgccggagatgttacaatccccaacagtggtggtagtggcgtcggtagtcgagttcatttagatgaattttgcagctcctattgctttgttttctggacagcctttggcttctggttatggaggaggaggaggtggcggtggagaacatagccattatggagttttagcggcgttgaatgctgcttaccgaccggtggcggagacggggaaccataacaacaaccagcaaaaccgtgacggagatcatcatcacaaccatcaagaagatggaagcaccagtcatcattcctag

SEQ ID NO: 150203 - DNA, 616 bp, Arabidopsis thaliana landsberg; identical to SEQ ID NO: 60442
  unsure (1)..(616): unsure at all n locations

SEQ ID NO: 150204 - DNA, 613 bp, Arabidopsis thaliana landsberg
aagacaggaccaagtttggaatttagatgtactgcttttccagacaggattgcgatcaaggacatgtgggttacatttcctgatgatccttccaaagatgagcttgcttatgaaggaccttccttcaggtaatagaagaaaaagttttaagcttttgatgttaccagaatcaaagcgatgatctttgatggtttctttctgcagggttttggatgaaaagcttaggaaggctttccataggtacattgagattagagggataaagccgagcatgatcaacttcttgcacgagtacatgatcaacaaggatagtagagagcacttactgtggttgaaatctctcaagaactttgtcaagtattgaaataagaaaacaatgttattttccgatgctctttgtcttccaaattttgtacttgaaacaccattcaattatgtttgggattatttatataaaaaaagagtattgtgagacagtgagaaaagtataaacatcactacaccaattagaagtaactcggtcaagtatgtccactattttaagggaatctattctgtctgctatcgaactgccaataaccatcttaaccatgttaaaatagagctacatctg

SEQ ID NO: 150205 - DNA, 555 bp, Arabidopsis thaliana landsberg
ttattcctcatacaggtgactgagcttcccttcttcgcatcgaaggtgcgtctgggacgatgtgggatcgatgaagtgtacggccttggaccattgaacgaatatgagaggtaaaagttaaaatcttgatcgatctgacatcttgaatttacttcgacatgtttgtatgttcatatcgtttttccgccctttctttttgctaattgatcaggatgggattagagaaggcaaagaaagagctttcagtaagtattcataaaggtgttacctttgcgaagaaataaagagactcgatcgtgaataaacacacttaagtgatggttttggaatagtcagagttttggaataagaataacgcctcacaataaaagctcttgcgggttttcttggatccgatcctaaagcttcaaaaaactcaactcctttaggtaaaatcttcgattgttttatcgttccatcgaaccactttgttcttagatacaagaacgtttatgatttatgtagttgggttataaaagtgagaacagagcaataatcttgcaacattttttctca

SEQ ID NO: 150206 - DNA, 603 bp, Arabidopsis thaliana landsberg
aaagcaaggaagcatcattgttggttcaaccgaattcttcctttgctgggttatcaaattggtataacgtccttaagcaagagtgcagtagagtgtcatttatcaaagatttggatttcaaaaatatttcagaattgggaggtttgaattttgacagcttcaacaatgaagtccatgcgcacatcaatgagatgaacttggaagctttggccaaaatggtagaaactctacgtggcttatccatggaaaattcgtccaagggtctcatttcctgtcaagatgtctacaaacaatatattatgaatttgttagatacattggagagtagaagagatcttgattttggaagtgcagagagtttccagggcttcctcggtcaacttgagaagacatatgaccactgtagagtatatgtcagaatcttggaacctttgcaggctgtggaaatcctgaaacggcatttcacgttagttctaccgccaaatggttcctatatgcacatccctgatagttctacatggcaagaatgtcttatcttactgattaactattgaataagattagctgatgagatgcaagaggtaaaatcatctaatccaagtt

SEQ ID NO: 150207 - DNA, 517 bp, Arabidopsis thaliana landsberg
acatagtggttacagagtgttgagccaaaataatcgagaaatgaagaagagtcaagtatcacaaacaataaggctttttgtatacatttgttccttaacaagtctttatgaacactgcaggaaacaaacaaacataaatgacatataatttaccaatgaagcctaaagcatgacatataatttaccaatgaagcctaaagcttgcaccttgcattagcgggtgagcaaaatatgccccaaccgttaacgcagtgattgcaagatatggcaacctgacaaattctttgtagtaatcctcaggtaaaacttgccgtccttcgaaaatggcagcaaatggaatcacacttgttctcttcttgatgctttcaaaatcctctccatatctttttgccaatctcctgtctccattccacgccccaaacaaatggtgtgcaatcaaaccgagagaagctgatgcagctactgtgtttccgatccagagagtatgtgctaaacaccaaacgatttgtccaaccat

SEQ ID NO: 150208 - DNA, 1468 bp, Arabidopsis thaliana landsberg
gagagccgaaaatgaataagaagattaattgaggagaaatcgaagatgtctatagcgttagtggagaagattcaagccaaattttgaagaagtctagtagattctgtattgtaagctactaaaatctgcgatggtgaggtaagattctacaaaaccgagtatttttattaattttttgtttggttgtctacacaaaagctgcgtatttgttttgttttcttcggttgaatctctttgacctcaggcatttcaatcgtcgccggaaaattcatcggagatattaaaattgaatcaagcttcgaattggtcaaccgatctattgatttgactagagagaaacgcagctgtatgatatatctgcttccgaattgagtctccatggctagtggaagcagcagcatcgcaatcggtggtttgtttgagaacgcggaggtgactacgagtggtagaccagtgcttcgtcgcaatgaggtcgaatgtttcctcctctcctccatcgatatagattccgaagatgatccgccgcgattcacagctttgaggtctggaaatctaatccttaccactcatcgtctcatatggattccttctcaatcaaacgaatctgttccttcttcgattccgctctccgccgttactcacatctattcccataagaaatcaatcaagtctatgttccattcgcctagaatccgatttcaagcggatcccggttcgattgttgtaacgattgtgtttagagggaaaggggattttgatggctttttgtcgaaattgtgggaatgttggagaggtagggcatgggaagaagaggagaagagcgagagtgagacttcaaagtcaggatctggaacagttgcgcaaggtttgtatggaaacgatggaacggtgaggatggtgggattggctgggattttgaggaaggagcaagatcagtgggagagcacagataagagcttgcaagatgcttttcaggatttgaatgctcttatggtacaactctttttcttcctttttaccgatgtaaatcatgtattgttataccaagttacaaaatttatggatagaagataagtctggaacatgattttcttaacgttttggtggttagtttgctctttgtgatgcgtgatcttgaagagtttatttgcaactgttataggattactcttaatcagtagaaggaaaggcttgttatttgattatgggttttgtgatcaagacaaactgtgtctaagttcttgtccacttattgggtttacagagtaaggctaaagagatggtgagtctggcagagaaaatgcggcagaagcttttgtctgctcctagtagtcagaacggttcaactgatgatgaagaaatggggtccaaagaagaaatgcaacagtggatgttgagcgttggtattatctcaccagttacaaaggaatctgctggtgcattgtaccaccaagaattgtcccgccag

SEQ ID NO: 150209 - DNA, 831 bp, Arabidopsis thaliana landsberg
gctcagtccaaaggataaaaggatgtggtataaaattttgggatgtctctcccagagttctatctcaaagtgagcttgatacttacttctcctggccaggtaacttctaacattttacaactgtaattttatcctaattcataatggactagaacatgactaagattagaccaagactaaagtgataaatgactatcaatttcatagtttttcatgccaaccagtttcttcttcttcttgcagttaaaggtgaaggtgaagctgaaggtgaaagtgaaggtgaaagcgaagacgaacaagaagaagaagaagacgaagacgaagatgaagatgcatatttggagattgaggatgactcgagcttgtcgtcgtttgtaggtattgagaacatcttacagctctagttttctactgatttaggatcaacttgggattagaccatgaatatagactatagtctctaacggtgacaccttcatgattttcacaggtggaggagaatattggtgaatcttttctaaatacaaacaccttagttcggtgactctttgagtttgacggtgaactttgaggctatgtatcagtgctgagaattggctcaggcaagagttcttctactggattcaataaaaaccatcatcttttggatttaatagcttagcttctctatttttggtctcaaaaactaaagtacaataacgtgtttatacttaataatgaaccacacttaccgtattattgatttcgatcgatcagttacattcacagatgaaacatgttgcggtagattaccatttcataaatcatacaggatcaagttcaaaacagcaa

SEQ ID NO: 150210 - DNA, 294 bp, Arabidopsis thaliana landsberg
gagaagaaggagcaaaaaggttttgccgaagttgagagatcaatcaaagatttgaagttccgatgaattcaggaggtggaatcgttgctgcagcagctccttcaagcggcggtggtaattgttgaatggcatgtccgaccaccgaaccctaaaaacccagttgtcttcttcgacgtctctattggtggtatccccgccggtcgtatcaagatggagctcttcgccgacattgctcccaaaaccgctgaaaacttcaggcagttctgtactggtgaactcaggtactcgattctg

SEQ ID NO: 150211 - DNA, 543 bp, Arabidopsis thaliana landsberg; identical to SEQ ID NO: 22219
  unsure (1)..(543): unsure at all n locations

SEQ ID NO: 150212 - DNA, 3284 bp, Arabidopsis thaliana landsberg
  unsure (1)..(3284): unsure at all n locations
atgctggtttcttgtgctcaagctgtttcgatcaacgatcgtagaactgctatcgagctgttaagtcggataaggcatcattcttcatcttacggcgatggaacagagagattggctcattattttgctaacagtcttgaagcacgtttggctgggataggtacacaggtttatactgccttgtcttccaagaaaacatctacttctgacatgttgaaagcttatcagacatatatatcagtctgtccgttcaagaaaatcgcaatcatattcgccaaccatagtattatgcggttggcttcaactgctaatgccaaaaccatccacatcatagattttggaatatctgatggtttccagtggccttctctgattcatcgacttgcttggagacgtggttcatcttgtaagcttcggataaccggtatagagttgcctcaacgtggttttagaccagccgagggagttattgagactggtcgtcgcttggctaagtattgtcagaagttcaatattccgtttgagtacaatgcgattgcgcagaaatgggaatcaatcaagttggaggacttgaagctaaaagaaggcgagtttgttgcggtaaactctttatttcggtttaggaatcttctagatgagacggtggcagtgcatagcccgagagatacggttttgaagctgataaggaagataaagccagacgtgttcatccccgggatcctcagcggatcctacaacgcgcctttctttgtcacgaggtttagagaagttctgtttcattactcatctctgtttgacatgtgtgacacgaatctaacacgggaagatccaatgagggttatgtttgagaaagagttctatgggcgggagatcatgaacgtggtggcgtgtgaggggacggagagagtggagaggccagagagttataagcagtggcaggcgagggcgatgagagccgggtttagacagattccgctggagaaggaactagttcagaaactgaagttgatggtggaaagtggatannnnnnnnnnnnnnnnnnnnnngatcaagattgtcactggttgcttcagggctggaaaggtagaattgtatacggttcatctatttgggttcctttgtagacagtttgttctcttgcatcccaaggaatgattttatatagggtttttctgttgatagtttcattgttcaggtttcttgtcttcttgacggggtttctaagttagggttactacttaggcatgatgccatgatctaaaaaaaaaaaactattttactttcaacattttaactttttaatgtttatggaaaatgttggataatggttacactacgttaccatttggataatttaccatttggtaaattactctatgttacttagttgcaacatgtaacgtaagtagcaaaagcatagataagtgaatttttgttttataactattttgttgaataacatatcgttgaaaaaattgtttcgtgtatctttatgaacatttttcttaatttttcccttaacaaaatttatggattttttccaaatggtaaattgtttagaaaaatgaattattccaccatagtattcctaaaaattacttcaattttaagattaagacccccaaaaagttttgaccttctggatcaaagaattgggccaaagcccaaactaaatttacagagatgaaataagtcaaccaaagtaccgaaccgtcactaatttctgtttgacttctggggacgagtctctctctggaccacttcttcgttcttgtaaaaaaaaactcatttggtacttttttcttagaaagctgtcctaaaagcttaaacactaaaacacatctgtaataataacccaaagatcataacttttaaacctcgtacatcatcagattcattcaaactgaggtaagctatgacatcaatctcccgtatttcccgtgtttactctcattcacatgtgcaattcaatttcggttgcttctggaatctaaagtttgaatttttaattcttcctttgactctctctgtttcgtgttcttcttcttctttttgtgtagctttttctatgtgggcagagcaactagggttttgatcatggatccaaacttctctgaatctctaaacggctttgagtattttgatggtaaccctaatttgcttactgatccaatggaagatcagtatccaccaccatctgatactctgttgaaatacgtgagtgagattcttatggaagagagtaatggagattataagcaatctatgttctatgattcattggctttacgaaaaactgaagaaatgttgcagcaagtcattactgattctcaaaatcagtcctttagtcctgctgattcattgattactaattcttgggatgcaagcggaagcatcgatgaatcggcttattcggctgatccgcaacctgtgaatgaaattatggttaagagtatgtttagtgatgcagaatcagctttacagtttaagaaaggggttgaagaagctagtaaattccttcccaatagtgatcaatgggttatcaatctggatatcgagagatccgaaaggcgcgattcggttaaagaagagatgggattggatcagttgagagttaagaagaatcatgaaagggattttgaggaagttaggagtagtaagcaatttgctagtaatgtagaagatagtaaggttacagatatgtttgataaggttttgcttcttgacggtgaatgcgatccgcaaacattgttagacagcgagattcaagcgattcggagtagtaagaacataggagagaaagggaagaagaagaagaagaagaagagtcaagtggttgattttcgtacacttctcactcattgtgcacaagccatttccacaggagataaaaccacggctcttgagtttctgttacagataaggcaacagtcttcgcctctcggtgacgcggggcaaagactagctcattgtttcgctaacgcgcttgaagctcgtctacagggaagtaccggtcctatgatccagacttattacaatgctttaacctcgtcgttgaaggatactgctgcggatacaattagagcgtatcgagtttatctttcttcgtctccgtttgttaccttgatgtatttcttctccatcaggatgattcttgatgtggctaaagatgctcctgttcttcatatagttgattttgggattctatacgggtttcaatggccgatgtttattcagtctatatcagatcgaaaagatgtaccgcggaagctgcggattactg

SEQ ID NO: 150213 - DNA, 795 bp, Arabidopsis thaliana landsberg
tacatggagaagcttaaagattttgagaagcgacttagagagtctactgaaaagtctcaggttgtgttttctgtacgggaaattctgtgttattgtgttattcatctttgtttaggtcagagtaacaatcccaaagagattcgatgttttctgtgtttatatgacaatgaagttcctcttaaattgcagaatcttaaagattatttagggattatcgagttctccaagacgagcatcgagaccaaggagcttggagcggatctgattcctcggtacttccagttctacaccagtcactcaaaccaagcttttgatgcgtacaaagatataatcgaggcagtggatgtgaatcttacggtatgtacatagtctttttcacataggctaattatctacaaggacatggtagatttagttgcgcttgtgtatccacaagggaacttcagtgctcaaacttagtttcacttaggatagataagctggattctctttcaaacagcagaatcaaaagaagttttttaaaaaaaaattctgtgtgtgttgttcttaactgtttgttttggagtgacacatgactttgaaaggagactggaatcggggccaattttttcttatttccaagaggatacagcctgattctgcacaattctcagtttcttggttgtgtgatattgttctttccttgaaaacttatcatgttcttcttatttgtaggtacgagttcaagccatccgcaagcttccactgttctgcaaagatgcacctgagcttgtatctaagataattgatgtccta

SEQ ID NO: 150214 - DNA, 2008 bp, Arabidopsis thaliana landsberg
caatttctatggtaaaagaagaaaagaaaatgatcaaagatcagtaagaatggtaagcttacttatcaataacaatgttaaaagcctacttccgtcattcgtagtttgacccctcttattttcagttgtcacgatctacctccgataaccaacctccaaattttccaaagtttccacatccccattcacaagtgtaacacaatcatccacagttgttttaatgtcagtgtgtccacaaaaccaagattttagccaattacacatctgttaagagaagaaaaggaaaagttggagaagaattgagaagaagcaattgaacctaaactcagagattcagacagaaaatagcgacaagaagcaatagagattcagacagaaaattgtaaacctaaaatcgccgaaaaagaaacaaagacaaatctagaagcttaatactaattgaaacaacatcaagaaataattgaaaaaaaattgtttaattgaaaaaacatcaagaaatttggttattatagtacacttccacagctaattgaaacaacatcaagaaataattgaaaaaaaaatgaactatacttaatacttagaatttttatttaaatatattcgagcatttgtttaagatttcttttcggtattcgaaagttctcaatctttggttaggatacataatctgactttcactataattcaaattcggatatgtaaaaaagctataggaaccaacataaatctagggaaaacatagcggagttatatgttgggctgtaaaaccttaatgggcttcaagtaggcccatatatccataacacaatagaatttgagtttaaagttcacgtccagatttgaagacacagcttcgtcaaaagtgggctcgttctgtctgcttaggtccctgcagagatttcgaaatcgctacttccaatttctccagaaactttctttctcggcaaaattcccggaaaaagccactcgatcagcaggtaaatactaaagcttcctccacgaattattcgccgtctatttctaaaatttttcatgttccttcgatctaaatggggttaattcgattgtgtccttgtcagtgtttagtctctcttaggtttttgatgttctgtaacagggaagcattctcttttggtcaaattttatatctttttagtctctcttctcgttcagctgaaactagttcttcaagtttctggtagcttctattcattggtccacttggaagaattctattgttttatattccttcaaatttgtgaccgttgggaaaatcttgtaagattgtatttgtaaagttcactactttggttgatacccaaaacaaaagttcactacttttggtcattctttgtttcaagctcttaaaaagtgtaacactttatttggattggtgtaatggtaacagatggtcaggaaggaagatgtggatttctattgcggattttcaaggaaagagcttcagagtttatgcaagaagtataatttgcctgccaatagatcaagttccgatatggctgaatcattggcttcttacttcgaggtagtttttttttttggtttcagaaaactaagtatggctcaggaggaaaaaaacttgttgcttgaagataatctgaaatcattaatatgcaacttcatgccttgttgctctataaatttaatatcgtcacatgtcctgttgtttctcctaatgattttctttgtttggaacctaatcatgtgttgttgtatctatctaacaattgcagaaaaataatttgaacccggtaggttttggggtccctgggaatcaagatagttcagcgacaacttctagagcaccagcgattagaacatggaatgtgaaaagaggttttcgtgaatttatttctgtttcttatagatttctcttgtctcattttgttataccatttatgaagactggttaaacctccttgcagattcttatggtaacaaattggatgaacatagagaggattttgttcaaggtgcagtggctaga

SEQ ID NO: 150215 - DNA, 200 bp, Arabidopsis thaliana landsberg
cgctcggtggaaagcaagctttgaaaccgtaaacaagtaaattcccacatctctacaacaagtacgatattgcgttgcctcttgaactcaaacctttcgcaaaacgagcttcgataatggctgcaatcgactatatagtgtgtaaggagagtgatgtgtttatggcatctcatggagggaacatgggccacgcaattcag

SEQ ID NO: 150216 - DNA, 1407 bp, Arabidopsis thaliana landsberg
gaaattattttggaaatgaaattgtgtgagaacgtgttcattgaccgaactgcattaacagcagtagttgatgccatgctgaagtgtggttcaacaagcggtatgatactatgaatttatttctgattattgctgctttcagcatccggacatagatgctcttgaagtaacttcttagggtctttattgaatatgttcacaggggccctttgtgtatttggtgagatattgaagagaagtggagctaatgaagtcttgcgaccaaagcctcacttgtacctgtctatgatgcgtgcgtttgctgtccaaggggattatggaatggttagaaatctgtatcttcgcttatggccggattcttcaggatcaatctccaaggcggttcaacaagaagctgataatctcctgatggaagcagctctcaatgatggccaggtactaacgaatttagataaactctctggatttgggccttctatttgttttatcctttatgtggtgtctatcattttctggtgatactagtctggtaatgattatgggtcctcttaactaattttatggattatttttcagctcgatgaggccctagggattcttttaagtatcgtgagaaggtggaagacaataccttggacgactagtggaggcatggtatgatgtgaaaagttatttgcagacatgagatttttgttttggtaaacatgtatttactaagcggttatgtccgatgaaaccttagttgggtggtttttgttcaaccgcaggctgctgtccgcctagaaacattgttggggttttccaagtctatattgcgtccacatctacttagtaaggtatagatatctattgcccacactctctattcaggcaaatgatctcagaatgtgaggtttggtggtttgctgtacttgcctcaatttttcaatctaatactgagatgtaagtcaggtaattaccagcactctattgacacgaggtgataccaagtgaaccaatagtaagcattatgattcgatttgaagccactcggccactgctaggcactctgcagttgaagaatgtggccatgcggtttttcaaggagcaagttgtaccaattgtagacgacaggggaagctgcataggccttttgcatcgggaggattgcaataacgtgagttaaaacaaaatattgttccgcttcagcacttgttgacacaaaaaaagatagatgaactgatatatttgtgcatttaattatttttcttggagcttgatgcgccattggtctcaatgatgagaagcccgcccacatgtgtgagtacaacaacattgattggtcgtgtggtagatctagttttggaaaaaaagcttaagatggtattagttgtcattgcgggaattttagtgggagcgggtatagct

SEQ ID NO: 150217 - DNA, 711 bp, Arabidopsis thaliana landsberg
atgactgtgaaggccattgatgatcaaatagcatgtgaaatcataattttgcacgtgatttatcctaagccaatcagtaagttacctagctacttattccattaaacgtgtttaaatttatatgtaaactgtgttaaaaaggaacaattgataagcgcaatcataataatactaattaaattaacaaaacagtaaaaagaagttcttgaaaatcgtcatgtatgatgaaatgattaatactaaataatgtttaaagaaatgtcatgtcatttaaacccccccaaaaaaaaaacaaagacgtcacattcaaatgtcaaaaaatattcgaggaaataacgcacgtgtttccaaaaacacagatcagaatacgtcccgtgtgaaaagagtgtgtgccagttaggcacgccacgtagatacttgacaaaaacacggagccatataaatagagcttctttctcactttcagtttcccaaacacaaacaaaactcatattttcaatctccaggtgctttacaccaacagagtcgcaagaaaacaaaaaccaaactcggatttagtttgacagaagaaggaatcgagagtcgggtatgcattatcctaacaacagaaccgaattcgtcggagctccagcctcaacccggtatcaaaaggagcacgtgtcaccggagcaagagctttcagttattgtctctgctttgcaacacgtgatc

SEQ ID NO: 150218 - DNA, 895 bp, Arabidopsis thaliana landsberg
atgatgcggaaccactcctgcgatcctgtggcatttcgatcagctccaactttactcaggtggagggtcgtgttctaccagctcccaaggtatggtgcgatcgcttactttttgacatgatgaattgtttttagcttttgcatacatgtaatattctcttgttttctttgactgacagctgaaaatgggatgtggatctgaaacctttcccagaaatggtcgctggaacttcaacaacaaggtgctgtttctctctgcctttctttgtattttacctgttcagagagtctgattccctttgttgtacaggaatttgttgagcccaccaaaattcaacgatgggttgttgtcaatttctctgctcgctgtaatgtacgtcaagttgttgatgatctgataaaaattggaggatcaaaaggaattgtaagcaggattctcttcttttgtttttagtattcttgaaaacttgtttgtgattatcaacaatttagatactgcttctttctgtattctgtcccaggaaattgcttctccctttcaagtgtttgaggagggtaatcaattccgccgtgctcctcctatgattcgtgttgagaacatgtttaaggacatccaatcgaaactccctggtgtcccacaattcatactatgtgtgctccctgacaaaaagagcagtgatccctatggttagatatctcttaaatccagtcctcaatcatctttttgttttatataatagaagtttccttggataaaaactttgaatccttcatcaggtccatggaagaaaaaaagcttaactaaatttggcattgttactcaatgcatggctccaacgcggcaacctaatgatcagtatcttactaacttacttctgaaaattaacccccccggt

SEQ ID NO: 150219 - DNA, 365 bp, Arabidopsis thaliana landsberg
cttctcaccatcttaagtagatgtgccgcatcaagtctctaaacaaaaacagtcttcgatttgttcacctctctctctctcttagacaagccatgaaaggacagaacgaaagctcaacatcttcttgtaacatccatccagtagatgttattgaaggtgtgtgtcctctctgtcttaacgagaggcttttggtcgtggcttctctacagagattacgccctccatgtcctccttcttcctaccaaaccatcccgaaagccatccttcaaaattcttctagaaagaaccccatcagacccttctccttctttagcttcttagaagtccgacataacaagtccgatcgccagaacacctccatatca

SEQ ID NO: 150220 - DNA, 1000 bp, Arabidopsis thaliana landsberg
aaagtttctaactttatcttacttgttaagcaaatctaacccaattctcatctgaaaccctaatttttctgggttcttcttaaaattgagaattttgttcatgcatctatagaaagtgaagatttttatgtaattagattgattttgggttgttcttcttgttgttgtgatgctaagcagataaaacaagtcctgcatattgaagatctgatgtcttatcgattgctaagtgtggataaggatgaactggttacgtcaccttgtttgaaagaacgtaactacttgggtctctctgattgttcctctgttgatagctcaactattcccaatgttgttgggaagagcaatctcaatttcaaagctactgaactgaggataggtcttcctgagtctcaatctcctgagagagagactgatttcggtttgctgagtccgagaacacccgatgagaagcttctcttcccgttgctaccttctaatgacaatggttctgctactacagggcataagaatgttgtttctggtaacaagagaggatttgctgacacttgggatgagttttcgggtgtgaaaggatctgttagacccggaggaggaatcaacatgatgttgtcgccgaaagttaaggatgtctcgaagagtattcaagaagaaagatctcatgctaagggtggcttgaacaatgcaccagctgccaagtgtgtattatatgatgatttgcttatgagtttgtttatgagtcaagaacgaatcttgtggtaatctgtgtctattgttttgcagggcacaggttgttggttggcctccaatcagatcataccggaagaatacaatggcttcttctacttcgaagaacactgatgaggttgatgggaaacctggtcttggtgttctgtttgtgaaggcgagcatggatggtgctccgtatctgagaaaggtcgacttgagaacttacactttctatcaacagttgtcttctgcacttgagaaaatgttcagc

SEQ ID NO: 150221 - DNA, 420 bp, Arabidopsis thaliana landsberg
aaaatcacatcatctttgtagaatatatcaacggctgagattaactccgaggtatcacaggacggtgggagattgatcacaacatcatgttcaagaaacggaaaggaatcggagaaaaacgtccggtgaccgtctgggaacgttgagatgatgctctgtacacgtctgtccaaggtagaaggccatgtagcggaacattgttgcctccagagggactcgtcggagcaaaaagagtttaggttggagcacgtgcagcttagggcggcgagagaggaaccgtcgaggcgggttaggatgttagaccgtaaaacatcggaggacacggcgttgattcccggacttccgccacgtgatggttgctccaccgttgacgaagacgaagacgaaagcatgagataaagattgagttgaaaatgcaag

SEQ ID NO: 150222 - DNA, 1325 bp, Arabidopsis thaliana landsberg
  unsure (1)..(1325): unsure at all n locations
tcactatgctcgaaaatctctctttgttcgctttgtggggaacgaactatggccgagagatggaggaacacggctctactcgtcatcgacatgcaggtctccatctctctctctctctctctctttgttgattgtgtttgtgtgttttctggggttttagagagtttgattgaattcatttgtgtgggcagaacgatttcatagaggaaggtgctgtgacgcaagtgaaaggaggaaaatctatagttcccaatgttattagagtcgtcgaactcgcgaggcagcgtggtattctcgtaatttgggtattttatccatttatcttatccttttcaaggcatgtagttgtaacttgcttgagaaatttagaaaaattctggaattgattggttgttgtgttatatgaattcgaacttgatatcaaaaatcttgatgaagcgaaaatggagtaaaatgggttcttaattttgcttgcatgttctgtttccagaatcttaatgtgagatctttagtttccaagtcaagtgttacaactcttgagagagcttttcttatccacaaaatctctggcttgattactgaaggttaaggattgtatgttcaaattgtctagatactgatgaaagcatatgagataccactagtttcgattcagtgtgtggcaggcttagttgacaaagtgtttttttcatggttntaggttgttcgagaacatgatcctcaaggaagagatgttgaattattcaggcgccataactacagttctgagaaagttgggccagttgttaaaggcaccgtaggagcagaattggttgatggattgatgatcaaagaagaagatgactataagattgtgaaaactcgtttcagtgctttctttagtaccaatcttcattccttcttgctaacttctggggtaaccaagttagtcattgctggtgagttatgttatgtgtcttaatactaaacttttatttgactccttttgtttctataccattctctcggattctgtaaccctttggattttcaggtgtgcaaacgccgaattgtatccggcaaacggtgtttgatgcagtggcgctggattatcccaatgtgactgttattacagatgccacagctgctgcaacaccagagatccatgatggtatatacccatcttttctactcttggtgtttgtctttgtggtttatcctaatttgtcagaagaatcttgaatatttcttttttctttggtcattctccgaaaagaggaactaacattgtcgtaacttcctttggatcagcgaatattcttgacatgaagaatattggagtcaaa

SEQ ID NO: 150223 - DNA, 651 bp, Arabidopsis thaliana landsberg
aaaccaaaatctaataaacttccaaaaatacataaaatataaataaaaaatagatcacataaagtctacgtaactaataagaaccaccaaaaatcaaataaattaggatcagagaagaaatttatagaaccgccatttttactctcgcaaatagctaaccatcaaacaccaatttccatatcacgtaagctatatatatttttattttatacactcctttctctcaacttctttatttttatatacaactcttaaaagtaagtatattatatttatttaagtggtttatgctttatataagaaagaaaatgacaagtatgatcgtgaagacaacgccggagctcttcaaaggaaatggagtgttccgtacggatcatctcggagaaaaccgaatggttagtcgatcaaaccggctaggtgatggatcaaaccgtttccctagaaccggtacaatccattgccaacggttaagcatagcaaagaccggtttgcatcgtgagacgaaggctcgagccatacttagccctgtgtccgatccggccgcttccatagcccaaaaggtaagcctttccatttcaatcattctggtgtattttcaccataaaattttatacacttttttattacgttttgttttatgattctgacgtg

SEQ ID NO: 150224 - DNA, 331 bp, Arabidopsis thaliana landsberg
atgagaaacaccgctcaattcatcaccggaattaacaaaaagagtttgaaattcagaattgtcgtcttttgtttcgatcggattccttattcgtgtatcttctccgattcgatgggaattggctctcatggcgatggtaatcaacaggtttcgcgttaatcaaaaggagtgaaacgatggcgttttgtatttggtgtttaagcaacttcagttctcaccgttttgagtgtttctgatcatttgtttggcagagaacttaaaaggttagatctttcttctgaaatgatttcattattaattgtctgcttgcacctacatcatgttagttatg

SEQ ID NO: 150225 - DNA, 979 bp, Arabidopsis thaliana landsberg
ccgacactttcttcttctttgatcatatcatatttatcttcactacaaaaaaaacaagtaaaataaagccaatcttcttaaatatctccagaagatctatcagcatttacgtattcaggtcctccaatgtaagtttcttttttactttcttattctatttgtgtcaatctggtttcattagtcgtggcagctgggcaggtacaaatgctgatggcacatggcatcaaaactatcaatttatttatgtcctaaagacaaaatttaatgataaaatacaaaggatttaggtgatactatgttgtctcttaatgctcatcgtgtatctcttaaaaatccaaaatcttcttattttccttatatttaattaaatgtgtcttgaattttcaagtgtgtctctctctcaatactctggagtttttgtttgtttgtatctgatagttgttacaacatcaattttctgattattctatctttcaacttccctataaaataattatttagagaacaacataaagtttgtattttaaaaatatttaatagccattgattacttttgtaattgcgttttctattagttcttctcacaaagaaaaaggaagaaaaaaaagaagttgtgagagcaaaaaaaaaatggcagtggataaagtgattgtgaagcagaggaacattatattggttggaattccaattgatgaaagtggcgtagaggttttaaaatgggcacttgaagaagttgcaaaacatggagattgtgttgttgttgtccatgtttgtttaacttattgtaagctcttcttcttctccttcttgttttgttcttttgaagttactaaattttgatttatggatcttatttttgagttatgattgatacagaccgtgccttgaaaagcaagtcatcgctggatcggtacttaaaaccatacattgaattctgctcaacaaagaaggtatctttcgatctttttgccgcgtcaaa

SEQ ID NO: 150226 - DNA, 172 bp, Arabidopsis thaliana landsberg
aacaactatgcatataggctttgttatacctgtcaatgggaatctggtggctggttttgaagcctataaaaacaaatctagagaatcttgtatggattacggttttcatatggcaatcacaaagtgggatgaaggtgtggccagggacatggagatgttggtcaggcaaagg

SEQ ID NO: 150227 - DNA, 1160 bp, Arabidopsis thaliana landsberg
cgcggatgcggaagatggcggagaagacgaagaagctgagaggaggattcatcgtcagcgccaacgtggtggagaatcgcctcgggaacggagaagacgaactccgagtagagagagggatgattcgaagagtaatcgatcgggaagtagagagagaggaagtagtggtaacggtggtggaagtcgacgagtgagtagatctccgggaagaagatcggagataaaccctaattccagtggcaattctgtgaattcgagtaacaacaatagacctgggaaatttgtatctgttcctgcaacagataaagctttaagcaacaacaatggagatggatctgtgaaacggattactgttaagagaaacgttggaaaagcggcttctccgaggtctcagtcaccggcgagagctgcgagtcagccttctccgtcgaagcttagccggaaaacggagcattctccgtataggaggaatccactgagtgagattgatccaaactctgtagcgtttccactctctcaaggtgataaattgggttctggtaacaacataaggatgatgaatagagacaatgaaaatcaaggattggttaaagaatctggaactttcgtagctcaggtatttgaatctcctaatcaagtacttggtattgttggaatgaattggaataaggaggttttagtgtttgtgtatcgttgtagtgaatgtttataatgtttgtgtgttttcagaagttgaatcctgtgatgaatacaaagacggttacacaagcgccaatccgaagaaccgcgagcccgagtcgtgccatcaaggagcagcaagaggcagtggaagagtgtaagatagtggtttcatctggaactgagttggctaagccacaaattgtgagcaggagcagatctttgaggaaatctcgtgatttcgatttcagtcccgaagcattgctctcaaacaatatcgatatcaacaatgttaacagtaacaatgcaactgcaggatcaacgtttccgtcttatacagctttgcttttagaagatattcagagtttccagagaagagtgttaatgtcagtgcgttaagttcatctatgtccaaggcttgttccattgtcgaagcagttgcagatcttaactctgctacgaatcaacatcaaagaaccgag

SEQ ID NO: 150228 - DNA, 1084 bp, Arabidopsis thaliana landsberg
tgaattagcttgagtttagcttcgaattttatctttgatctagctaaagaaacagagagttttcagaggaagaagaaacagagagttttcagaggaagaagaaacagagagtagtgatgacatcagggacgagaatgccgacatggagggaaagagagaacaacaagagaagagaaagacgacggagagcaatcgcagctaagatcttcaccggattaagaatgtacggtaattacgagcttccgaagcattgcgacaacaacgaagtgcttaaagcactctgtaacgaagctggttggatcgtcgaacctgatggaactacttaccgcaaggtttgtctctcgaatccggatcttagttttgttctctacgcttcaagtacatgaaagttttgaattttggatacaaaatcattcagtttttgttaaattactgattgcatctaacatgcgccggagccgatcggtcgcgtgaatgctaacgtgttcctgatatacctctccgcgtaggttagctagccttagcttagaggagcgttagtcaaatgttagattctttatgtgtgactttttattatgcgtttctctaaaaaaagattctttctctctctgtttcatggtgtgtgtgtgtgactaattcacttgttgtccaggtcgagtctattctcagatgatactcaccacaaaaaaagaaagtagcatagatctcaataaaaactgataaaaataatgtcctcttgcacagaattcaaagtgtacgttttgatctgtagattttttgggaaagcaagttggcacttttgcttttatgtctcaagtctttttactcaaacttcgagaatcgagtccaatgatagataatctgtcggttcaagaatccttgacctgatcactgtctctttcacttgttttcacattgatagaatcaaaactagttctacttgtaacttccttgtcattattaacagagtaatttcttggtaattcatgtaattagaaggattacgtcacattgatcatgtttgtttgatatgttttcagggatgtagaaaacctgtagagcgtatggagataggtggtggttc

SEQ ID NO: 150229 - DNA, 686 bp, Arabidopsis thaliana landsberg
agtcgtgaagatgagaggcgtaacaccaaactattaccattcttacactttcttcttcttcttcttcgttgtcttattagctctgtttcttcatgttttctcgataaacactttgtcatctacagaaactctaacaatctcaagcaaccgaaccattgtgtctcccggtaacatcttcgagctaggtttcttcaaaactacaacaagctctcgaaatggtgatcattggtatcttgggatttggtacaagtcaatctctgagagaacttatgtatgggttgccaacagagataaccctctttccaagtctatcggaacattaaagatctcttacgctaacctcgtccttcttgatcattctggtactcttgtttggtcaacgaatctaacgagaacggtgaaatctccagtggtggcagagctgctcgataacggcaacttcgtgcttagagactccaaaggcaactatcaaaaccgattcttgtggcaaagctttgattatccggtggacacattactcccggagatgaaaattggtcgggatctcaaaacaggacacgagactttcctcagttcttggagaagcccttatgatccctcaagcggagacttctcgttcaaactcggaactcaagggctacctgagttttatcttttcaagaaagagtttctattgtaccgatccg

SEQ ID NO: 150230 - DNA, 565 bp, Arabidopsis thaliana landsberg
tgctgtattttggctgcggttatgttcgtttatgggatgtgagattctaccaaaacttgtctcacttttattaagaatactaatctgtgaagatataattgattatacacctggcagctgaaactgatacttaagccatctggtcatgttgtaggtaccaaaagaagacagcgaagctaattcaggagatcacagcttctgcaaatgaagtagattgctcaaaaacgcttattgtaacttgtcttatatgcaatgaattctttcgttaataactgctctgtgatcttcaaggtcgctcaagagacatactctttgatgagaaccgttcgtgtatatgggacagagaagcaagagtttaaaaggtgcgatctgtttccatgaaaaccattgacagtctcttttttctttatttatcttgtgaaaattttgcaatatcggccctatctgtttcaagactatttttggcagccaagttactttttgacatggattttcttcccttctgtggtggaaaggtacaatcactggcttcagagattggcggatataagtttgagacagagtg

SEQ ID NO: 150231 - DNA, 291 bp, Arabidopsis thaliana landsberg
caggccaaaatctataggagaatatgttaatcttgactatttacatttctgtgcatgaccacaggactgaatgtagaagggtgtgccgtttgtgtgttgcaggcaaggaggctgcaggagaaaggatggaaaccaagatggtttgaaaaagatgaagaaggaaattatcggtatctaggaggttactgggaagcaagagagaagaaagattgggatagaatcactgacattttcaagaagcaacaacagcgtaactcgctctcatcttcttcatcgtctacctttctttaa

SEQ ID NO: 150232 - DNA, 677 bp, Arabidopsis thaliana landsberg
cactagttttactgctgatcctcttctgcctcaccacttttgagttcataacttttgtctttatttctccatatcgtcttatccttaattcatatgtgtttgataaatgataatgaataattcatcattctcttcagcttcatgttcatgctgctgaagattcacaagtcggtgaaggcgtagtgaaaattggtatgtaacgctaacatatatgtaaagtgttatatctctgtttatatatgatttttaaacggttaaaaactagtcatatgtgtataaatatatcatgtgaagattgcggtgggagatgcaaaggtagatgcagcaagtcgtcgaggccaaatctgtgtttgagagcatgcaacagctgttgttaccgctgcaactgtgtgccaccaggcaccgccgggaaccaccacctttgtccttgctacgcctccattaccactcgtggtggccgtctcaagtgcccttaaatatatacgtacacagatgtgtatatatgtcttccgcgagcacacacgtacgtttatgttttaaggacaatagtatgtatgagcagctataaacaaaccagaagttaatggttcatgttgaactagtataagttgtatgaactgtgcttcttttgaacaaccacttttgctgtaagtttagcaacccaaattagagattac

SEQ ID NO: 150233 - DNA, 630 bp, Arabidopsis thaliana landsberg
tctcttcccatggcttcttcactgaagaagcttatctcaagctttctacttgtcttatactccaccaccatcattgttgcttcattagaatctcgatgtcggcgttttaaatccatcatcagttttggtgattccattgccgacaccggaaattatctacatctctctgatgtcaatcatcttcctcaaaccgcctttcttccttatggcgaaagcttcttccatcctccctccggtcgtgcctctaatggccgtctcatgatcgacttcattggtagctatttttttcatctctataggcaaaaccacttgttctcatttgctctaagtctttcttacgtgaacagcaagttatacttcttcctgattttttttttatgttgtcttactatttgaacagccgaatttttgggactaccattcgtaccgccttactttggatcccaaaacgttagcttcgaacaagggatcaattttgcggtgtatggcgcaaccgcattggaccgagcgtttcttttgggaaaaggaattgaatctgatttcaccaatgttagtttaagtgttcagcttgacaccttcaagcagattttgcctaacttatgcgcctcgtctactcgtggttagaaactt

SEQ ID NO: 150234 - DNA, 968 bp, Arabidopsis thaliana landsberg
ctgactgactacaagaatgcattatccatcttagaacgactggttgagcccgacagtcgacgcacagctgaattgtatccttttgatttcttaaatagtatctgattttcgtttctgtcaatttagttgttggattatataaacttaacttgatcgtttcagaaacttccgcatctgcatttgtcttgagactggatgtcagcctaaggaagcaataccatattgtcaaatagctttgttaatatgcaaagctcggatggagagactcagtaatgaaatcaaaggtgcatctggttcagcaacttcctcaaccgtctctgaaatagatgaaggcatccaacaatcatccaatgttccttacattgataaaactgcttcagacaaagaagttgagattggagacttagctggtctcgctgaagatctagaaaagaaggcaagtaaactaaacctatcagttcattaaaataactcctaaacccatactaatgtccaacatttgttttctgtagcttgaggatttgaaacaacaagcagagaacccaaagcaagttcttgctgagctaatgggcatggtatcagctaagccaaatgccagtgacaaggttgttcctgctgctgctgaaatgagctcttccaggatgggaactgtgaataccaatttcggaaaagatttagagtctcctacagtctcaaccgctcataccggtgcagcaggaggaggagcagcatcaggtgttactcacttgggtgttgttggaagaggagtgaagagagttttgatgaatacaacctcgattgaatcaagtgcatcaaagaaaccagctctagagttttcagacaaagcagatggcaactcctcttgaaaccggaaaaaggtataaaaattcctgttactagtgaagtatctaacctaagaaaaaaaagaaaaacatttggtatcttcctcatgaatcttccaagactag

SEQ ID NO: 150235 - DNA, 496 bp, Arabidopsis thaliana landsberg
atgccttccgctgtcagagttcaactgataaacgatttggcagacattgagttagtatcttttgcatcttaaacttaaaattaggattgcctggagtagaatatttaagcttgtgttatccacaatctttttttttttgtaatttcgagtcgttttactgtttataggtacagattaagttttggttgcaacgacaaactgcagcttggagctatcatttctactttcacacatgcccggtctatcattgttggtgcagcaaagtaaaccatgtttttaccattttggaacccgcagtagctcgccaccttaacaaaccgctagaatgttttatctccgtgatgttttcctgatagtctctgtacattttgtggcgtttgtgaccaaaaggcttgctttttatttcttatgaagagtttcaatgccaccttgttatcctcttctcatctcctcgaagttgtaactttcaatttcttgatcagattatgttttaatg

SEQ ID NO: 150236 - DNA, 655 bp, Arabidopsis thaliana landsberg
tagagattcagacatcgaaggtccgtttgacggatttcttggacgagagatcagagtatctcaccaagtttgctgaagaagccaatgcggagtttgacaaggttggagaagacgccatgaaagaccttgacgaagctagcacaagggtatgtatcagttgaaaacgataacattttgaaatctcgtatcatatggaaatagtcttaacctgtgcacaatacagttttagaacagtagaatgtcttgtttcaatggcttaccttaattctctgatgcagtttgatccttatgaattgtctttactctctagatcaagtgaactcagaagctttcagatattgtgatttgctcgatgatattgcaggaacagaacgatagataagctgatattgtttttctttccgggtgattgagcagatactggagaatatcgaaagcaagatgcaagcttttgaggaatctgcgggattgaacagattagagatcgaggagaacgataataagttggctgagtttgaggagaagattcaagtagacaggaatgaaggattgttctttaaaagcctacgtgacaaaaaaccagtggatagagagcaagaaagagaggaaactgagaaaagacaagaggttaccaaagaacgtgcaggatcaaagt

SEQ ID NO: 150237 - DNA, 699 bp, Arabidopsis thaliana landsberg
tccttgtgcgctcgataatggctgcttccgatgattcctctcactatttcaccgagtttaccttgtctgaggttatctatgctttctatcattcgttttcttagattagagattcatgctttgtgatcttattgctcttcttattcgaagattgtagacatggagaatctgtataaggagctcggtgaccaatctctccacaaagatttctgtcaaactgttgcctctacttttaggtactttattctgaattttacgagaatttgatcatgtgaatgtgtttgttagagaatcgagacacaagcattttgtggatttataggaatagtaggattattgattttcatgcacagtatctaaaaaatctttatgtcttcttccattttctcttatagttgttctgtgaatcggaatggcaaatcctctataacctggaaacaggtgcgtctcttttttcttcatagagctaactggtaaaaaatgcaaatagagtagaaataacttttttttttgaatcaaaatgttttcaggtacagatttggttccaggagaagctgaagcatcaaagccaaccaaaatccaaaactttgccatctccccctttgcagattcatgacttatctaatcccagttcttatgcttcaaatgcctcaaatgctacctttgttgggaattctacctttgttcaaacacgaaaag

SEQ ID NO: 150238 - DNA, 413 bp, Arabidopsis thaliana landsberg; identical to SEQ ID NO: 10621

SEQ ID NO: 150239 - DNA, 1944 bp, Arabidopsis thaliana landsberg
tgaatttcgaatccgaattagggaaggctctactcgtggatattgtatacgtgttgctcaatccaccaaaggagcggattcttgggttgatgatcccatcactcgtcatattatcagcctttgcttaaccgaagaagatgatgatgatgatgatgaaaggaacattctctggcctattgctctgcataccaaagcgctttactctatcctcgtcttgcctttggttgagccaaaggagatgaaggattacgtcaagctttgtaggagatctgattgtggaccagctgttggtgaagatttgagtttatcatctctcttgcttaacatttcatccattacagggtacttatagctccttaagggcaatgcttttgatttaagagtgatgttcaactccttgatggatgcacttgtcttgtcactcatgttgtagggcttttatggtggctcatgcatttggtgacatcatttctggtgatacagtggaacctgaggttgttgtaagtgcgtcaccatcagttggggggttgtttgattcactaactggaagcattggtatctcatcgagggctaaacctgtagctgcacctgttgcatcatctaacccgtctggagctgcaataactggagccacagcatcggatgctcccaaagcagggtcaagattactggatagagatttacttagaaactttattgctactgctatgccgtttggttagtattttccctctttcatatatggtatattctgttacctggtagactttgtttcctgattgatgtgctatcaaaccctgaaatcttttgatcacttctgcaggtaccccattagacctcagcttgtctaatatatctgctatgaaagcgaatggtttttcctctgctgatcctccctccccaagaacttaagcaaccagcatggaagccatacctgtacaaaggaaagcaaaggctattgttcacaattcatgagtccgttagcgctgcaatgtacgaccgcgatgagattcctgataatgtatctgttgcgggacagataaactgtcgggcagagctagaagggctgcctgatgtgtcgtttcctctagcagggctgagtacagcccatatcgaagctatatctttccatccatgtgcccaagttccagcacatgggattgacaagcagaacattgttttccagcctcccttgggtaactttgttctcatgcgataccaggcaggttgtggactcggaccaccagtgaaagggttctatcagctatcaatggtttcagaagacgagggtgcattcctcttcaaggtgcacctcatggaaggttacaaggctcctctgtcaatggaattttgcactattactatgccctttccacggagacggatagtggcatttgatgggactccgtcagctgggactgttttaaccacagaacactctgttgagtggaggattctgggcagcggacgtagtctttctgggaaaagccttgaggcaactttccctgggacaatcaagtttagtccattgcagagcagaagaaaaggggatggggatgatgaagagagtgaggatgagagcgctgagaatgtggtgaacgtggaggatttcttggtgcagaaaatgaacaaggatctcccagcagctgagttggaggaaccgttctgctggcaagcctatgactatgccaaggtatgtatgtctttggcttccttttgaaatcttttggacttggttgttgttcaaatctatcttctggtttacaggtctcgttcaagattgtcggggcatctgtatctcgaatgtcaatcgacacaaaatcagtaagctttcgcaacttgcaatgattagttaacagtgttagcccatattatcaacatattatggcctccctttgttttactaggtcaatatctacccaaccacaaagtcaccggttgagt

SEQ ID NO: 150240 - DNA, 329 bp, Arabidopsis thaliana landsberg
ttgctcaggtttagttgtctccctcgtttgggttgtcgtctccctcgtttgggcttaagcttctcttcctcgactatattacttcgttagtttggggttgagctttttggttgtgtcttggatctatctcatttagtattaagcgatgtttggcttaattactcgtttgttatgtgggtcttgattattttacggtttatccgggagacccttgacaaagactctcatggagaaaggtgcatcttatgcggagaaggccaaggtccactctcttgtttgcgccatttgtgttgaagcccgttctcatatattagcggaaagtccttatg

SEQ ID NO: 150241 - DNA, 570 bp, Arabidopsis thaliana landsberg
gaaactgtgaaggacttaagtccttgtcatcgaagcagcaacgtacaggttctgatgatgctatggttgaagattggatcaagcaattcgagaatcttactgggtctaacgtaagtatacacaaactgagttgttacttcatgctatacttatctagtttaatgttctctttatcttcaagttctctgattagattagattactaaagtttcatctagttaaggttgttgcagagtagtaacacatgttgcaaagtagttttgaaggctgtgttaatagtagtgatactgatactaatatcgaaaaaaccacaattgaagatgagaattagtttgcagaaccatttgaaagtagtcttgatcactagaagttttgtttttatgatttctcatttcataatttccatgtttttgtttaggacttggagtcgatagtggacacgatgatgcaacagctgttatcgaaggatattcttcacgaaccaatgaaagagattggtgcaagatacccaaaatggctagaagagcatgaatccagtcccaacaaggaaccgacaaaccccaaaaaaac

SEQ ID NO: 150242 - DNA, 689 bp, Arabidopsis thaliana landsberg; identical to SEQ ID NO: 26426

SEQ ID NO: 150243 - DNA, 270 bp, Arabidopsis thaliana landsberg
acggaaattgagaagaaaggaactgagaattttgaagcaaaagatagagagcagattgtggttacctggatgagcgaagtggagtccgtgaagaagaagatggagaagatgaagattaggttcttaatgaatagaatagaagaggaaggaggaccaaatcaatgcgaagaagaagaagaaaggaagaaaggatcaaaaagggaaaagatttaacgcggagacgactcagaacgacccaagaatttgagagtacaacaaggaggtctttgg

SEQ ID NO: 150244 - DNA, 4616 bp, Arabidopsis thaliana landsberg
  unsure (1)..(4616): unsure at all n locations
gtgttcgacgttatgcctgaatgaatctgaagaatgcattgaggattctgatctatcgtctaggagaaaaaaatttgattatgttggagaagttggtgaaaaagagaaagtgagagatattactagtagtcctttacaagttttacgaagatggggttgtgatgatgatgaaatatccaagctttttactcgtaggcctgctttgcagagagccaatgttgctcagttagagtttaagttaagccttcttaagccactgggaatcacgtcttcagaccttgtgaagattcttaactgtcgtcctaggttctttagttgccgtcttgtccttgatgaaaggatcaactacttcatggagattttggggtcaaaagaggtgttgcgcagagtcattatccggaatccgtcactcatgttgtatgacctcgatgacaagatcaaacccgcgatagaatactacaaagggttgggctttagccaacaggatcttgtcgcaatgttgatatcgcgacccacgttgattccaagaacaaactttaacaatgagaagtttgaatacattgagaaaactggagtcaccagagaatccaagatgtttaaatatgttgcagtcatcatcggggtctcgaggatggagacaatcgaagagaaagttagaaacttggaaaagtttgggttctcggaagaagagatttggcacctgtatggaaaatgcccaatccttctctctctctctgttgagaaagttcagagaaacatgactttcgtcatagcctcgatgaaacttccagctcattccgtggttaagcacccttgtttgcttctcctcaacctcgagtctcgtctaaaacctcgtgcggatctcgttaagagagtcttggaaatgcgtctaaagccattgataaaagaagtgagcattttcagagcggtaaggatgagcgagaaacggttcttgaaggtttatgtaatgtgtcatccacaagatattgcaaccgagctgatggagttttacgagaaatccaaaaacatgaaacgtttagctgagaaatccaagaaatacatccgtaaaggattccccttttgaatctctttttcatcttttgtttctttggatatgttcattaaagatgtaacattgtgtagaattttccagctttatcaatggatacttttgaatcggttcatgttttggtttagatcagattagttaaaccggaatagaaaaatatcaaaacacaaaacgcgaagaagcacgtttggtgaaacgaaacgccaaagacgccctagacgtgtctctcttccagacccgttcgtggcggcagtgacaaaatcctctttattgataaaaacgtttgcaaagttgcaacctttttgggtttagtacttgaagagaatcaatctgacagcaaatagttttggcgtctttctaactcaacccatcatctctgttgcattttatcgagagaatatttgaggtggatatggcctcgacccttttctccagaactttcttggctgctagtcaccgactgattactccttctcttccgcaaaagatctttaatccagccacctttctcagtgtaagtcgatatctgattcgcgatctgttctcaattagccattcgtttgaccactcgttagcttctgggtttgagagtgtctggattgatttcgagcgtttggattgtttctatgatttgacagtggttctactgggttttcgagcttttgaaatgttgaatagactatagagaattgcttaattgttgatgaggtctatgtcaatcgatgcttttcttatcaaagtttgaaattggacttatgagttttgtaatcataaattaggtagtgaagttttatgtgaattgctcagtttcgcctctctgtatatgattctgactttttggttggtctcctcttcttgtgttggtaattgctgaagaggtcactccactctcagttaggctccgcttctacagcctataaatcaactacctgggctcgtcgagctatggcttctactggagttgagacaaaagccggttactccacatcatccgtatcaaccagtgaacctgttgtttctgttgattggcttcatgctaatcttagagagcctgatttgaaggtgactaccctttctgctagtaaacttcttggagaatatgtctgccaaactgaaacttacctgtttgtatgctgttcagattttggatgcttcatggtatatgccggatgagcagagaaatccgatccaagaatatcaggtgagagtatgaacagatagaggtttgagggcttctttgttttcacaattgttcaggttgtattcattctggatgagcgaaaccacacttagtacactatttgatgatactgtcggacataaactgtgtcctctcctatataggttgctcatattccccgcgctctcttctttgatttggatggaatatcagatcgaaaaactagtgtaagtatcgccatcttttcttttacagaagatgtacccctgcagtttactttgaagttttcacttcacattgatatcgcttttatgcataaatgaaaccttatcgatagatattatcttcttttgctgccatttttaagatagtatgtagctttttcttatgtgagataaagtaataagtctggactctttaatgttagtatatgttattatgtgttttcattaagacatctctttgccccgatcttaagggaatcatctaaaatattgtatgatatattaactacttgtaacagttgccacatatgttgcccactgaggaagcttttgctgctggttgttctgctcttggaattgataacaaagatgaagtggttgtctatgatggaaaggggatctttagtgcagcccgtgtatggtggtgagttctggttcttgtttgttcttttaatccttttactttgtcctgagtcttttttcgggtattgttataattgatatgtgcttctttattttccccttaaataggatgttccgagtttttggacatgaaaaagtttgggtgctcgatggaggtctaccaagatggcgtgcatcaggttatgatgttgaatctagtgcatcaggtgatgctattctgaaagccagtgccgcaagtgaggctatagagaaaatttatcaaggacaaaccgtaagtcactaatttggataatagttctctggttcgtatttctgtagattcatgatgagttttgagcagtaaagatgtgttttttcttcatataaattttctctctcgtggttgcacaggtcagtccgataacctttcaaactaagttccagccacatctagtgtggacacttgatcaggttggcatttcctgaatggttttgtcttcacattattgttaactatcattctctgcttaagaatctttaatttggtctatatttatacccgtttttcagaattgtgattgtgatatatcaattttactatagctcagtatgttggtagattgatgtctgtagatgcctgattttgagtttgcgcttgtgttacaataacttgttcagactcttattttaggtcatgactctctttggtgaattcacaggtcaagaacaatatggaggatccgacttatcaacacatagacgctcgttccaaagccaggtactataaatgccgagttattacttgttttgactaatggatttttctctaggctccttcacactaatttgatactcagtgtagcattttgattattttacggggtttttcacaggtttgatggtaaagctaaagaaccccgtaagggaataagaagcggtcatatacctggaagcaaatggatcccttttcctcaggtaaaagccaccctaagagaatntgcttccttcccacacttcctctgcatctagtccccagagttaatgtgataaattccttctttctgcagatgtttgattcttgtaannnnnnnnnnnnnnnnnaggagctgaagaaacgatttgaccaagaaggtaaactatttcatctcgaagaataagtttcacaatcttatttatataaaacatttgtaagatctcaaggctttttggtgcagatatctcactggacaagcctattatggcctcgtgtgggactggtgtaacagcttgcatcttggcaatggtaactccatttattttatttgagattatatataaacggagagagactgacttagtgacttgctctgttaggggcttcaccggctggggaaaaccgacgtgccgatctatgatgggtcgtggactgaatgggcgacacaaccagacttgcccatagagagtgttgaatcttcttcatgaaagtctccaccgtaaaggctagcgacaagattacaagccacagacggaaataattatcatgtttaagttgagggatttgtttgaagttaatcataatcctggctttaaatttgcctcaaccctcaagccgaagaggactgtatctatagaacttggaacttttccttttcgtttctggattcatcttctcagataacaaaaggttgttttctgtgttttctttctaataaaatcaagaaccaggaaattgctcaacgattcttaaacagagatcctgaaa

SEQ ID NO: 150245 - DNA, 641 bp, Arabidopsis thaliana landsberg
accggctaaagaagaaaaccttgtggattgggctcgaccgtacctcacaagcaaacgtaaggttctcctaatcgtggacaatcggctagacacacagtacctacctgaagaagccgtgagaatggcaagcgtggcggtgcagtgtctctcatttgaacccaagtcgcgcccgaccatggaccaagtggtccgtgccttacaacaacttcaggacaacttgggaaaaccgagtcagaccaatccggttaaggataccaagaaacttggttttaaaactggtactactaagtcatccgaaaaacggtttacacaaaaaccttttggcaggcaccttgtgtaggtcaagttggtaactgaattccaggatggacatttttccggcggtttacttgaaactgccgatatccgttttcgacggattgaatgcggttctggacaaaccgtgcaggtcaagactaataaaggatacattaaattttccggttacatgtcccatacccaaccttagagaacatgtgtagcctttagcttaggcttccttgtgtgctgttatattgagtatatatgaggtaatttttgcctcttgtgttgtaacacttgtatttttgttcctttaacatttgatgtagagatttttccta

SEQ ID NO: 150246 - DNA, 704 bp, Arabidopsis thaliana landsberg
ctctcgcgataatgaaaccggcggtgaactcttgatttccgattagttgacgccgtgattgtgtgtaattgtgttatctgaggcttctagacgccggattcatcaaaacgaaagacggtgaagaccatcggcggaagagaaacccaatcggagaatagcaaatctgatttggagagtaatcgttgccgaagtctccaaattaggtatgaatcaagccattcttgcttgtatatcgtgattacatgttgtatttggtggtttaatctttcaattcaacataagataaaaattcaggtaaaacaattgtaaaaccaatgttgaatattggatttaagattgatgaatactggtttgactctacctgtttgttttttccgaacttggttttgcggatctgacatttcccgtagtgtcttgttcaggtgaacaaaaaaggtacccagatgctctcaggtttacttggtattgggagttcatgagaatattctttggccagaattcttagtttttgttttttgctttgtatttattcagttggcttataactgtgaataatttaatagaattacgcttatgctctgcagatatatactttcaagtaaaggaaaataggaaaatgaagacataatgcagactgttgttgcctcggataataattatgtggtatgttgtcttttcaggtatattatcttattacatcatga

SEQ ID NO: 150247 - DNA, 1075 bp, Arabidopsis thaliana landsberg
atgaatccagatgcaccagagtttgttccgagaagatccttgcagaatagctctcaacatgcaggtgaagatgcaagtgtatccgtcgactccagcagttgcctaaaggctgagaaagatgcagttgatttgaagaagcgagagcttgccagcttcatagtaaagtcatcacagaaagaggttccggctgctcttagcaaagctgagtcaggaggtacctccgaaaaggatagtgcagtaaccgagatagtttatagtagagaagaggagaatggagcgaatgcaaatgagacaaatggaggtgaagggtttgtgattgtggcaaagaaaaggagaaggaagaacaaggtgcgacttacaaatgttgcggctgggctgtaccatcaaccgtcgtcagtttgtgcatgatctgataagtgggtttcatcaggttaacaaaataaagcttctcgtgaagcagagaatattctcatctcatttggttttttggcttttttttattgggataggtagttggttgcttctattcttatgttgcactctaggtgcagcttgaccccgttgtgttgtaaatttttcgtcgctagttgtcttgtttctgagattttggaagttttttctggtctattatagtccagttatctacagcagttttaggtggacaatctgaagctgataccagttttttcaaaaccaattgggaaggccactgcgcctattgattgtgtggtcggttcaaaattataacttgcccaaagcgaagacagcttactggcgcttaatcctacattcctactgcacctcagctatctagaaccactgaaatttgagtggttcagatgttcagcagcatcggaactgtgagatcaagaatctaatataacatatttttcacaattacgttttctataaaaagatcatcatcgaaggctcgaaagcattcccattgagcaaagaaaaaaaaagcagcattcaatttggtccgaaagctaagaatttccgagtttctgaagcaattattgttatagcaagctcctattcatgtgattccataggaagaaaacaaatgaaataa

SEQ ID NO: 150248 - DNA, 1159 bp, Arabidopsis thaliana landsberg
atgtcccctgtcgagatcactggcgctgatgccgtggtgacgcctcctatgcgtggaagagtaccacttccaccaccgcctcctcctcctatgcgtagaagtgcaccatcacctcctcctatgagtggaagagtaccaccaccaccacctccacctccgatgtttgatcccaagggtgcaggaagagttatttgttgtctacgtccaggtcaaaacaagtcttctctgaagcgatttcaatgtggtaaactaacaaatgcctgggaagagttacagagacatggagaagcacaaacgtatttagactaactttttatgtttgcgttcctttttttcttctgcaccaggcagatataattgccgagttattagacaattatatcctcatattattcctttttctttccatgatagtgccccagaatttgatctatcagagatagaggcccttttctctgctgcagtacaaaaccaggctgataaatctggaagtcgacgagaagcttttgaggcaaacccctataaacttcaactggtaatgtgaaatttatattcttcttttaacatttggttattactattgtcatatagctataaaaacaagcgactgaaaagcatgttatgaaatgccagaaatctgagtaattttaataagaatgtctctataagcatgttattaatttgaaattgccaacactctgtcttgtagtctgttcaaagtcttctgcaactgtgctttcacaagtctatgcgattgatcattctgttagagtaaaattcttttagaggtaatggaaaaagtgtttaagtgttttgagagagttttttaggaaatagaacttttattactttgctttaaacttgaatacaacttcacaacattgcaacatttgagagggggaggaggtatttatagcctccaaactacaaaatatctaaaatattttaatcctaagtctagagagttcttacataagatctaaattacattattcaaattatctagattattctattagagtatctagatttttatgtttaaggaggtggaagatgattctagaaaatttctagaatcttttaaggaggtggaaatgatgatatttctagagaaaactctagaacttggatttggccataattaattattggataattg

SEQ ID NO: 150249 - DNA, 412 bp, Arabidopsis thaliana landsberg
tgcgttttgaatggaaaagaaggttttgtaggcttctctctctcttctctcatttgcatcttttagagagagaaagcatctgatcttctttttccggcaacaatagcttctttagtgtttgttggccagttctctgtccagaatcttatggcttttccagcatggatgtctggcttttgtccggcgatgtttagggcaacgtttgattgtcctggttcttctgacactgttcggttctttacgacgatggtcggtttgcgtttggcttccattggcttctttagcggcggtaggctagctaaggtctagagtttcaccgcctatcttcggtccttcgtctagctttcccccggattgattccggattagatttatgttaacttctctcgatttctttatattcagtgtgatt

SEQ ID NO: 150250 - DNA, 347 bp, Arabidopsis thaliana landsberg
ccatcatgttttctcaccagaaatggaagttctcatggtctcagatagccactgttgcttctgtcattgttctcgtttccttggttcatctgtttcttggtcctgtagtgccttcttttgattctattactgtaagacaagctcagaatctttgtggaccaagtaatgaatcaatctcacaagtgactaagaattcaagtcaatcccttgttgttgttgcctttgatcgccgctttcctgctgactcacacggtgcagtagtttatcgtaatgcctcgtggaaagctgagatcggacaatggctttctagttgtgatgcagttgctaaagaagttgacattattgaa

SEQ ID NO: 150251 - DNA, 834 bp, Arabidopsis thaliana landsberg
gagcgaatcaggacaaggtcgactcgtatatccgattatccaatccctcttagccacgatggtatcttggcgaatctgaaaccaaagctagaaaaccctaatcttggtacccttgtcaatccaatttccgggtggggaatctctgaaagtgatgttgaagtcatcgatttgggtaaaaagttttcatctaagctgaaaaggaagcttaaggatactaacgggtttgtcaaagatgagtttgtcaagatgttaaagcagtttcttgagaaaattggtgagaaagttgggatttcagaggctgagtctgagatggttttgggagatcaagctggttctgagatacagatactggtggagaaaaatgggtttttgatgggtagagatgtatctggtttagtgttgaaaggttgtattagtctagagatgtgggagctagtggaaattttgatttcaaactccttggtgatcattcttcatactcttatttagttagcaatcttgttgagaagcaaaggtcagatttgctttgcgtagtgatcaaagaagcttcagatcttggggcaactgagctactttcaatcttgaagtattttttatgcccatcaaaggaagcaattagcactatggctaaggtaagagaagaatgggagagtcaggctatgttggctattgaaaaggtgagcaacacagagctatcaaagaagtctaaagttgcagaagaggcttctatcttgttaatggttgctcatgacgggttttcaacctcagagctttgcctgcattacttgttagcttcacggaatgttgacgaagtcatgtttgcatctgcagtca

SEQ ID NO: 150252 - DNA, 346 bp, Arabidopsis thaliana landsberg
ggtttttgattctttcaacacagacccaaatcaatttctctcgtgtctttacgatgacctcgaagaacaatggtttgtcagctgcgctcgtttcgaatctccaagatgtgctttcgaagagaaaagtaggaaatgaggaaaaagttggaagcgatggatcggcggaggaggctccgtctacatctgattccgttgatgttgcgtcggtggaggaagagatcgatgattctagacctattgttttagttacgaatggtgatgggattgattcgccagggcttgtttctctcgttgaggctttggttctcgaagggctttacaatgttcatgtttgtgctcctcaaac

SEQ ID NO: 150253 - DNA, 343 bp, Arabidopsis thaliana landsberg
acagattcagtctatcgtgtcaagtgtctgtctttttcgttgcccaaatctccgatcaaattcgtccgtcgtgtttgcatggcgtttgctccgattctccgccgcgcttccgccgttaagaacctcttgtctttaacaagactccccgttggctctgccctctccaataggtctcttcaaaccggagcctccggcgatgattctcaatcgatgggtgggtatcacgtgagccccggcggattcatgcgtggaaccgtgtatcgagagcccaataagcctataaccatcgaagaatttcatattccccgccccaaatccaatgaaattctcatcaaaaccaaag

SEQ ID NO: 150254 - DNA, 400 bp, Arabidopsis thaliana landsberg
gattcatgggttttgcatcaaaggtcaaatgaatgaagcatttttgctttttaagtcgatggtcgaaaagaagggggaaccgaacgaggttatatacaatacgatgattcttggttattgtaaggaaggtagttcttatagagcattgaagttgcttaaggagatggaagagaaagagttggctccaaatgttgctagctacagatatatgattgaagttctttgtaaagaaagaaaatcgaaagaagctgagcgtttagttgagaagatgattgattcagggattgatccatctacttcaatccttagtttgatctctagagccaaaaacgattcacatgtaagctcaaaataatgattagagcagttttaatctgagataaattaccgataatgcaac

SEQ ID NO: 150255 - DNA, 1385 bp, Arabidopsis thaliana landsberg
tacaaaacaacacgcagttactattcctatcagattattgttttcttcttcatcaacactcgctctgcgctgcgttcgaatccagaactctctgaccatcccaaagcaaaagcttcaccgatcttcctcgtttggtctcgaatattaaggtaagttccattttattgtatggatcctagaaacttaacctagatctagattaagaacccaatttgtggaaatcaatgcgtcgatttgatagaaaccctaatttctgggtgatttccatggttaagcttttggcttgcattaagtaaataacgagatggttttagaaatttaggtcacagagtccaatttatggattcaatgcttcgatttgattttaaaaaaccaatcttcgggttaaattgaatgtgagaagtgtgtgtttttgagtttgcagtgaaatatgggtttcataatggaattcgcggagaatttggtgttaaggttaatggagaatccagaggaacgagacaggaaagcgagggaacacatatatgagatgcatgagaggtgcaagaagattaaggagatgtgggcattgcctattcgtccttatggattctggacatttgagcgtcacaatgctcagcttcgttgggatcctcagatcagtcaggttgctggtcgaagggatccttatgatgatcttctcgaggacaactacactcctccttcttcctcttcctcatcttcagactaatcaaacaatggtgagtttttaattgtatggaaccattttgattcagcatttgaatatggcttttctatactagattactctatagctgtttttgtctctgtcattagagaatttgcgttggtctagatagtcagtagaggaacttgctttggtcgatatgtgatgattttgtctctgtcagtagaggaatttgggttggtcgatatatgatttaacctttttgggtcggacggaatgttctgaacattagtgtttgcgcttgcgtctaagctacatattgatatgtgatcagtagtgaatactttgttcgttacccgcattgtggcttggagctgacgagtttgtacatctcttttccttaacatatgtgcttggaatctacagtctttcttcctagttttctacagtttcagcttcatttaagcataactatcgtagcttcctataggaaatgagacttgtatgtttttgtttgttgcagaaagaagatgtgttatgctgtctggatggatgcatgtttgttttcaagctatttttctcggagtttgtcctcttctgtttctatttgttcttaaggtgtctgggagcttggtacaaaactcaaataataacttcaaacttgtttacgaacgagaaagaaataatgctcattggttct

SEQ ID NO: 150256 - DNA, 704 bp, Arabidopsis thaliana landsberg
cagacgcaccggcctcaacaagaagtcatttttctagttgcagctcaagggtgccacttcatggttctggggttttatctaatcaaccttctatctctcggggaaaaagaaagcagtcggatgttcaagcatctgctgcctctgggattagttctgttgcatcgttgtttcagatgtcaagtcgtagtcctctacgaaggttccagctactagattcagattctgaagatgaccatccatccaccagcagagatttaagcggagcaactaaaaaacatgattcattctcaaagaatcaaccatctattgcaagtaaaccgaagagaaaggaacctggatctatcccctgtattaaagatctgtggaaagatttttccccggcaagttccaagattcagacaccagctttcgatgatgtttgtcaggactattttagctccatcaagacgactagcacagctcagaaacaaagcagtgctgtggcaagtagtagcaatagcgaaaatcataacttgactggctttcagcaaactgagctattccacgatttttcccacccttctcctccatctcatcgtttcttcttgcatagtgatccaaggatccggaatctagctcgacagcggttaccaaacttctttcctctgggaattgtcaatgatagggagagccagcgagaggtgttccttgttgattatatgtag

SEQ ID NO: 150257 - DNA, 683 bp, Arabidopsis thaliana landsberg
accctaaatcttagcgaaattaagcagagcaacattttcgtaatccgatctccgtcgtcgtcgtcgaatcagataaaaatggcgaagcgtttgatcccgactctcaaccgtgtattggtggagaaaattctcccaccgtcaaagaccgtctgcggcattctcctaccgaagaaatcatctcaggtaaacgaatttctttaaaattctcatctttacccatttcttcgattggacgaactagaaatttgttggatttgattaaacacagttgaattccgggagagttatagcagttggtcctggagctagagacagagcagggaatctaattccggtttcggttaaggaaggagacaatgttcttttgcctgaatttggtggtactcaagttaagcttggagagaaagagtatgttcttaacctgttcgatgtaattcctccgagagtgaaatttatcagtattttcgatttctcactgtgtgtttcgttctctttgcaggttcctattgtatagggatgaagatatcatggctacacttcacgagtgatgtgttaaagagatagaatttatgattcctctttgttttgttgtctgcaattgtctgacatttggatcaattgttatgattgttcttcactgttggcaacaagttcttataattcaataatctcttttgtttggg

SEQ ID NO: 150258 - DNA, 1551 bp, Arabidopsis thaliana landsberg
tagactctagtatcgttgaccatcttgttagtttcaactatattccatggttgtgttgcaatgagcttgtaccccaaatctttgaattacttgagatcaatgagtaatctcatccaatatctatgtatatgcaggttccagtcagctgcttatgttcaacagatatggtggtttgaagtaggaggagagtttgagatccagtttccatctggaacatatagtctcttcttccgtatccagctcggtaaaacatcaaagaggcttggaaggaggatctgcaactctgaacacattcatggatgggacataaaacctgtaaggttccagctcgccacttcggacaaccaacaagctgtatcattgtgttatctgaacaacaaccctgggagctggagtcactatcacgttggagatttcaaagtgacaaatccagatgtatcaacaggaatcaaattctccatgactcaaatcgattgcactcacacgaaaggtgggctatgcatagactctgttcttatattacctaaagaatgtgcaaaagaagtcattggatcacaatagttttgtagatatagagtgagattgtttgtaaagggtgagagattatttttcagtgaaacattcactagatggtttttttttcttgatctgggctgcattctcaagatgaatctcagatgtggaactgtgtacacatggttgggttgtctctagttttgtctgtagttacaaggtggtcgtgattgtaaatactacttctccattcagagattattacacttgcttgcttcttcatattttgcaaaagttgatgaaaacatgaattatcgaacatcaaatgatttcctctctactatgtaggaacagagtcttgttcaaaatgagaaacaaacacaaatttctaatcaaaaaatcttgaagatgtatcataataatcttattctaaaacttatcattattcttgcaaacgcgttataagagcagcaaattcattcaaaggaggaacatagactccttagaatacctgaacacaataggtttactgatgaatatgaaactattattctgaaagtctagagaacaagcttattccttcttcaaggtgtcttcaacttggggcgcgatggaagcaactgggtggttacagaagaaaaaatggtgaattattttcgatatcagacaaggatgtgaaattgcaagtgggtttgtggaaaggaagagagagttttacctgataacaagagataagtgaggtggtaaacccgaaagcaccagtgacacgaggactaatcgtctttggagctaactgaaggagaccaatggctacaataatgtccatgcttgattaatcaaagctagagttctgtcgtttgatttctgaagcctagctcgatacagctcatcctgcgtttttaacaaagggaatgagttttgataaagatagaagaaaaaagatgagaggagttacacatgagagtttttacatcagctttgagttccttttccatcttcttcatagatgaagaaagccttccaagctctccgatctga

SEQ ID NO: 150259 - DNA, 873 bp, Arabidopsis thaliana landsberg
ggttaattgatcggtcatttgtgcttcatgacaagattgggtctccacatgccgtcctcagtgatgcgaaagatgcatctcgcgctagtttaagctctgcctacaggtctgctgatggtgaggaggctcaacatggagataatttagggactgaaagctctggatcacgttctagtcatgttcgggttgctttcatagttgatgctaatataacatcgtatctaatgatgggttctgtgtcaccaggtaaactttcttagttctgtttgatggctaacttataactagtagcagccgatgaatatcactattgttgtgaaggatcactttttgcattattgtaatatgttccatccatgtttatgaacgatgttgtaggattgaaatctcatgccgtgacactctatgaagcgggaaaactcggacatactagtatcccagacctttgccaggatttgagcacattagagggagcaaaatttgagggtgaactgcaagaatttgcaaatcatgcctttagccttcgttgtgtcctggaatgtttgatatctggtggagttgctactgatacaatagttgatacaatgggttcgggaacgttgtccaatgatgaggcagttactcttcttgcagatgttaatttacctgataattccggagattctttaactagccaaaatattgaggcttccatggtttcagatgcccctcaagaggatcccttgtcgacagagcatgtccccgaaagcactaagcatgaagcagcttccagtacaccgtctgtcgatactactgccttgactgagaccttcagttccaaccttaaccttcagaatgaggggaagccaattcctgtagagggacccgacaccg

SEQ ID NO: 150260 - DNA, 128 bp, Arabidopsis thaliana landsberg
tattcctctgcctcagtgggttgttgaagaggttgacaaggatccagaccttgcatacactgatcagtggggaagaaggacccatgagtatatatcacttggcgctgatacactccctgttctcaaag

SEQ ID NO: 150261 - DNA, 217 bp, Arabidopsis thaliana landsberg
aggtgaagtctttttttttttttttggttctttacccaaaataccaaacttaactaacataatcagcaacattttcatgttggggacccaatgtgctgtttcatattgcaacaagatttgagttttcttatacacattgtggatacaacaaataaaatagagactaaacttgaaatggaaatagcttatgctaaacaataataattgcttttattcg

SEQ ID NO: 150262 - DNA, 693 bp, Arabidopsis thaliana landsberg
gattccgtgtacagcacgtggcagtgtcgggtcatgtgttattggtacaacaggttcagggacgaaccctgggtcggatatgggcaggtataccggatcttgcattcgggtcgacccgatggactcatggatgagatccctactttcggtgctgaccctcttccctccggtgttgacaaggttctttatcttacttaattctttgttattggtgaaaggtgtattggttatagctagattttagaatcttcatgatgttatttttcgatttagaggtttattttataattgaaaatagtaacgtaaaaaagaacaatctcaaatcttgtattatatgattgattgacttgtcaaaataagtaatgcatgttcacgaaatcatgttgaggataaaacttcttctttatcaaaaaaaaattaaaacattatttttaataaacataagcatcttttatgaaattataagatttaaaacaaacatgaaaaaacctcgtaaaacaaatgataatatgtgtaaattttattccaaggatgatgaaattttcttaaagaaatatttacacaaaaaaaacatgtgatgatgaattgtatataatgtgcagggatatgttgttctaaatagaacttgggcctttgttcaatggcttcaacaagcacatatagaggaagagtacgtatcgtttacattctcag

SEQ ID NO: 150263 - DNA, 153 bp, Arabidopsis thaliana landsberg
acgaagaaccaatttcaacctcctcgccggaaaaaatggcggaaggaaaagaagctacgacgagttcgctgagtcaaggactcactcctcaccaagaccccgacgatgctcccaagtctcctcccaactctccaaattcttctactcgcaagg

SEQ ID NO: 150264 - DNA, 357 bp, Arabidopsis thaliana landsberg
  unsure (1)..(357): unsure at all n locations
ccaaaacatgcactaaatgttttaccgcagatcgaagaagggatcatcagtgtaaaaatttggcgtcgcattcacaaaactatttatcgaaatcccagaaacgaatttggaacatagtgcgttaatcattcaaaaggtattatctttttctccgaatcttatgcaaaaatttccccttttccgtatcagggctagatttggatttgtgggtactgttcaattcannnnnnnnnnnnnnnnnnnacttgccctttgagtgttaacacttttgattgaatcgagattgttattaaaagttgatccttttgatgccaatgcaggtctttgttattgaaaaatcgattctttgttctggta

SEQ ID NO: 150265 - DNA, 336 bp, Arabidopsis thaliana landsberg
gaaaatgtggagactctctgtgtcaattttcctcttctcatgtctcgccgtttcttcgtcttcgttcggtgattcggaggcgacgtgttccggtatagttccgttacggtaccggtacgataagatctcgataaccgactttggaggcgttggagatggccgaacggtgaatactaaggcgtttagggcggcgatttaccggattcagcatctgaagaggagaggaggcacgcttttgtatatacctccgggggtgtatttgaccgagagtttcaatctcactagccatatgactctttacttagctaaaggtgctgtgattagagctgttcaggt

SEQ ID NO: 150266 - DNA, 376 bp, Arabidopsis thaliana landsberg
tttaatttcccttgtctctctatctctctcaatttcctcatctgggtcttcctcgttttctccgcttaagcaccatgaaggtcaccgtcgtctcccgcagcggcagagaagtcctcaaagctccccttgacctccccgattcggtactttctcgtttcttatgatactctcttctccgatctgcttcttcttctgattcgtgggtttgtttccaaaatgtgattgaaggtttttgttctttagtttgcttgctcaatgtagggaaagttgcatgctttctgattttcgggttgttgatttcgatttcgtgtgttttgttcttcgcaggcgactgttgctgatctgcaagaagcgtttcataagagaggtaaagttt

SEQ ID NO: 150267 - DNA, 453 bp, Arabidopsis thaliana landsberg
cacaaaaaaaaaaaagcacatgcggtttcctctgcttcttccttcttacaagttggatgtctccgtcttccacggtgcttataaattagtgtaacaacaaaagctttggtcagtatttatattatcatgcatttctaatctctactttgtcaattcctatactttcactctcttcaattatataatctctggtccatagaaaacatcggtctcttgtcaccgttgattttatttggtcaaaatcattctctcctcgctgaataatcgttgatttcacttcttcttctggtcttaaaaaaattcaagatctatacgagaaaacacaaaacacgttaaactatttcaaccgtttttcctgtcggtaaagtttggattcttcttggtaaactttggtcttattgtcaaccaaaagaagaagatggtcgttcagaatgttcaagattggatgttctt

SEQ ID NO: 150268 - DNA, 210 bp, Arabidopsis thaliana landsberg
atggttttgttcatcggtttgaatctccgttttgtgattctcgagaattggattgtttttagacttgtgtgagtcaccacgcaccactagagaagagaagagactcacgtattgactttagtcgtcgttgtacatcttttttgacttcgtcccagactcacagtgtttctaaacgacaccgtttggattttgataaaaactagcagactt

SEQ ID NO: 150269 - DNA, 232 bp, Arabidopsis thaliana landsberg
gtcaaattcaaacagataacatttttcgtcaaaagaatcagtaaaaactaaacattgcgactatatcctacttgaatcaattcttcggctgattccgaagttttgtgacattcagatattctagggttttgtggtaaatggaatctaatcaccaaggcaacgcgatacaagtgattgaccaagtaacaaccatgacccatctgtctgacccgaattcgaaaaccaaaccggg

SEQ ID NO: 150270 - DNA, 486 bp, Arabidopsis thaliana landsberg; identical to SEQ ID NO: 3323

SEQ ID NO: 150271 - DNA, 176 bp, Arabidopsis thaliana landsberg
gtaagaaaaacagaagaatccttaaaccgaaatgtgtaaactttacaacaagtttcttgaaagactctcttaatcatttcaatagagatattacatttgtaaaactctcctttctcctttctcctcaatcaattagctctgaatctgaatatgaatctttgataatcaactttgat

SEQ ID NO: 150272 - DNA, 576 bp, Arabidopsis thaliana landsberg; identical to SEQ ID NO: 78677
  unsure (1)..(576): unsure at all n locations

SEQ ID NO: 150273 - DNA, 357 bp, Arabidopsis thaliana landsberg
gacacgcagtcaagcaagcagaaggttacaggcaagcggggtagtgtacttttatccgcaaagaatgggattgatgctcagctaaggaatcccctactaatcgaaagaggggattcaaaagtgtctattcaatattccaaggtgcgaagggtcgatgtaattgagaaagaagcgctctagctctcacttgaagtacaggaaggataatgactcgagcttttccgaatgaaaggcgataggggacgtaccctaaggaagcaagaagggaggattttctttactttaccgctataacctttctttcacgagtgaacccgggcacgagcctaccttgtaagaacccaagaatgggtacct

SEQ ID NO: 150274 - DNA, 3967 bp, Arabidopsis thaliana landsberg
atgggaactgtaatcgaaggaaagctaagattttgtatagatagaggaggtactttcactgatgtatacgctgagattccaggacattccgatggtcatgttttgaagcttttatcagttgatccatcgaactacgacgacgctccggtcgaaggaattcggagaatactcgaggagtatacagggaagaagataccaagaacgtctaagataccaacagataagatacagtggattagaatgggcactactgtggcaacgaatgctttgttagagaggaaaggggaaagaatagctttgtgtgttactaaagggtttaaagatttgttgcagataggtaatcaagctagacctgatatttttgatcttactgttgcgaaaccgtcgaatctttatgaagaggttatagaggttgatgaaagagttgtgcttgcgcttgacgatgatgatgaggggtctttgattaaaggagtgtctggggagtttcttagagttgtgaagccgtttgatggagaaggtttgaaacctttgttgaagggtttgcttgataaagggataagttgtttggctgttgttttgatgcattcgtatacttatccgaagcatgagatggctgtggagaagttagctttagagatgggttttaggcatgtttcgttgtcttctgctttgaccccgatggttcgggctgttcctcggggtttaacagctactgtggatgcgtacctgacaccggtgattaaagagtacttgtcgggttttatttccaaatttgatgatgatcttggcaaagttaatgttttgttcatgcaatctgatggaggtttagcaccagaaagtaggttttcagggcataaggctgtgttatcaggtccagcaggaggagttgttggttactcgcagacactctttggtcttgaaactgaaaaaccgctgattggatttgatatgggtggtacatcaacggatgttagccgctatgatggaagttatgagcaagtcatagaaactcagattgctggaacaatcatacaagcgccacagcttgacataaatactgttgctgctggtggtgggtcgaaactaaagtttcagtttggtgctttccgggtgggacctgattctgtgggtgctcacccaggtccagtttgttaccggaaaggaggcgagttagcagttactgatgcgaatcttgttttgggttttgttattcctgattattttccatccatatttgggcccaatgaagatcagcccttagatgtagcagcaacaagagaagcatttgaaaagcttgcaggacagattaattcatatagaaagagccaggatccatctgcaaaagacatgtcagtggaggaaatagcaatggggtttgtgagtgttgctaacgagacaatgtgccgtcccatacgacaactgacagagatgaagggtcatgaaacaaagaatcatgcactcgcatgctttggaggtgctggaccgcaacatgcttgtgcaatagctaggtctttgggcatgaaagaagttcttgttcacagatactgtggaattttgagtgcttatggaatgggtttggcagatgtcattgaagatgctcaagagccatattcagctgtaactggccctgaatctcgtgcataggtcgttacaaggtacacggtgctgctaacagaagtgatagaaaagctccaggagcagggttttggtgatggaaatatctccactgagacatatgggaatttaagatatgacgggacagacacagcgatcatggtaaagggtaaaaaaactggagatgggtcggcatttgattatgctgcagagtttctcaagcttttcgagcaagagtatggatttaaacttcaaaacagaaatcttctcatctgtgatgttcgggttcggggaatcggagtgactagtatactaaaaccacgggcagttgaagctgcccctggtactcctaaggttgaaaggcactacaaggtttactttgaaggcggatggcatgacacaccattgttcaagttggagaatttaggttttggccatgagattcccggccctgcgatcatcatgaacgggaacagtacagttattgtagaacctcagtgcaaagccatcattacaaaatatgggaacattaaaattgaggtagagtctgcaatgagcagtgtgaagcttgcagaaaatgttgccgatgttgttcaactgtccatatttaatcacagattcatgggtatagctgagcaaatgggaagaaccctgcaacgtactttcatattgacaaatatcaaagaaagattggatttttcttgcgccttgttagtcctgacggtggcttagttgctaatgcaccacatgttccagttcatcttgggccatgtcaagtacagttcgtggcagctcaaacattggggtgaaatctgaacgaagaagatgttttggtaacaaaccatccatgcgccggtgggagccatttgcctgatataaccgttatcacacctgttttcgataacggaaagcttgtgttcttcgtggctagtagaggtcaccacgcagaagttggaggcataactcctggaagcatgcctccgttctcaaaggcgatttgggaagaaggtgctgctataaaagcgtttaaagttgttgaaaaaggtgtcttccaggaagaaggaattgttaaacttcttcaattcccttcttctgatgagacaacaactaagattccaggaaccagacggattcaggacaatctctccgatctccaagctcagatagctgcaaaccaaagaggaatttctctaattaaagagctgattgagcaatatggccttggaactgttcaggcttacatgaaatacgttcagcttaacgccgaagaagcagtgagagaaatgctgaagtctgtagctaatagagtttccttggaaacaccaaattccagggttggtaattctgtgaccatagaagaagaggattacatggatgatggatccgtcattcacttaaaactaacaattgatgctgacaaaggagaagccttctttgactttacaggcacaagccctgaagtctacggtaactggaatgccccagaagcagttacatctgcagcggttatttattgcctccgttgtttggttaatgtcgatattccactaaaccaaggctgcttagctccagttgagatccgcatacccgctggttcattcctgtctccaagcgaaaaagcagctgttgttggaggcaacgttctaacatcccagagagttacagatgttgtcctaacagcattccaggcttgtgcttgttcccaaggatgcatgaacaatctcacatttggagacgacacatttgggtactacgagaccattggtggtggatgcggagctggacctacatgggacgggacaagcggagtccaatgccatatgactaacacgcggatgactgatcctgagatcttcgagcaaaggtactgaaacatcctgttagaccttatagttctgtagctatgaaaaaaactgaatggtcagacttacttgcactagactaacacatgggtttttatcaggtacccggttctgttgcatagatttggattgagagagaatagtggaggcaatgggttgcataaagaaggcgatggattggtgagagagatagaatttagaaagcctgtggtggttagtatcctctcagagagacgagtacactcaccacgtggattgaacggtggccaaaacggactccgtggagcaaactatctcatcactaaagacaaacgaagaatctatcttggaggcaagaatacggttcacgtggaagccggtgaaatcctacagattcttactccaggcggtggcggattcggctccaacatataaacaattcatctcctcctcataagtctcttctcgaacttcattacttattcatttaacgtataatccaaattagttgt

SEQ ID NO: 150275 - DNA, 77 bp, Arabidopsis thaliana landsberg
cagagtgagcattattaaagaacctaaaatatgataatagtttccacaaaataatatttgtctgtgtgaaaacaagg

SEQ ID NO: 150276 - DNA, 398 bp, Arabidopsis thaliana landsberg
acgaaacgatgttttttctattaaaaacaatacaacacatcggagaaaaagtgtgaaattgtaaatacagagcaaaataagaagtttctctcttttaggaagtagcagcgcagaaagattcccaattgagcaatcccctgttatcccgatcgccgtggacacatcttcttgatacttgaacattctcaatgcccatcacttcatcttcatcttcatcttcttcctcttcctcctcctcctcgtattcttcggtttcttcaggctcaatagtctcttcttcgttctctacaaactcattgcagtctttcaagatagagagacggagacgaccattgctacggtcagcttgaaagcatccgttacgaggaggcgcgtttgtggcgacacatgaccaatct

SEQ ID NO: 150277 - DNA, 409 bp, Arabidopsis thaliana landsberg
aaaaaatctttcagactgaaatatatagcaaggaagatagaaagctagtgcaggtacataagtcaaaagtcacaacatatagtaagtacatcataagttcatttctcttgaaaacgatctctagtgatgatgcactttttaggtatttattcacatccgagagttttctaaatcacaacattgaaacgtgttcatgaatttaaatcaaaacaaacctgctcatgaatttggggatgatcgttataagcaacgctcttcaaaagctttcgatgggtttttaccatcgatatgcgaatgatgggggaaatcaaacggcatttcttcgggagagagccaagcttctctaaaaactctcgagacttcatcaaaaactaccccattgccttcaggcgtgagatggagcccatca

SEQ ID NO: 150278 - DNA, 125 bp, Arabidopsis thaliana landsberg
aatgacaaaagcgaagaagttgatcagaatgatttgggagcagaaggtgttagcaaggttgatgtcaaaacaaagaagagcaagaagaaaaaaaattctttagatcataaaactgatgatatgga

SEQ ID NO: 150279 - DNA, 79 bp, Arabidopsis thaliana landsberg
gttaaagccgaatttttatctccggaagaagtagaagacatcaaagtaatgttcaacaagatggatactgataatgatg

SEQ ID NO: 150280 - DNA, 212 bp, Arabidopsis thaliana landsberg
ttgccaaagtgactagaagctttgaatttaacggacacgattaaattcaatattttgacgttgagagaaaactcaaattattcctaaacgcaagtttcaaatcgctaaaaccaacgtttgaacacgcaacgattactctctcagccgcgtgacttttgttccaagtagcgtctgcgtttggcacagtccttcacttacaaagcttccctcct

SEQ ID NO: 150281 - DNA, 242 bp, Arabidopsis thaliana landsberg
ggtcatggttttaagatggcgccggcgtggagaggatactggcggatatggcgatggaggtggaggtcggaggtggaggagttgagatgaaacagtttagctccgacggtttgaagataatcctaaaggaaatgcaaaggagtatcctgaccaagtgatacttgatgtcccagtgaaacattaaactttgttacaaaatgtcaactgctgaattaaaaaaaaaaatatggttttaattataa

SEQ ID NO: 150282 - DNA, 210 bp, Arabidopsis thaliana landsberg
gatttgcaatcaatcctcgttttcgatccgattcctttgtcaattcccagaaacctgccttttctctccgtccaaatgcgggtcacagcggaggaatctctctagaatcggatcggagaacggcgacggcgtcgtattcgatgctgtagcttatgaggctgatcggttgcgtctcgacgcggcggcgactggcggagatggcggagattg

SEQ ID NO: 150283 - DNA, 238 bp, Arabidopsis thaliana landsberg
cagtttcctcatcatggccatgacaacaatcttacaactctcaacaacaacaaccaagaaagcatcagctttcatcatgcttctactaacccaagaagaacctacagagatgcagcatctcttttcacttagtcaatcaagattattcgaagacatggatttgtgtcattaattcataattatatataaattgattattgatatttatagattttatattacgtttgtaaaatcagca

SEQ ID NO: 150284 - DNA, 280 bp, Arabidopsis thaliana landsberg
taggatactagatagagagtgactgaaggagagaaaaacaaaaatggcgattgtttccgtctctaactcttttctcactttcaattctcccaatcagctccgatttagccggtaatattcttactgcattttgttttttttcttttggtttcgcttcttatgtctctaccttgcatttgatccacacaaaaaaaaactctatcttggatattgcagaagaagattctctgccatggcttcttaactctggagtgagagtcgctgaaggagaggcaatttg

SEQ ID NO: 150285 - DNA, 90 bp, Arabidopsis thaliana landsberg
aaacaaaaaaaaaaacaaaaaaaaaaaaaaaaaaaaaaaaaaaaaaaaaaaaaaaaaaaaaaaaaaaaaaaaaaaaaaaaaaaaaaaaaa

SEQ ID NO: 150286 - DNA, 359 bp, Arabidopsis thaliana landsberg
ttatctcctagcgttttagcgtgcactgttcttcgatttcgaggagaagaaacgacctaatcctcgcgtatgcttctcattatcttctttagaagacgaagaaacagagctagacttcatgatagcgtggaccgttggattcactgtgtgcttaacagaacgagatggttgaatgatatgagcatgtggaagatcatctagtgcagagtttgttgttacttctgaggttttgtgctgttgaaacttcttctcaggggattgagatttgagaatgtggttgctctgtggctgcaaggattctaactgttggctgagtaagtgaattgtttcttgacaagctgcaagcttctctgttgcag

SEQ ID NO: 150287 - DNA, 86 bp, Arabidopsis thaliana landsberg
aaaaaagaaaaaaaaaaaaaaaaaaaaaaaaaataaaaaagaaaaaaaaaaaaaaaaaaaaaaaaaaaaaaaaaaaaaaaaaaaaa

SEQ ID NO: 150288 - DNA, 1610 bp, Arabidopsis thaliana landsberg
catgactcatccaaaccatttgcttctcaccaccactctctgacccaaaaatctcagatttacctttcacttcaatctccattttcccatactctttgctctctccttccacaacaacaccaccaagcttctgcacaatcaattgcaaaccatagcaaatccccaaaacaggaacaccgttcgactctgcccattcgataaacccctcggggaaactcggcgcgtcgagcgcgtgaacagagtgaggaccaccggagaggataacaactcgtgggttatagctagtgattgatttgagcgatgaagttccactgataacgagagagaagacgttgagagaacgaatacggcgagtgatgagatgtgtgtattgggagccgtaatcaagaatcaaaaccgtatcaggcttcatcgtcggcgtctccatggatagggtcttagagcttggtgaaggaacaaaagggtttttcactgtttatggctaagaggggcttggcgggaagtggaggcttataaaaacagagcaggagcagcaactagggttttgtgaatattgtctgaatcacaaaaatcgagaaagccgagatcttttgtcattaatatttgggataatgaaaaaaagttcgaatctttttgcccacaatttccggccgctgctaaaaccctaaatccctaattccaatacaaaatctcaattggtcaaaagtcaaaaccttttcaatgaattagaagctttttacttgaaccagcctatgttcggggctgaaagaatcaaaagatcgaatctttcttaatttagataactaaaaatgaagagtagattctcaaattataaacttttttatacagacaaaaaaaaaagttgaatatctccgaagagattcagattaatcgacataatatgcttctctgcattgttcttagctcatgagagatctcaagcaccaattgttgctgaatcttttccacaatatcagacacaacaccttcagattcaccaccaaaatccaaccaaagacatggctttcttagatcagtttcaatgatctgatccaatgatcttgtaggagagtcagagcagagtaaactccagtcaaaatgtctcatcgtctcgtgaatcagatcatcttctctaagggatgattctagattgaggactctcgagctcttcgatggcgagaaaggccaaaacttgatgtcttgacggtaaatctcgcggagaatctcgtcggtgtagtcaagaacaagaagaagctggtcgttgtgattaccgtgtgagaattcatcgagtagtgatgtttcttcgttgcacctttccataagattagtccaatttaatcttgaagcttcaagaactttcttcacaaactcatgaacagattctttttctacaagatcaatgttaggatcatcaaatgataaccgaatcttctcttctgcaagaaagtaacaaactttttcaggtaaatcaaacggataagtgtgatccaaaggataacgataatgaaagcattgattcaggggcttttaccaaggttagaaattttcacatttccggggataactgtttcgtcttccaaatgaatcctttcaagaacagagacaggact

SEQ ID NO: 150289 - DNA, 171 bp, Arabidopsis thaliana landsberg
atacatttaatatagtgtccccttaaatgttattcgtatcagtgacttctaaactttgcatagatgtattatcgattaagctattaacacttaattacatgcataatatctcaaaacttaacaacacttagttcaattcatgaaaacattttataaaagatatcttaaagt

SEQ ID NO: 150290 - DNA, 254 bp, Arabidopsis thaliana landsberg
gtgctcttgcttcaacgttggtgtctcaagtcacagatggttcctcaaatgtcagagaggtatggaagctttcgtacaagtaagtcgaagctatactggaattcagtgtccaacgatctgattttagtggatttgggttgctcataaaaatgagtggaaattcaaaatctctcatccatgtgtttagcttatagactctcctgactgtgttattataattgcttagtttttcattttggtacattttctggctt

SEQ ID NO: 150291 - DNA, 417 bp, Arabidopsis thaliana landsberg
caaatcaaaacaagaataacaaaatctttctcttataaattcttatttcaagacatcaaaggagaattaatggaggcaatgaagatgaagatgatggtgtttattatggttgttgcggtggctttctcagctgccacggctgctaccgttgaagctccagctccaagcccaacttctgatgctgccatgtttgtaccagcactgtttgcatctgttgttgctttggcatctggtttcatcttttgatcattctttttttcttcattatttaattgcatttgttaatgagtttgcgtgatttgattctctattgttagaatgttgcattcttatttcttaatgtaaccatctgtttctctatgtatctatgtgtattatcaattcatcactgtttatgagatcgtttatcttaacact

SEQ ID NO: 150292 - DNA, 205 bp, Arabidopsis thaliana landsberg
atatatatatataatcacttacataaaacatagtaacaaccatccacagagtatattccaaacagagagtaggtaacataactagcatcaaatactcttttattacatcaataatttgcatgaaatcgttaattccgaagtctcagaagcatgcatccaggacacaacagcagcatatggcagcacaactgccaatagacaaaac

SEQ ID NO: 150293 - DNA, 356 bp, Arabidopsis thaliana landsberg
gaagatctagaatggagggaaatgaaaggcccatttgttacgatatggcttcacaatgttccctggggtgctgagaacactttgactgctcctgctgcaaaggtcagttacacatttctaactaaaatattggatattcttttgttgtgcaccatcaaagaggccttcataaggttcttttacttgcaaaaaaacgttaaagcttcttttgtatatggtctgatgaaacagttttctgatggctacctggacttgattgtcttgaaaaactgccctaagcttgtcctgctctcacttatgagacagacgagtagtggaacacatgttgagtcaccattatagtgtatataaggttt

SEQ ID NO: 150294 - DNA, 118 bp, Arabidopsis thaliana landsberg
ccagaaacaaaccattaaacttttaatcattaagaccaataaacttgagaaacaagaaaagagtcttgaccaatcctacatttaccccatatatagctcaaaatccaacaattgcagc

SEQ ID NO: 150295 - DNA, 335 bp, Arabidopsis thaliana landsberg
caaaaaaaaaactcacaaatcatcgattctttcttctgggtttttgtaaaaaatcgatcattttgtttctttctattgattgtgtgtgtttcttgcttcgtgacatttcagagtttccgtgtatttttgtttctatttttaaaagattctaatcgaatttgctcaatttcgcttttaaaaattgcaattttgatctctcccccgtctttctcggcgattcatttttgcttggatatatctcaggcgtcgatatagagaataaaaatcgacactttgtttcatttggaggctaaagatcaaagctttttgatagtgaagagcctcctccaccatta

SEQ ID NO: 150296 - DNA, 154 bp, Arabidopsis thaliana landsberg
ggatatgtatgattctaaggtcttttatagatgtgtgcaatcagagagggataatcacttagagtctagagttacagataattggaagcgattgaaactatatgttatgtggtttgacacatgactaagtatagcttatctccgagtgttgtgg

SEQ ID NO: 150297 - DNA, 331 bp, Arabidopsis thaliana landsberg
gcttctgatcttgcgactgttgctgtctccgccgcgaatcgttctcctaccttcgtcaactacaccggcaaggtacgaagcttttgttatactctaattagatttgtggtatcttcgtgaaccttcaattcaatttagggtttctcaattcgattacaaagattcgtacttgatttgttttcgaattgctggacgagtttgtcttattgggaaatgattttagtaaatcgttgaagagaaatcaggaaagttgaatactttctctcttaaagttttgagctttttggattgtaaaactggactaatggagaattaaattctgtgttagagt

SEQ ID NO: 150298 - DNA, 457 bp, Arabidopsis thaliana landsberg
aatttttaactccatatacatgattataaacgctcatatgttatttgatataaattaaatgaatattttgtctaatttttgtttatgatttaatatttttatttttaatagatttttgtatattgtgtatttaaaatatcatatttataatattgtatgttggaaatgcttaaaccacctaaaattgcatatgtttcgattagacgttatatgttttaactattgtgtgagtgtttgcttcgtgcgtaacgctttcttaaacacaaacaagtcaatattttatactacacaaacccattaatagatattagtcctaaacttaataaagcatatataactattcaagtccacaaaatcttttaccaaaagaaacttttaaaatataaactttcttacatgtctagcacgtgtccgaacatttccaaaaagatactcaatctgttttgaaatagttgtc

SEQ ID NO: 150299 - DNA, 380 bp, Arabidopsis thaliana landsberg
ggagaaacctattaccgataaggaggttactattcctacccctgtggcagagaaagaggaagttgctgctcctgtctctgatgagaaggcggtgccggagaaggaagtgactccggagaaggatgccccagcggcggaagcggagaaatctgttccggtgaaggaggaagagactgttgttgtagctgagaaggttgttgttttaactgctgaggaagttcagaagaaggcacttgaggagtttaaggagcttgtaagggaggctttgaacaaacgtgaattcactgctccggtgacgccgcctaaggaagagaaaccagaggagaagaaaacagaggagggaactaaggggaagtgaaaacagaggagaagaaagaaga

SEQ ID NO: 150300 - DNA, 235 bp, Arabidopsis thaliana landsberg
  unsure (1)..(235): unsure at all n locations
aatcataccttatgccttgattagtccattgagcaagaacacttttcgaaacctcattcccaaacaccattgaaaacaactgatcagactcttccacagacaactccttccccaaacaagatcccacaacttcctcatccttatcaccaccaacaacactaatnggcanaaccctagctttgttcacaggagaaggactcttangaaacaaaaccatacgcttctcagcagcagc

SEQ ID NO: 150301 - DNA, 258 bp, Arabidopsis thaliana landsberg
acccattaccaaggctaccacaaagaaggtcattatggttatcaatttctaaggtttttgttcttaaaattcatttttttcctctgtgaatagatacatgtgaaggtttaaatttctgtctttgttgagcagcttgattagccatttctggttgtccaagtttatgcttattcatttccccatataaatcgaataagcaacttcttgttgcatgctttttcaacacaggaagatattattcaaaactgtttgaggttt

SEQ ID NO: 150302 - DNA, 296 bp, Arabidopsis thaliana landsberg
agcaaaaggagttacaacaagtgagaaacaagatcattaactcttagcctcacagaaaattaaacaaggctaaggataatgatccacatctcattatgactaaaacataaagattgattcaaagcagaatctcaaggcagtttcttggagagagaccagacacgtgttgctaattagtgtttcagttgtgaagaggatttggacctgtgtgaactaatctcttgtcgtcttaataatattcatctctgttttcttcttctcgacgttgacccgtgaacgacactgtagctttggga

SEQ ID NO: 150303 - DNA, 370 bp, Arabidopsis thaliana landsberg
  unsure (1)..(370): unsure at all n locations
gattcaattatcagtgacagtgacatataaaaatttatatatatgtcatttgaatccattcatattttttttaacaaaagtaagccgaaacccgaaaaaaaacccaacttagtttcaaatttcaagcgcgacgatgtaagttctcatcgtcgtcgtcagcagcatcggtggctccagcagcgagatcaagaagctgctccatctgcagtgtcatctccataagcgtcttggaagcagtgtcagtgtttttctngacaaacccttccgcgccttgtatcatcgccagaaaccatgacgtcgtagttggcagtgtctggtagtccttagttccagtagagcgctctttagagacgccaaaatccaacatacc

SEQ ID NO: 150304 - DNA, 75 bp, Arabidopsis thaliana landsberg
tacggaaatttcctgctcccttattaatgaataccattcacttttttattcaagctgttttatcaaagatgataa

SEQ ID NO: 150305 - DNA, 152 bp, Arabidopsis thaliana landsberg
tctaaacaatcgcttttttatttttctaaatatctctctgttcttttttcctctggatttgattctttcctggcattattattaggggttttttcatacgttgttgaaaatggcgtagttggagaaaggagacgaatcgatcatctacctac

SEQ ID NO: 150306 - DNA, 297 bp, Arabidopsis thaliana landsberg
cttgaggtcaaaagaactattttgcttctgtaaatgactgatcagcctagacacagaacaacagttttacaaacaattacaactgtttttattgttacagaataacaaagggaataataagaaacttacagatttgatatgttacatatcatatgtatctaactttgtaacaagggctcaactctctctgaacattttatccaatgcccctacatatctatctatatacatcatagatgattgtttgatcgggaaaaacaagtgactacattggtgcgggtaatctccggttatagg

SEQ ID NO: 150307 - DNA, 226 bp, Arabidopsis thaliana landsberg
aagataccctgacttcacatggtctatgttccttgagttcactcagaaacattatagagcagacatgaacactctccaagccttttcagattggctcaccaaacccatctaagaaataaaatattcatgtcttgtcttgttagttactagtatcttctttatatttcatgtatgtatatggtaataggcaataacaccttttagcatctcatttataaaatccatc

SEQ ID NO: 150308 - DNA, 246 bp, Arabidopsis thaliana landsberg
attcatttcaccggaaaaactgagtcaactcagagcgagttaccattaccaagaatcatttaacactactgaatacatatgggtatatgcagctcgagcgagtcgactcaagtcgcgacggcgaacgtgatcttacaagatgggaggatgatggagtttgcgaatcccgttaaagtcggatacgttttgctcaagtatccgatgtgttttatctgcaactccgacgatatggactttgacgacgcc

SEQ ID NO: 150309 - DNA, 361 bp, Arabidopsis thaliana landsberg
caataatatcacttttatataacataagtcgtctgccgtttagttaggcaaccggataaaaagcatactgagccacaccacacatgccttgaggccatgccacatctctacggatcctaatgtaaccattctctccccaagtctcaccccaggagttcttagccagccagtatttgatcccctctgggctcgttccgtatccaacgaacgtcactgcatggttcacgttggtcccacagtacggctcatcgtacactccccctgagtaatgcatgaaaccgggcccatccgcgtcaatggacactgagacaggctgcttggatacagcctcgagcaatgcacgctcgttgttgcttggaac

SEQ ID NO: 150310 - DNA, 80 bp, Arabidopsis thaliana landsberg
gaaaattttgactcgaatgagttgatgggtcaatgagttgatgagtcaattggtgtgatgagtaaaatgagttgggttgt

SEQ ID NO: 150311 - DNA, 297 bp, Arabidopsis thaliana landsberg
tctaccacccctttgtcttttcgtattacgagattcccattacttctttattcctttcattctttttttctttcttccacacagagtcgtaacgagttcttcattttcatatatctccgtttctggtttttttttttttccctttcaagtttcaattttttcttctgggtttttcatttggtgattaaacgtttgcattagacgaatcctgtattgttccaagagtcaaaaccatgtccgatggatacatcaattcgaagaagactgatgatatttgcgaagatgtctgtggacagg

SEQ ID NO: 150312 - DNA, 360 bp, Arabidopsis thaliana landsberg
tattttctctctgtttgtcatacacactgactatatatccttcttaatcacttatattatctcgctatggctttcattgaatggtattttttttgtaaatttaagctttttgttttctcatcgttactacttatttgatttaaaaggtcttttgtgtgttctggtggtactattctgttcaaacttattacaatggatctatataaagttcgtttcaggaagctcttagataatcatgttatcatctttttttgttctagcttctaagttgcaggtccctatgctaagttatgaataatgtagtttcagttaagctaagccacagtcttaaaaagtgtcaagtaccaaattattgaacat

SEQ ID NO: 150313 - DNA, 388 bp, Arabidopsis thaliana landsberg
  unsure (1)..(388): unsure at all n locations
ggaaagtgaanaangcgagacagcctaattctatcaaatctatagttggtaagaagaaggccatgaaagctgggcgctgcttgatcactgaggaggaggagaagaagatggaactgtgtgtgaatatgaagaataaggttttttgttgtctctgtaaatggatgatgactttgttttggtttggtgtggtctcttttgggtgtaagagtaaagagtcttcggatgtataaccagtactaccatgtaatatactctaaatagatagatttttacttgggttgatatctaatatatgttcaaagaatcgaagaaacgaaggctaaacaaattcgagttattatttctagttgggggttgcttaactaaatgctaattatgtattttatct

SEQ ID NO: 150314 - DNA, 370 bp, Arabidopsis thaliana landsberg
aattgtaggattaaatttaaatccggttttaaaaatgatcaaagcaagcagtaataatgatcatatatcacatgatttatagtgatgattttatcttgaatataaaagttacaactattttctcttgttgcggatttcactatcatcgaaaaagaagtttgcaaaaatattcacatataacaatttttgttgttaggtacctaattttcatgtatttaccactagaggtgtgctgagaaggaaaaagtggaaaagtaaaaaagcagatgagagggcttcagccttcaacttcacatatattcgtcaaagcagaaaataaaggggacaacttcagagaatataatttgcagattttgaagccttattatgt

SEQ ID NO: 150315 - DNA, 109 bp, Arabidopsis thaliana landsberg
atcattttcagctcattactcacctcaactaactctctgtggccaaaaataaacagagacatatcagactaaggagtatttaataagcatcatctaacaacaggccaag

SEQ ID NO: 150316 - DNA, 365 bp, Arabidopsis thaliana landsberg
ctaaagttcttctcgctcgtaggaaccagagagattctgtctgattaatgtggggtttatggttatgctagcgagatcaaagctagctctagatgtgagcagaagatcacagtctttgcaaagaatctgctactacgcaagtctctcctctagattttcctgcggcggcggagatgatggcggcggcagctcaccggaaatcggtggtaccgattcagcaaacgaatgggagaagctccttaaaccattcgatctggattctctaaggaattcatttcacaagataactccctttcagctctgtaagctacttgagttacctctcaatgtatccacttcaatggagttgttctcatggaccggtt

SEQ ID NO: 150317 - DNA, 1002 bp, Arabidopsis thaliana landsberg
caaaaacacatgcaaaggataaggatgaaccttttgcaggtgaaaaaagatttaaatttaagaagaataaaactagtgaagcagcagaggaaccaaaactagctggcagcaaaagacctttcctttctggtgagatgactggaaagaatcggcattcaaataaaatgagaatttgaaggttagactccttactcttgtcatatctagtcaagctgtattttcctcatctctgtgacacagttcttttttcctcatctctgtgacacatttacaagaatgctaataaaaagtcttttcatataacactacaaaagaacttatagaggtctaagcacactctaggaactgttaacagtagcaaagcttacagcatccagaaataagtgcaaagacgctatactacccaaaaaaaaaacagatccaagcgaaaaatatatgaaatctatggttttcttgctgtgatatgttgtttcctacttcctcttacatctgttaggggatcaatcctggtacaaaaatacacactcttggtgtcaatcataccctttggaatacataaagattgaaagaaaattgagtggtgtggtttgtctttacttgttctgtatagggctggagccagtccttgggattcttcggaagctatctttttcacctcttagagactctcctttcatctcctggcttatcttcaaatctctcacacctttactagaagctaaatccatggaagctggcgccatctgacgacactctacattatacttgctgctaaacaaagctagaagtaacagacagagagctgctgagatcgatgccgatgtatggaatctcttcattgtgaaatttctttgtgatctgttgtggtcttaggttgttgtgttccttgagactgctattgagaaaactttagggtagcttatgtttgagttaaagagcgagaatctttgttgctttgtagattatattatcgattcatgaaatcttttgggatctaatcac

SEQ ID NO: 150318 - DNA, 97 bp, Arabidopsis thaliana landsberg
aatgcacgatataaaggagtttggtacaaatatttcattcaaattatctattttaacatttgcactatgataaacaagctattgtatcattatattg

SEQ ID NO: 150319 - DNA, 447 bp, Arabidopsis thaliana landsberg
agggagagaaggagcttaagagagcattcgtcgtcgtcaatggagatcttctctgcgtctgcttctctaactttaactggattcgttcctcgtcttcttcccttgctctctcctcaagctcgaactacttcctgcaagccgttgctgtcttcttcttctactagactcatttcttgtcacagtcgtatagctccgtctcggtctctcgcagatcaatccgcctctactggttagttttcaaaccctaatttggaacttgagagatgcctaagtctagcgaaatcgttagattgattgtgtaccaactgttcgacgatatgtctgatgctgaattagtctaaattttggtgtgttttttttgtcttacattgatgctattagtaaattgctactctaacaaacgcagaaattccactaagttatctaattgttttgtaacggatcaaa

SEQ ID NO: 150320 - DNA, 227 bp, Arabidopsis thaliana landsberg
cctaagggtgcgactcttttgttgattaagggtttgcattggatggctcaaaagagagtggagtatattgagactactccttctgtgactttgctctctcatgtccgtatagtttcttttatggttttcctccttatcttagattgtctccttacgtatagttctatacggcaattgattcagtcacgtaaagcttcaatgtcagtcttcttcacgtttgagtaagt

SEQ ID NO: 150321 - DNA, 305 bp, Arabidopsis thaliana landsberg; identical to SEQ ID NO: 55546

SEQ ID NO: 150322 - DNA, 261 bp, Arabidopsis thaliana landsberg
gacatttcagtctcattccacctggtggcggaggcatcttagcacattccctagcacatgtagcatcttcgctaaaggtgtgctaattacaaaaccaaaattcggcgctcaaaaactctgaagtctaactgtcattcttgggcttctttgttttaataacttaaacagtttaaagaagtggatcaagctacgcaggcatcgaatctgtaattaaaaaggagaaaaattacttggcggaaggaaaactagcagaagcagcag

SEQ ID NO: 150323 - DNA, 297 bp, Arabidopsis thaliana landsberg
aagagtttgtggctgctgaaattcttcaaacccaactgatggtgatgctgatgttcttcttcttctgacattctctctctcttctctcttttcgcagcttcttcttcatcttcggcttaacaacaacaaaacttcacacacgtggtgagagagcacacaaaggctcaagctttttcaaacccttgttgaaattcgagctcttttggtgtttctcttttttttgttggtatcaatttggtaattctaaaggtcttgttgaggtactgaatcagcttcttcttcttctcggatcttgtc

SEQ ID NO: 150324 - DNA, 182 bp, Arabidopsis thaliana landsberg
ctcaatcgttgtaagtgctaagcgcagcaacaaccgctcctgttgtcgaaaaagccgaggaaatttccgtatggtctctccacgacgtattgattttcagggacgggtataaccaagacttaaccgaatcaacaaaggaacccggttcgacattaagtatagcttcccaatcgatctgtaac

SEQ ID NO: 150325 - DNA, 378 bp, Arabidopsis thaliana landsberg
ctgaatctgcaaaaaagtcttacgtcacactcccatgtagtagccgtcacttctcgtcttcctcctagagattacccaactctctcgcttcatctttttcctcttagggtttcttcatcctttagggtttccacaaaaattcaaaacctacttggaaatatttgggcttgaagaaggaagaattagatggaaggaagaaggattacggcaagccctagaccttgtagtggaagaagaattgtggctaagaaaaggtctcgacccgatggattcgtcaacagtgttaaaaagcttcaacgaagagaaatctcttctcgtaaagatcgagctttctctattagcaccgcccaagagagatttcgtaacatgcgtctcgtg

SEQ ID NO: 150326 - DNA, 556 bp, Arabidopsis thaliana landsberg
gaacttttgataagtattttagaaaaaatacaaaaaaattatggattggatagccatattaatttgggccgtgcttgttatgttaaaaccacttccaaacgattcaaaaaatcgaagaaaaatatatcttgctgaagttactttgatcaatcagatccgaacatgtcaggttcatgaacgttacattcctcaaacagaattccaaaaccaacaattcgcatatgaaatttcaacttagtattttactgaataatatacttcatacatcatcagagaagcttacatgatttgcatgatatatttattcaaaaggtttggtccaaaccgtttggagtttggtctgatcactgaactcgaactggaacgagcttgagaggtactttcttgactattgtaagagtaccagcttcttcagtatcgatatctttatgtgtcatcccatcaggcaacttccaatcgaagaagtaaagtaagttcaagagtcccaattcgacggcagcaatccccattggcatcccgggacatatccttcgaccggacccaaatggtaagagct

SEQ ID NO: 150327 - DNA, 248 bp, Arabidopsis thaliana landsberg
tagtctcacatattcccataaggatatgttaacctattttcatcacgttttactaactcaaatttctaatttgagggatagaagttggtcacatgatacatatttgttaacgtatgaacatcataaaatctaacatttgatacaagagtatgtaggatacaaagttacacgttgtgtttgtctcaaacaacattagtaacattttaaaaaaaaattgtgtagacaaacacaacattagtaacatttta

SEQ ID NO: 150328 - DNA, 513 bp, Arabidopsis thaliana landsberg
  unsure (1)..(513): unsure at all n locations
cagttctcaaatcacgcagctgctagtagagagctttgttgtgccattctctgcatagagattgtcttcgcttctatggtacttttttcttgcgtccactcctccnnnnnnnnnnnnnnnnnnnnnnnnnnnnnnnnnnttgtttnnnnnnnnnnnnnnnnnnnnnnnnnnnnnnnnnnnnnnnnnnnnnnnnntggttgcttgcttccggtacgctactatagatgttcattcggtctaccttccaccatcaattcttagtttcaactacgagaatcaggattggatacagagagagacagacgaggtgaaatacatgtgattctcttggatggagttttgaaagtgaatactttgactgagttctccctcttttttattaaacaggtgatagagagagcagagcttctgttttctgaagtattaaatgctattagtcaaattggcagagaaaggtttcaggcgacgaattggtgaactcgaagaagtgctgcaaaaagagaaagcggaatt

SEQ ID NO: 150329 - DNA, 263 bp, Arabidopsis thaliana landsberg
gacctcctacgcctggagctctattcaaagtgagagaaggtatcacttatggcattcccatattttaatttgctcaaagaaaaattaaatatttcttagaatctcagaccatttccaacgaagagtcttttggccattttcaacgggagatctaagtctaaatatccgaaaagtaaatcaaagttgccaaaaaccaatagactcagatccaaaattggaattttagacaatggtttgaatctcatacgtgtcacatcataaat

SEQ ID NO: 150330 - DNA, 301 bp, Arabidopsis thaliana landsberg
  unsure (1)..(301): unsure at all n locations
gtattccaatggtaagagatccaaagtactttcttttgtctgtactgctgggatgttttaggtcgatttggtattcaaaaatttccatctgcaaacttcacgatgcttgataaactgttgttgtctctctcttccctggttcagttcgaagttgatgaataacaaatacatgtgtcttattagaagcagaaagtctcacataagcagatgttatactatgngatctttttctctctcttgtatttngactaaagctgttatcattggatgcccatgtggtgaagtgatccatcgtgctttt

SEQ ID NO: 150331 - DNA, 98 bp, Arabidopsis thaliana landsberg
cattaacactctcttatttgaaatagtctttcccacttatgtgtttcaatgataatgatcaaatgctttgggatgaagacccgcatgagtatgtaagg

SEQ ID NO: 150332 - DNA, 503 bp, Arabidopsis thaliana landsberg
ggtggtcttagcctcccggaggaaagaggtcccgaggaggaggatgaatcatagaagatccggaatacccattgcgtaagcgttttaaagattgtactgatcttcattttgtactatgtgaagagattttacaaacaagactcttaccaatttcacctctcaaaactctgcaggagtattgtctgtggaggttgcaccgctgcttaagacacaacaaaagtttcaacaacaatgtattcgtgactctctttctgtggttgttttctagttcgtaggatgaaactctccaactgtgaagataaggaaactgttggttctcttatttgtatgtgaagaagcttctttctctgtttatggttgtggatagatttgcagattctgtaacattcttgtcttgttaacaagttttggatcttttagcaaatttggaattcttatattgtgttatttttgaattttgatcatgcaataaaatcagattaaaccaaagtgaaaccaaaaag

SEQ ID NO: 150333 - DNA, 464 bp, Arabidopsis thaliana landsberg
gccgggctggcctaagactaagaccacggtttaaagtcatgtgccatgatctgatctctatgctcctgtcaaataaggcacattagaagatcttgataaaagaaatggcacaaagtgggctatgatttcgagctactctaaccgtgttgtctctgatgataagcctgaagtgtccaacaaagtaaagaagcgaagcgtgtcgcgtgctcgcattgatgaagatgctgctggcattggacctgtttacattgatgctaagggccaaaaactgcggattttatctaagtttaacgagaaagcttctgatccatcaagaagagagcatgaagaagtttgtgagaagaaatcttctagtgaaggtaaagggggcaaaagctttaggaaaaaactttggggagagaaacattacaagcatcgtaaactagttcctcaaaacagaaaactcactgttcgtaaaagcaatg

SEQ ID NO: 150334 - DNA, 264 bp, Arabidopsis thaliana landsberg
tatcgaaaagaacaacaagctaaagaagctagagaagctaaatctacgcagaatactaaaaggaggtgtgatttttttgttcttctctaagtccaatttactttaatatcattttcattcgtttttgtatcgatatgttcagtatctcgttcgtttttattctcagggatgatttcctgtccaaaggattcaagctggtcttataagccaaaaacaagagacaggagctaaagctgcacaaggtaagtgaaaaagttgaccgtc

SEQ ID NO: 150335 - DNA, 133 bp, Arabidopsis thaliana landsberg
agcattttaattttaaaatcccccttaactagatacgaagaaaagttcttaaaacacttacgatggtatgtaggagtaaaaccatctattaagcttatttgataaattaggtatctccgtgtgacaaagaaca

SEQ ID NO: 150336 - DNA, 307 bp, Arabidopsis thaliana landsberg
gtgaagcaagtgtttccactgggattttacagccttcttacgataccaccggctctagcagtgatgaatctcctttggttctggaaaatcaccaaaggattgatcaaaacactctccaaggcgaaaacatcgggagtgaagaaacagtgatggttgccctgaaaaagattttttaactgcattcactttgatgtgtccatgaaaaattgattgatattcatgttgaggttgtcttggatgcccttttgggtttatgaacaaagagtgtgcaagctaatggggattgtgtattcaaacttttcagctg

SEQ ID NO: 150337 - DNA, 53 bp, Arabidopsis thaliana landsberg
cccacatcatctttctgcctgattctcatcatttggtttgtgttcgttcatag

SEQ ID NO: 150338 - DNA, 76 bp, Arabidopsis thaliana landsberg
cttcttcttcttcttcttcttcttctttggattttgtgagctaataaacagagaggaattgccataaaaaacctac

SEQ ID NO: 150339 - DNA, 259 bp, Arabidopsis thaliana landsberg
cagatggcttaagcagaggtacacacaggtcgtctatggttggtggtgattcttttttcatcttattctataatttttactttttcactgtgattttcttcttcttgagctttgttttgaattttgattttctcaagtaattacgattgtgctctctctctctctttcttatgaatctttgtgtctgtgtgttgtaatcttgaatgtaactgtggtggcttcatcgcaacaaaattatatatgatcatttattagtttc

SEQ ID NO: 150340 - DNA, 185 bp, Arabidopsis thaliana landsberg
aagacaatgctattttattagagatctctataatgaaaaaggatctcaaagattacatgatcatgagataataaacagaaacaaaaatccaagagaagaagtaataatattaagaaagaaagaaacaacagtctgaataatcaaaccgttgaacctaatctttaggtttcaaaaaatgaattatt

SEQ ID NO: 150341 - DNA, 272 bp, Arabidopsis thaliana landsberg; identical to SEQ ID NO: 58645

SEQ ID NO: 150342 - DNA, 355 bp, Arabidopsis thaliana landsberg
aacaacttactgagtcaaaagtttctagagggagactctctaaatgacgcctgatcactgcatttccctgcctatgcacaagttttatattcaccaattttgatatatttagtcctgcatctgtcaactttttctctctttcttgatctggaacctcattaaacatccataactcagatccaggcgcaagcagagcttctagtacctataaggttagaaaagcacataactagttaacacagagtttgcatggaacaatgtttacactatagttctccaatctcttttgatacatcatgtaccttgatcatatcatcaatatcacgacgccatccacaaaaaagtattgtctctc

SEQ ID NO: 150343 - DNA, 463 bp, Arabidopsis thaliana landsberg
  unsure (1)..(463): unsure at all n locations
tcttcttctttaacgtgtanactttatatacatcggaagcatttcttctttgtccgttcacatcattttcgaatttgtgttttccctagaaattgtctttttttttttctttcttatagagaaaatcaagaaaatgtaaaaaagattgatatatttatttattctcgttcaaatgaatcactctttatttgactcgttagtccatgtctcgtctcactctcttaatctctatttcctctcagatctctcaaaaagtgtagttttgtgacaaaaactgttttttaaagttagctataagaagatgaggaagatcatagggtttagaatcgggagacgagtctcaagatggatctttcgcaaaacccggatccaacgttcaggatacaaccggatacactcgacccagcaagcttgcatgctgatgagaccattagccaaactcaaaagttggggccaacgtctc

SEQ ID NO: 150344 - DNA, 383 bp, Arabidopsis thaliana landsberg
ccgtttcgtaaccctagtttcatcgaaatcagattctcagatcttctcttcgtttattcgtccgctttcgactaacagtagcggcggcggaggaaatggtgacgggaatggtcgtaatcggaatgacgttccgtggagtttcactggagtaaacgatgataagtctggacctttctcttccgatgattcttttggttcttctggagttgcaggatctggtttacctggtggagaggggaaatggccgtaggagcctaagagatggaatataaaggaggaagaggataaagttgtgtttgatactggtggtgaagtaggtcaagggattgagactagtcgcgagaggaggggtaatgaatggcagtagactgagcgatgggata

SEQ ID NO: 150345 - DNA, 201 bp, Arabidopsis thaliana landsberg
aacttaatcacctgaattccttaatcttaatcagtttttggacataagtgctcaataatcctacagaataaatagatcaaatatggctacaccacttatgaacattttaacaacataaagaagaagtccttcatcttctctttttgccttccttttatttcatgcagtatcagagagatgtaataatgtcatcaaataatt

SEQ ID NO: 150346 - DNA, 367 bp, Arabidopsis thaliana landsberg
acttgattctgtctaagaatccatcaacattctctccttctctacaggtattgcaacgggtttgttccgaatatcctcataacttttctccagtttctgaatacgttccaaacatggaagaatccggtctttcattgtgggctctctaggaggtggtgagatgaggctgcaccgactgtcatcttctgttggacttgaagggctgactgtagtctggcttctcagaagctcaagcggagtataacgaaaaactgcagctagtttcagcattaacgaaagtagtcttttcgctaggttctcacattttatcttgtcaatcgttacccttaaatcatgaagccaacggatgatgggagcacctaggaga

SEQ ID NO: 150347 - DNA, 230 bp, Arabidopsis thaliana landsberg
gagatggattcaacaaatggtaacggagctgatcttgaatcaacaaatggggcaaacgggagtggggttactgaggcattaccacctccttcaccagttatacctccaaatgtggaaccagttcgtgttaaaactgaacttgctgagaagaaggggccagctcgagttcctatggctcgaaaaggatttggaacaaggggccaaaagatccccttgttaacaaatcattt

SEQ ID NO: 150348 - DNA, 128 bp, Arabidopsis thaliana landsberg
cttgtccctggcgatgaagcccaggcccataactaggcccaatatatatgatcacatatggtccaagataacttatcggtatgcgcagtaatttactgaaaaccaaagaccatttttttatgtaatgt

SEQ ID NO: 150349 - DNA, 466 bp, Arabidopsis thaliana landsberg
atttgtagtgttgaatgtctgaactaatggtcttactcttaatggcctcagggcagtcccagccaccatgccatctttcagtatttcttgaagtgacagattcacgaagctcaagtgattggagctgttttgttagccaccgactatcagttgtgaaccagagattggaggagaagtcggtgacaaaagaatctcagaatcgctactcgaaagctgcaaaggattggggttggcgtgagtttgtgacacttactagtttgtttgatcaagactctggctttcttgttcaagacactgttgttttctccgctgaggttcttattttgaaagagacatctgctacaaaagagtatgtggaggcagactcaactaattcagtttctccgactgataacagcgtcaaaaaaagttcatttacttggaaagtggaaaatttcttagccttcaaagagataatggaaacacg

SEQ ID NO: 150350 - DNA, 313 bp, Arabidopsis thaliana landsberg
atccaatttattcacaaagataattagagaccccaaaccaaaacctcacattgtcccaataattaaaatgaagaggacactctggtcaatacagcctcataaccctcctcgctatagagtggccgtgactattcgccttagccgccgtcttctcccacccaccaccaccaccaccgcctccgcctccaccactaccaccgccggtcctccagcttctcctcatcggagtcaaataaaacctcaacattccgttctctccatctttggacgaatacctcgaactcttattcctcgccgatcctccaccggagct

SEQ ID NO: 150351 - DNA, 119 bp, Arabidopsis thaliana landsberg
aaaaaagtttgcattttttttctttgttgtgataatcgaaaaagagaaaaaaacctaaaaatcgtgcagaggagaggataccacaccacacccagaaattgaaactaccaaaaaggtta

SEQ ID NO: 150352 - DNA, 150 bp, Arabidopsis thaliana landsberg
atattaatgactttagcctaaaaaaacttaagtcagtgtaaaacaatatcgatgtgtgattaagaagagatccaatttaacattacccacacaatcaatttgattatttcctcctctccggatctgagtctcttttctcttgatctttta

SEQ ID NO: 150353 - DNA, 646 bp, Arabidopsis thaliana landsberg
ttttttttttttttccacttcaagtttttcatcttattattatttttcgttgtgatgcagtagtacggcccatcttcagcagtagtatatcaaagccgaaacagatgacaaattgtttaacatgcacttggattattattgagagttgaaatacaaaggcccgttacaagcccaaacgaaggtacataaaagaaaagcagaaaatgaaaacgaaatcgatagggataagtttttccaacagacggaaacacaaactacaccaggtgaaatagatcacctcccaagtgcttgagacacgaaccaaccacttattatcagatcacaaaaagcttagaagcttccaccacgaagacgaagaaccaagtgaagagtcgactccttctggatgttgtaatctgcaagtgtgcgaccatcctcaagctgtttaccagcgaagatgagtctctgttggtctggtgggatcccttccttgtcctgaatcttagccttgacattatcgatggtgtctgagctttcaacctccagagtaatggtctttccggtaagggtcttcacaaagatctgcataccaccacggagacgaagcacaagatgaagtgtcgactccttttggatgttgtaatctgcaagggtgcgtccatcttcg

SEQ ID NO: 150354 - DNA, 507 bp, Arabidopsis thaliana landsberg
tcaagctccagtaccatccggagattcaacttcagctgaagctatataaaagtataaattctgaaatttctaacgacgtctcttgatgagaacatgcaaaatctgatatgcaagatctgaaatatacacccacaggattggacttggaagcttgcaacttgagaatcgtgagaggtcagagtcagtcagagtctagtttcactgccatggttatactccaggtctggtctggtctggtctcagaggtttgtaccggctggtcggtttaaaagtactgcgtctgagaaagtgtttggttcattgtccagggctatttttttgaaatgactggtacaccggtcgtgagtcgacctttgtgttgtttttaaattttggagggttataaaaacttacagtggagtcttttgtttttgtgttgacaacagtttgtatgtcggttaaaaaattgaaaccataaacccttttttggtcttaatatgtttggtgtctgatttcctgaggaaaggt

SEQ ID NO: 150355 - DNA, 58 bp, Arabidopsis thaliana landsberg
tatgagaattatcgtctctgtgtgttgatggagattatactatgacgcaattgaatca

SEQ ID NO: 150356 - DNA, 390 bp, Arabidopsis thaliana landsberg
acaaacaaactaaactgagaaacacaataaagttggaaaatgtgcggtgtcaaaaaaaacgactttccacccaaagatcttaagcagaccgtcgaacgaaacgccgtcgtttaaatcaccaccggctaatcgaatcatagatttgatttcatcgtcggttacagctaaaccagccgaatccatataactcttcagatctccgtaactcagtctcccatctccgtctttatccatcaccttaaacacatctttcatcaatccatcgtctcctccgttaccagatctagaaaacggcgtcgtttctagaactttctcgaattcatcgaactcaacgaatccgtctttgttcgcgtccgctactgatatcatcgttccgatcatcgtctcgtc

SEQ ID NO: 150357 - DNA, 275 bp, Arabidopsis thaliana landsberg
ttcttagaaagacaagacgatatttttagaggattgttggatttactatcaggataataagatagtgtctcttaagggtgacctaaaaaagagataaatgcagaatatctaccaaaacaagatatattcgtgccactaaaagtattaccaatcgaaaattaagaaatatatatctctattttcttgattgtgagtttagagagtaagagataagattcaaagtcctccagagaagttttttcactcttaaccttacttgctgctctcattaaggg

SEQ ID NO: 150358 - DNA, 127 bp, Arabidopsis thaliana landsberg
aaaaaaaccgatagatttgagattgacagaatgagagcaaaacatacacaagtttccagtgtatacaaaaaacatatagaggcaccaaacacactgataccaacattttttatcaagcgtctaggac

SEQ ID NO: 150359 - DNA, 196 bp, Arabidopsis thaliana landsberg
cgatcccgttacgagatacttcatattcaaatcggatctgtatcgtcgacgagtaatcataacaatacccaaatcggaccgatttagggcaaacgagttatattcaagttaaacgaatcaaaccaaacccggattttagatcggcgtaatccaaaaagcaaagatttcacacgcggatcgtacatatatcaaacag

SEQ ID NO: 150360 - DNA, 544 bp, Arabidopsis thaliana landsberg
cagtcttgcaaacgtttgcgcattatgaagggatctgtttcatttttacttggtacatctctaacttttgggtttgggtctttcaatttttaccaattttctttttattttaatataattctgttttcttggttatagctccgagagcaatggagaagtactgcatgaacagatcttgaattaataataaaaaaaaaagaagcatcaatgatcaacaatatgacgggttcttgattttatatgtatttttatgattgtatgtggctatcacctatatatgtgtgttgtagttttaaatacttgatgggtatatagggcagttttttaccagttagatgtggacaaacttgttatgtgaccaaaagagaggaaacttcaatatctctgtgtttgtgtcatatttattgcccaacatgtgtctgtcggtttgatgatcaatcacaacttgatatgtgcatacatataaatgtgtgtatgtaggtgtgtgtccatgtacctgtgttttgatcccttactctgctacttgtcgtttcttgtgtgtgtt

SEQ ID NO: 150361 - DNA, 138 bp, Arabidopsis thaliana landsberg
tgtgatgcaaacaaatgagatgtgatcagaagtcaataagtcaagccaagcaataaaagttttggggtttctaacagtcctaagtgaacatgcagaaaacagaaacaataacaaaattactaaaatcactcgaccaca

SEQ ID NO: 150362 - DNA, 312 bp, Arabidopsis thaliana landsberg
ataatggcacactcactctgcttcttcttcttcttcttcttcttttgattcttttgatttctcgatttctgtcacggcgttttgggaggttgctgtgtcgtctatcttctcatcatcatctcgtagtgtctggcttgacgcttgaggatctgatgtccgagtatggcttgttggttctggagcactcgagtccgacacttgaggggtttgactcatttcagactggccagtaccaataggactgctttgtgactgaccaataggactgctctgagattcactcatttcagatcttcccgtatctatgggact

SEQ ID NO: 150363 - DNA, 252 bp, Arabidopsis thaliana landsberg
caacataacttgctctgttctggtccatgtttcacagaatctggccttaagcaattttatcatatttaagctacaaatccataacagagtttaacaaagataaaataaccagaaagttacattgaaagataaaaagtgaagaagacaaaaaaagagagggtaaatcctaaatcgaaaacaaaagaaggcattggcaatagcattccgattttaaaaaccgataaatctatgtatctaatggcttgttcttcg

SEQ ID NO: 150364 - DNA, 286 bp, Arabidopsis thaliana landsberg
gcatcacatcaccaagattcacaactgactaagatacttatcagaaagccacggtagaaaagaatctcctgtattaacaaacttttagtttaacttatagaagagaagagaagaagaaaaactaaacgaaaaaaaaaaaactcttcttttgcaggaatcacacgatcttctatgacccgggcttggatatctcaaggtataccatttgagtatacccattgaacactgacttatccagccgacctaaaccgattcgttggaacaaccggtgcttgccatctgctac

SEQ ID NO: 150365 - DNA, 156 bp, Arabidopsis thaliana landsberg
tgagagtgtcgtctctgttatcatcttctgaagaaattgaataacagagtctaacattataatgtagaactacaagatggaatgatcagattacatataagcttatttgtataaaactaagactaacactaaaccccataagagaggaagtatgaa

SEQ ID NO: 150366 - DNA, 123 bp, Arabidopsis thaliana landsberg
aaatttctttggtttctttttctttcgttctttcttttccaatatgtaaaatttccattactaatgtgggggtttgactggtgtaactcttttcttcttcgaatgtaatataaatgcgtttta

SEQ ID NO: 150367 - DNA, 398 bp, Arabidopsis thaliana landsberg
tcatcatcagcttcaatagtcagacgacattgatattagtatcttatattttcttgtacataatgcaaaacattttaatctctatataaagaagaatagagattgaaccagcatcagaacattatcataattaacaagcatcgccatataatatatatatttttttttttccaaattttatatgcaaattaaaattatacttttgactgatgattaaaccacttgaaacaaaaatcgagaatacaaaagcagatacttattattgtttcatgcggtgatgctcatggagtgatctgatctccttgctcttccccgaacatctcggactgttggttggaatcgtatggattcttgaagttggacttcttctcattgtaaccggtgggcttgtagttgta

SEQ ID NO: 150368 - DNA, 336 bp, Arabidopsis thaliana landsberg
aaaaattggaggataataatctataatctccttagatttgtcctagtatttaaatggagtctctcagatctcctactttccgacataccaaaagcaaaacaaagaaacttagtcttgtcttgtgtaccagacttttgtctcaatcatcttcattgtgaaggccatgcttgtacatgagctgttccaaagcctcatcaaattctttctccagatcaaatatctcctcgtgatgcctcttcttcatgtcttccatcttcttctcttgatcttttatcagcatctccctctcttccacaaactcctccatctctttctcttgaaactcgatgaagcttg

SEQ ID NO: 150369 - DNA, 882 bp, Arabidopsis thaliana landsberg
  unsure (1)..(882): unsure at all n locations
gactcttatcaacgatcgccggctaattggtcaaatcacccatcgnnnnnnnnnnnnnnnnnnnnnnngactccttcttcatcgttttatgctgacaacactcaacatggtatgatttaaatccctttttaaaaacaaaatttggggtttaacggtactgtgatggttacagaactttggatttgaggattgatcaatttattcttaggacgattttgattcgttttggtttgatcttagttttaacgcatgaagattatgtatttgcaggaaatagtggtcttcgaggtgaagattcttcttataaagatatgttatcaccgagtggattttactcttcaagggaatcatcatctgattttgtgtcacttcctcccactgagaatttctcagagaggcaacgtttgaactttgagcctacctacagctcagctaccttagctcctgtgtcttcttatgcagatatgctaatcagaaattctcaggactcattctttactcctatcgcgtcatctggtgtttactcttctagcaatgctgttgatgagaaacgtcctggatattactttcttggctcagatagatctgaaactatgaatgttgtctctgcttctcgtgtggagccttacatgtgtgatacagattgtaatccttcttttccaatgccgaattttataacacaagctctctttgatggaagtcagactgggcttcgtgtaggagatgggagatcattcccgagcaacagtgatgtttgtagtcatgcgcctcagaattttttaggagctcaatccagcttgcagagttcctctgttgaaccagttaacttcgatgtgttactgggatatggtgaagctactggtcatatcaagcctttgcccg

SEQ ID NO: 150370 - DNA, 357 bp, Arabidopsis thaliana landsberg
aaggatgacagttatcatgaacttagaaaaggtgcatatgaccagtggaatgttactttgttctactatcaaaaagttagttttacttgcttccatatatctggctctggcagactcctcaactaatgcatttattaattggtttaaggttgccgaagcatattcgaaaggagggagggatcatgcggcttacctttctgacaaggtgcatatcacggtttacatatatcatggtatcatggcattttgtttgacagtatgacagaaacttgtgttgtttttcttttagggaagagtggcatctaaacaagctcaacgggctgatgagagggcaagccaagatatattcgttgcaag

SEQ ID NO: 150371 - DNA, 96 bp, Arabidopsis thaliana landsberg
taagcagcaagaagatcaatacctctgatgtttcagctcagaagagtgtcgaggtgaagaaaaagaaacaaggtccaaagattgtcaatttcgttg

SEQ ID NO: 150372 - DNA, 392 bp, Arabidopsis thaliana landsberg
atctttatctctaaagaattgaatattgttgggtttttaatattttcttcattgtgtcgtgtcatttctctcgtttgttaaaattactatcaaacttttacaagtaattttgaaggttattccaatattttaccttttaaaatctcttgtaaaatcctgtttaaaacgtctgtttaaatccttttaaaatatcttgtaaatcattcgttatgccacttacatatactttaaacgattgtaaatcaagttaaacacttttacaagcttttaacttgaatcttttaaaatgtcttgtaagtcgtttactaaaattactatcaaactttacaagtaattttaatagtaattccaataatttacctttttaacatattttgtaaaagcctgtttaa

SEQ ID NO: 150373 - DNA, 349 bp, Arabidopsis thaliana landsberg
aaccatcaattccccaaagaacaatgagaatcaatgtggtatgatactggagctaccataccaaagaaaccaaatttgattaagctaagcatagtcacagtgtgtccaaactacacacctcaaccatttgaaatcagagagaattttgagaaagatattaacccattaacagattagagaatacaggaactaccaaagaccctacattggttaagctataaacatgatcagggtggcaacaactacacatttcaaccatttgaaatcagccagaactttgataatggtttaacccatttaaaaatttaagaaaacccacaagttttttgctattcatcaactcatataa

SEQ ID NO: 150374 - DNA, 127 bp, Arabidopsis thaliana landsberg
aaccgataaaagtttcctgtgtccgtccttgtaaccgctcaggctaggcagcaagaaagtgaaaaattctttcttttttgtttcttttggtgaacaacaaattttacagtctgaaacagattgggac

SEQ ID NO: 150375 - DNA, 735 bp, Arabidopsis thaliana landsberg
gccaaattaatatgatgatttaattatcgtactccgtttagggaatggtgaaaaacaaagtgacaagaccatattccccaatttctgagagttcttgggctgaaggagcttcttaacaatgccagcttcagttacaccatcttcaacctttggcactagccctacgaccagctcaagttaaagtctgaatctttgagctctcattccttccaatgtcccctctcgcctccccggtaaagactttttcctcttctccatttgcttgaacaaagctttatttcttttcttttttttttccttatataacccaactgcaattttagtatctaaacgcaactggttaatggttaatgatctctggtgttttgtattccctgaccaaaatctctgagcataacaaaaacacaaatatccgttattgtttggtacaagctatagtttcatggttttaacatccagccttttgcgtttgatatctaatggacatacttttcttctcaggttaggggagattaaacacagcattggtgaaaaaagaaagaacatttgattttgttcaaatttttcttgtgtagggttttggtaatcagatcgtagaaatattaagtgtgtatatatatgataacatctacaaatcgggtactgtacagactcatccaacattagactcgtgtatcgcatcacatgtatacgggtaccatatataattctattaattttttcatatatctccaa

SEQ ID NO: 150376 - DNA, 468 bp, Arabidopsis thaliana landsberg
gattcatatcttgttgcagcagtattctggttccatgggttaggcactttcctttcgtcgacctaattcatcttgtgcatgtcgattgtgaataatgaccgaagaaggatgcgtcccgcacaactctggttagtctgtggacctaatagtcattcgtaaccctccacagagcttactcatccgccgcttctgtattctctctgttgtagatgttgttaaacaaaagtctatagatcaaagagcccctctttccggggaacctaaatgtgttatctgcagtcgttatggtgagtacatatgtgacgagaccaatgatgacgtctgcagcctcgagtgtaagcaagcactcctgagaagagttgacagcgctagagtttttcctgccacagatgagtgcttctatgttagagacccaggatcttcttcccacgatgctcaactacttagaagaaagcttgatattcatgt

SEQ ID NO: 150377 - DNA, 625 bp, Arabidopsis thaliana landsberg
tgcactttttcgacgaacctgaaaaatcttcaattttagaattagtcaataccggaatattcctgggttttctcttgcttctggattttctcaggtctctatcacaaaggtgctcatcgattcctctgttttttgttttcctttgaaagtttctttgatgatcattggattttgataccattcattactgatcatctgatgttgatcgatgagcttatgatggtttttgggtttcatcggattgatgctttttatctgaaaggttgatgcttttgctcgtacattaaacaatgaatccttaaaaaaactgtttttttttgctcgaattgtatagttttgtgatgtgtattagcttattcaagtttagttattcatttggttttagaaatgttatatgtttctcttacaggtgattctactgtgtaggaggaacaagagttttgcaccaagaagagagaggaaggattctggtttacgggagctagtgaaaatcttctgtgaaattggctttcctctctcattctctgtgaaatttgaaagtattgatttcgaagatatgggtgctttctgttgttgctttcaagttgatctctttgagagttatgtgaatccaaacacttccata

SEQ ID NO: 150378 - DNA, 356 bp, Arabidopsis thaliana landsberg
ccggcttatggttgaattctacgtggatttaagcataagtttacaatagccatagtaattcggtaagtacatgcttttgggtccttatcatctctattggtgtggtcatatctgaataagcagagctactacggatcacgaatctcttcttctcgtatgttttatgtttaagtgaggttcgatctagaatctcatcaattaatatcaataaaagtacacccatgatcaatgagaactcatgtaacaataatctctgttcgtaggttcttggggataaattagtcatcggaatagcataccagagatcgacgatctcattaatcattatgtataagtacaaacttcgtaaaactatc

SEQ ID NO: 150379 - DNA, 191 bp, Arabidopsis thaliana landsberg
gctgctaattttatctcctacaaaatcaagacgaactagttgagtattgatgtgaaaaccagatcaggagactaattgaagtattgaactccattttgagccttttgcatagaaaccttgttccgaacgcacaagtctgcttgaaattgaccaaggatgaacatacaaaagtgatttcaattattcatcac

SEQ ID NO: 150380 - DNA, 241 bp, Arabidopsis thaliana landsberg
ttctatagcctcactaaacatctcttgttattttcgaaagtgaagagaaaaatggtggatctattgaactcggtgatgaacctggtggcgcctccagcgaccatggtggtgatggcctttgcatggccattactgtctttcattagcttctccgaacgggcttacaactcttatttcgccaccgaaaatatggaagataaagtagttgtcatcaccggagcttcatcggccattgtaccgc

SEQ ID NO: 150381 - DNA, 130 bp, Arabidopsis thaliana landsberg
agcgtacgagagagagtaatgaagagtgaagtggtatattgttctctcggccacttccactctctcttttatctcttacttacttcttcgtaagatcattacatataataaataatattatttatgtttg

SEQ ID NO: 150382 - DNA, 218 bp, Arabidopsis thaliana landsberg
gtggcatgacaaaaagtgtgataggatcaatggtcattatcgtgggactttatatacttttatggggaaaaagcaaggataagtctgcatcagtgaccaaacaagaaccattagatcttgatcttgaaggttgtgggacagcaccaaaggaactcaatagatctgccattaagtgtctgcaaataataactttaagatatatttaactgtttcccata

SEQ ID NO: 150383 - DNA, 431 bp, Arabidopsis thaliana landsberg
  unsure (1)..(431): unsure at all n locations
aaaaaggaaataaaggaaatgngctgttccttttcaaaaattaaaagctgttcttattctccacatccacatgatctctacaatctccaaacaaacttttttctttcactccttacacaaaaaaaaaaagctgttcttttaaataattaaaaactgtttctttgtttttttattattgttttgtaatattgatacaaattttttgtttttataacactaatgcatatgtttgatattctcaaaatattttaatatattttataaattaatatttaattaactctgcataacagtggcataattctagtatatatataattaaagaggtttaagaaataaggaaaatttacgtactcatcaaattattttactacagacaaaattttgccaaaaaacgaatttgcaaaaggaagtatatttcgaacccctaa

SEQ ID NO: 150384 - DNA, 906 bp, Arabidopsis thaliana landsberg
agaactacaatcataatttgtgatctctctccaattttcatcttttggtcgaaattcccaattccctgagtcaagaaccctaatttcaacatggtaagatttgttcgatatcgcttgtttttttttatggatctagcttccgtttgtctatcttgcggcttccatttcagattgtttgaagaaattcctgaattttgtaggtttgcgttatgtgtttggtgcctctgttcctcgtcccgctcatcaatttaatgcctcgaatcatcgattatttcatggtaattgactcgtgctttcttaatattccttgaagttttgatttttccttggaattttgatgggaagaatgatcagatttcatgggaaattaaatgtcaggatccaaatttcgaattatagggttctaaagagtgtggaattcgtttagtctcaaaggagatatctttatttgaaagaaatacaaaattagagattagaaagggaagaagatagtgaagatgataatcaggataagcgagagagcacatgatcataatctttgcttgtaaaagtgaaaaacgaagagctatatagcttttgttatttgcttgaggttggctcttggaaagttgaacatgttagcaatgtttagatcttagttctgttggtgtttcatatcgatttctttagactgtatcttttttaagtgaaaaaaaaaacagtgctttagtgaatcttgcaggtagtatttacttgtgaacatttgttaactcaagtactgtctgttcatgctaaaaaataaactaggctaaattgtacgcgtggctcggatgggagtacaggaagccagcgagagttcctccagcttgtcctttcaagccagttgctaaaaacgacaacgccaccaaagtaagtgaaaagacttta

SEQ ID NO: 150385 - DNA, 305 bp, Arabidopsis thaliana landsberg
  unsure (1)..(305): unsure at all n locations
aagataatactcttaatttataatctaaggagtaaggatacaaaacacaaggtgtaaactgtggtgaacctgtttgggttctgatccgaactagtacaacaatagtctatatcttgaaatctttccaaaaatggtttcttaaataaaatggtctttgaatagccaatctaaatccaatagctctgttaagatatatccatagagcccctcctacgaatcacactgagacctctccagagagttttacttctttggtatccgaccataatgcctctggcgtattctaaatgccggntttcgtagca

SEQ ID NO: 150386 - DNA, 565 bp, Arabidopsis thaliana landsberg
tctatgcgctcccttggtgaaacccaaacaaaagctgagctccaggacatgatcaacgaagcggatgcagatggtgacggaaccatcagtttctctgagtttgtgtgtgtaatgactggtaaaatgattgacactcagtctaagaaagaaacgtacagagttgtgaatcaaggtcagggtcaagtgcagcgtcacactagaaatgacagagctggtggcaccaattgggagagggacatagcggtcggggttgccagcaatatcatcgcttcgccaatttccgacttcatgaaagataggtttaaagatttgttcgaagcgctgttatcttgaaatgacacgtcagtaactttatgccaatagggtctgacaattatgttagatctctctcaaaaggcgtttcatctaatgacaataatttctatgtaataaatttattgcatgtgttagtgtgttaccatcttcagttgtgtgcaatttattaaaatgagtttgtaatatggtttcagtatcgaatataattggggtattaatgtatcttttgagaaaaacattgaaacgtagc

SEQ ID NO: 150387 - DNA, 582 bp, Arabidopsis thaliana landsberg
tcttatatatacaagtgatttttcctatctcctctgttctttcctcttgctcctcgtaagctctctttctccacgatctctccccctcaatgtatattaatctaatcatacaaacatacatgcgtagctgtgatgaatatagaacgagatttaagatgaaatatctttgattaactatatatgttttccacaaagaaattacgaatatcttcttaataaaattaaataaaaagaaaaataaattaatgttaggtgaaccacatttttagtgagatattgttataacgattcactttgtaacattttcagaaaattatcgaataattatcaattaaaaaaaaaaggttaaaataacactataagattttatcattttgatttacatttttattagtaaaaggaattgaccaaagttttaactttacatttgttatttgtgtaggaagaacagctgtttcgtcgtgctcttctccctttgggactgattcatcatttattttatgttatgagcaattgtattctcattgttgtatttgcaccactgtaccctttctgctgatatcaagaaaaaataagttggaa

SEQ ID NO: 150388 - DNA, 459 bp, Arabidopsis thaliana landsberg
ccctcttactcatttttgctctcgcggacttgttttacagcctctgtttcctggcgaaagtggagtcgatcaacttgttgaaatcataaaggtagtatttttgctatcaattcttttagggttagttgtatttacaaagaaaatgacatctttagagctggcactgactaatagtttctcactgctgattatatttttttcataaaactttaccaccatttttgtagtaggactcgtacattctctcttcatggttttttaattgtcatgcaggttttgggtacaccaacaagggaggagatcaaatgcatgaatccaaactacacagaatttaaatttcctcagataaaacctcatccttggcacaaggtataccgctagtagtatcaattatcacctaatagggttctcttaatcgatatatgaccaagcttgtctcggtttagtgaggttgattga

SEQ ID NO: 150389 - DNA, 458 bp, Arabidopsis thaliana landsberg
ttatactgatgaagctcattttgctagtttaaagttttcaacttttcaccaaaggtaattaagcatttaactacataaatcaaacccagtagtatactaaaagacattagacaaatgagagagacagcttcgattttcagacagctttaggttggatttgttcgaagtcgaaaacctcaaacatgagccgccgaacatcgggtttcccgtagatggtgtaggcgaggccgtgaatggcttgttggacagcggttgtcgccggattcctaagtctccggttatgttcataccgatcatgaacctcctctgagtatattataaagttgtgaagacgtttttctctaagataccggccgcagaatttgttcattaatagacgtctatgcttctcttgcaaccacttccctggtgcgtccaagtgcttcattaacaaacgttcagccattgctatgtcctgc

SEQ ID NO: 150390 - DNA, 452 bp, Arabidopsis thaliana landsberg
ttttcttctcctctctctcaatttcttttgtcggttttaaattcatttcatttttttataaattcgctaccgtttttttctgtcaccggagctccttcttccaggtaacaaaaaaaatacttagatcacttgatgattgagctaagtttcgatatctctgttttgattagatctttgattccaagttcctagttcttgctaactcttcgatccggtgcagtagcccatcttttgtttgtttgtagagttttataggctaaaaactcgggttgtgttcttaagtttttttttttctactatgctcttaagtggttccggtgattgtttagctgtatttatcaatggtatgtttaatttctataagaatctgctcatgttacttaatcatagctatttttggcagatttgtaattcatgtacttggatctttgctacgctcggatataatcctt

SEQ ID NO: 150391 - DNA, 150 bp, Arabidopsis thaliana landsberg
aagaaccgaactcactcactcatcaaatcctataacaaattttaatttttcttaactactccattattaccggccaagatcaaatacttgtcttttctagtgagacttgtgcagtcgaaatccaacgccttcccaatatcactctgaaca

SEQ ID NO: 150392 - DNA, 172 bp, Arabidopsis thaliana landsberg
tatcaagcaattttttattttagtgaaatttccttctgatgaacaaaacctttgtacatgtcatttgatcaatacaaaggctcatggtttgaggggaaaaaagaaagaaagaagccgatcgtaatatcgatactagtacaataaaacggaaaatgccccaccaataccccaa

SEQ ID NO: 150393 - DNA, 80 bp, Arabidopsis thaliana landsberg
tagtttcacttcctctttctctcccatttgtttttttgtgtatagacgtttttttttgtaatttggtttctaatgaatcg

SEQ ID NO: 150394 - DNA, 460 bp, Arabidopsis thaliana landsberg
acgatcctttattgaaggaaacaaagtctctaggattattattcgtttctcagaactctgatccttcgacaaaggaaacatagtccattggaaggtcatcaacatcacaaaattcagagtcctcgatgaaggaatcaaagcctctcgggaggttgtcagtttctcaaaattcagacgtttttaaagagtcaaggacgttttcatgtatgcctgcctctaatatttttctcttttcttcttacctaatcttagccctgattaaatgatatgccatttctggttttgtctgctgtttgaagccacaggaagtttccacggcactcctcatagggtcagttcgaccaatgtatcaaaagccacttcgggtgtttcaacagccgtctctaatgctgcaacgtcaaggaggaattttacaaaagctaacccaaaggcgaatcctgtcaataaggcagcagatttt

SEQ ID NO: 150395 - DNA, 1521 bp, Arabidopsis thaliana landsberg
  unsure (1)..(1521): unsure at all n locations
tgtatttaaaacccattatacaaaataataaactccagtaaagtgaagagttacaagtagaagaaaaaaaaaagacatctcgtacaaagtcagaattgagagagccctaaacacaaggaaaaaaacaagaacaacaagaaaaagtccactttgtttggttttagacaaaaacagtaacttacttttttggtcaaactctgtagaaagaatcaatctcccttgtaaatctcaccctcctgtcaccatcttccctccgtcactttcccaatttaatttataatcagaaaccctacatatacacctaggtttagggtttcgctttttcagagaaaaatagtttctttttcttcaagttaaaaaaaaaaattttagtaatctggtacgctacagtgcaccgaaatcccatagatgtataatactctgagccgttgatgaagctgacgcaaccgccacatgtctatcatcggcaacaatggcgtcaacttctcctactctctccctaatactgtacagatactctcctctctctacctcccacacgcgcattataccacctgcgcacattagcgcgtgcagtctattaacacaacccattactcttctctgcgccgctccactaacacggaactcacacaccgtttgttgcgtgttcacccttcgcacgctagcgtttcctctactgtccaatctaacgtacgcttcgtcgttggcatcgaagcctgtcactattagtcctctacgttgctcttcgtcttctccgatgatcactccttggtttcttagatcgatcaccatgattctccatctcgtgcatgctaccgccgtctcgttaccggagattctgagacggccaagggacgttgttagctctgttaacgtgtgccatcccatgacagcttcagggtcggtgagtgtaccaccgacgaatgttgtctcttcgctgttacagtcccatatgtgaaaggcacgacctggcacacccgcgaaaagaccgacccaccaacgtccacagccagtgaaatctaccaacgcaccgtcgttaactatatctcctgcgtaagccgtgcgtgtgtgaccaaccaccgtctatttccgccacgtggatgtctccgtccatcgtagcgaacgtgagccttgagtcggagatannnnnnnnnnnnnnnnnnnnnnnnnnnnnnccaaagcggtcacgtagaggtggccgtaaggtcctgacgtggagtcggttgtttaaaagaaaaagccggacggttccgtcggcgaaccctgcggctaagtagaggtctgagagggtgagacaacggcaagagagactatcaggctcgtccacatcagacgggtcaaattggagagtgaagtaggtgtgagtacgcgtccggaagtttctagccgtccgatgacggtagatgaactcgtcccgccacgtgtcgtgcatcaaatgtgttcttgcccaaacttggcgagatagtagttgccatagatggtcggagcgagagacagctagccacgtggtgcaaacct

SEQ ID NO: 150396 - DNA, 183 bp, Arabidopsis thaliana landsberg; identical to SEQ ID NO: 57154

SEQ ID NO: 150397 - DNA, 405 bp, Arabidopsis thaliana landsberg
gaagaagtatattagccctgggacgagctaacatcgacaatgctacatcgatcgcttgcgtgcaacccgatgtgataaacacatcatctagtgacaatttgtatggaagatcacgcgatagatactctgctattgccctgtttttaccattacacaaaagtgtgagacttgatttgcaagttaagtctcccatagaaattaaaaaatgaaacattccgttgcaatcagaagttcaaaacaacctaattctacaatcatcctaactaaaaattcggtttagtcatccaatcggttatttctgattccggttgagataaaccaacttttacccagaaaaaagggaaaagacgaaagtgacaaacgagcttggggaagaccgacggtaggagagtaaccatggaacct

SEQ ID NO: 150398 - DNA, 330 bp, Arabidopsis thaliana landsberg
ctttaaatcttttattcgtttaattgacttttaggtatttgatattcaataggccggaaaatttttaaaccaaattctatatatataaaagtttatttttttttcataaatttacatcatcatccatattcaactttatcatcatcattaatattatgttgttgtggttaaccatctgaattattgacctactttcgtattaatcaattttaattttgtacttatcctttatcttttaagtatcattccacttatgtatatatgttatccttagaagtccattgactagctttatatcaaattgatactttccacttatgtatatatgtt

SEQ ID NO: 150399 - DNA, 509 bp, Arabidopsis thaliana landsberg
gtttattcttgggtctctctctatctctcttatccagatttatcatcgtcattacatataaacatcaaacttaacttttcaatattctcattcactttttcctcttgtgctctaattcttatccggatccgatttctctcatacaaagattctgtttttcttcttgggttattgttcttgctctgtttccgtatctcaaagtttcagctgctgaattgaatttgcattgatcgtagatgagaccaatcattaggttatcatctctcagtagaattagatgggctctaaggaacaatcaagaacgttattcttcaactttctactccaaaagccgcaaacttttgatcggtgtcaatcaaaatcaagctctgctgaatacaaacactgataattcaagtttgtattcaaggtcaagtatctttagaggcttatcaccagaagcagtagaagcagctgatcctgctaaaactagggtcaccgtctcaggttttgtttctctttgcgaagta

SEQ ID NO: 150400 - DNA, 404 bp, Arabidopsis thaliana landsberg
ttcgcatgttgctgatggttacaaaggggcacaatctaacggtaacttgcacactcacaatgaactctgctatgaagaatctgaaattacagttttactgaaagatttgaatctgaattacctatttacgtgtcttgaaaacaggaccatcactttcagcaggagatacagagaaaggacacactaacagcacatcatgagatctttgtatgcaaattgcttaccatcataagctaattcttgtatgctcttgcttatcatcataagctaatctcagcatttcctcaataagttgtctaataaaagattttgttcactggaagttttcagtctcaactcaagagtctcagacaaacataaaagtgtaaatgattcttgcttgaaaatgaaatctattatctcaa

SEQ ID NO: 150401 - DNA, 315 bp, Arabidopsis thaliana landsberg
acaaactctagatgtcactgcgaaatgtgatgacagcatctttgttagtggatgtgaaccattttttcaagacttacggatagagagataattaaagaaaatatcaccttttatggcgtaaaattatgatctcgtttgcaagatatattaaaagcttgtcctacttcaaaactccatgaatcttgtcttttgtttcgttatctaaggatcagtgtttcaaatttttccatgaacaagaacccacgattaatcaagaaaatagctaggtctgccgaatgatataactaaaaaaaaagcaaaaaacaaaaacaaaat

SEQ ID NO: 150402 - DNA, 196 bp, Arabidopsis thaliana landsberg
ccttgcatggttcagacgagtgaaagtagtaattaagaagatgattagttattttgtataagtaattatattaagagagttttgattggctttggagtattttgtgtggtgagaagagtgaaaaagtctatgtttttcgagtaaatgactttttttgtaagtgtaaatatgaaatgatgtgttttggtttaaactt

SEQ ID NO: 150403 - DNA, 201 bp, Arabidopsis thaliana landsberg
aaactaatcaaacctcgtctttgagcatgtgaagtaatgtagttttgccagcattatcgagaccgagaaacaagatctttgcttctttttgccataaccctaacgaagctaagattccgtagaaccaatcgaacaagaacatggtttcgtgatttcgtcttcttcttcttcactgatctcgatcttcttcgtttcgattcg

SEQ ID NO: 150404 - DNA, 323 bp, Arabidopsis thaliana landsberg
tcgacatacttgggtatattaaacaaaacaacataaaacattctgtaaacggtacgcaaacttttaacatctattatcacattcacagacagtcaaagatggctaaaacgctcttatggctcgacaatgatcttcccagtagcatggccatcgatacttttggcccaagcatcctccgctttgctcaaaggatgctttgagtcaatcactgtcttcactttcccttctttcactagattcaccataaactccaaattctcagcttttgggatcaacaagagtggcactaactgcttctttgacatggttattttcttaaccgc

SEQ ID NO: 150405 - DNA, 124 bp, Arabidopsis thaliana landsberg
agaagcaatatgcaagaggagattccggagaaatagcaaaggaggtggcagatcggatatggtgaaaccgtttaatatcataaatttttcgacacaagacaaaaacagtagttgttgttgtttc

SEQ ID NO: 150406 - DNA, 474 bp, Arabidopsis thaliana landsberg
ttgatattaatctataaattgttttatgattccaaatattaaagtcataacacaacgacgtaagcaaccaatgtataattttgtgcagtaattactaaaacaaagaacagtgccatacggtaaagccaaaaaagaccgtagaattcaacatcacaacacgaaaccacaacacaataaatggattccatcatctgattgatttaccattccctgtttttatgtacacatccttcctgcttttgattatctttcttcaatcgctttcaaagtcgtcttcatctccaaatgagaacacagatgcatcagccgccataaccttgaactcactctctgagcttgaagaagcattgaccccagccccagagggtttttctgttgcttcacccttgctcacagttactccttgcaccggctgtgatgatcctttgtttccagaaatagacactgtctctgtcgctttagtcagaacagcgg

SEQ ID NO: 150407 - DNA, 561 bp, Arabidopsis thaliana landsberg
aagaagaagaaataaaaaaagaaaacgaacaacgaagaagacgaagacgaagaaacaaagataaaggcttcagatttagctgcaggggaggtggcggaacaaaaccctaatcctaattttccccgaatatgccatttttgaggttattttttctcatcatcagaaataaaaaaaaagtgtgttttttcgattcagtgattcaatggatttgggtttttttgaaaattgcaggattgtgagacttctcttacctggaatcagggttttgattagaagatctctaatttggttgttgtagatgcatctccgtgaaatcattccctcttggatctaccagttatttggttgcatggggtaagtgaggatctttctcttcaaattcattgtttttgaaattcaaagtttcaatctttatttgaaattccttgtctgtgactgtgttgtgtgttacctgtgtatgattgagagaaatgaagaagaaactggagtgtaaaaactttgactttagttttgataagttttgttacttaaattgtagattatgttttcgtacctattgct

SEQ ID NO: 150408 - DNA, 441 bp, Arabidopsis thaliana landsberg
ttgtaaaaaataagcaaatcgttccataataaaacaaagaaatgtggtgatcgcattatatatacacagagtttaaccaaccaaaacattacaaaaacattaaagacaaaatactgtaaaataaaaaacaatcttcaaaacatagatatgctcatgcctagacagagggaacctcaaaaaaaaaattatttagcgtagtagccgccgattcacagccggaggtggcggtggctgagcttgaaccggagtagcttgacgaggtgcacctccacctcccccaccattactctcccaaggcttaacagtaaacaccacaattaaaaccacaataatgagcaatagcaaaatggcaaagcaagtccacttccgtgtgttcttctgataaaaccgtgccttaacaagccggtccgcaccagaccgaacaagcgagttagctcgttt

SEQ ID NO: 150409 - DNA, 60 bp, Arabidopsis thaliana landsberg
tgtattattcttgtgatgagatattttcatattcaagattggaacaaagtgtttgtattt

SEQ ID NO: 150410 - DNA, 356 bp, Arabidopsis thaliana landsberg
gactaggttagcttgagagtctctgttgcggtggcacttagatttggttaatgaacttgttgtctagggttaatttattgagcatgtcaatcacctgtaaactgaggaaacgaaactactcaattaccccatccttaggaattctttgtctaattgattttattgattactctactgctgtgtactgcatcctgtcatctgttgcttagtttctgcaattctttactgttactcgacctgatactcgaccacccagttgtctggcaacagactgtgcagtcgagtatccctgtttcattttctgtctgttactcgacctgtcactcgacctcacccagtgctctgcaaagagctgt

SEQ ID NO: 150411 - DNA, 229 bp, Arabidopsis thaliana landsberg
gagaaattccaggagtgagtttgacaatcggagagaaatggggtcgacagaaaaagagcagacgacgcaacatcacccgcctcacatcagcagtctcgtcgtacgtccctccggaagcaacgacagagaagacggtcgcaacgccgccggagactatgagcccggagaagtctctcgtgaccggccttcgtttaatcgctcggatcggtataagggtgacaatggtggt

SEQ ID NO: 150412 - DNA, 614 bp, Arabidopsis thaliana landsberg
gcagtcaaaaatcatctcaagatcagagcccagatcccaaaccgacgacaccaaccgggacgtcgtcgacaactcctgccggagatagtagtacgacgtggtcaccggtagatacatcaatgatatacgaaggagctttggatcaaaacaaaggatcaccgtccacgtgtcatctttcgttatgtggaatcacagtcacacttgcgctggccttttgtcggatgtggcggctcttttgacacctaactttgtctcccgcgtaaaacactgaagaatgtgggccctcactgacgaaagccttatctcgttccggcccatgtgaaccggttattcccgaacgacgtcggattgggtcagagttgagaaaaaaagttaacaacaccctacagttacgaaaatatccttcattcatgttcatgggagaattcttaatttgggtgaggaacacgtgggcaagaaagtgggctgctggtggagttcataaaagatgggaatgtttaattgtaaggtcagaatatttatttgatttataatgtaactaggattagaagaatattatgtacactatataaagcagtaatctatttagtttaaagctatatattggaaactat

SEQ ID NO: 150413 - DNA, 1952 bp, Arabidopsis thaliana landsberg
gatccagttgctgtgggaagcgataatggaggcgacgaagagagaaagacggagagaagatgacgacggcgaaaaagcttcaccggaatcactcgttcttccaccagagatcattacagaaattcttctccgattaccagccaaatcgatcgggcgattcaggtgcgtatcaaagctcttttgcactttatcgtcggatccagggttcgcgaagattcacctcgatctgatccttcgaaacgaatccgtaagatcgctccaccgtaagctcattgtgtcttcacataatctgtactcgttagatttcaattcgatcggtgacggaattagggatttagcggctgtggaacacaattatcctcttaaagacgatccaagcattttctctgagatgattaggaattacgtgggggaccatctgtacgatgatcgtcgcgtgatgcttaagctgaatgcgaaatcgtatcgaagaaactgggttgagatcgttggatcttccaatggtttagtgtgtatctctcctggtgaaggagctgttttcttgtataatccaactaccggagattccaagagattacctgaaaattttcgtcccaaatctgtagaatacgaaagagataatttccaaacttatggatttggtttcgatggtctcactgatgattacaaattggtgaagcttgttgctaccagtgaagatattctcgatgctagtgtctattccttgaaggctgactcatggagacggatctgcaatttgaattatgagcacaacgatggctcctacacgtccggtgtgcatttcaacggtgcgattcactgggtgttcacagagagtaggcacaaccaaagagtggttgtagcatttgatattcaaaccgaggagtttcgagagatgccagtgcctgatgaagctgaagattgttcccataggtttagcaactttgtggtcggaagtctcaatggacgtctctgtgtggtcaatagttgctacgatgtgcatgatgatatatgggtgatgagtgagtacggtgaagctaaatcctggagcagaattcgaatcaacttgttgtataggtcgatgaaaccgctctgttcgactaagaacgatgaagaggttcttctggagcttgatggagacctggtgttgtacaactttgaaaccaatgcatcgagtaatctaggaatttgtggggttaagctcagtgacgggttcgaggcaaatacatacgtagagagcctcatatcacccaactcttatggtatagagagctgaggaagtctgctttttgctaagatataataaaccaacattcggattaaaaatgttttaaaaacataatcatgtaatatgtatcatgtaattaacaacgaatggtcaatgggtattttaagtttctttctccttaattctctcttcccgctctaacttttcgtcacttcctttttgtttgttaaagattacatcaaattattcataataatgatacctgaggaactgcaagtatttgtctgtaaagaaaaagttaaatacgagtgtagagaagaaggagaacttgataacgattttacatgacatcctaagtttctactagattcatatgaacttccaaaatgtcctgaatcttccaaaaattctaacttggtaggttcttcactttcttaagatatttaggaaacaaacatgaaaataacagagaacatacatgtcggtcactaaacccaccgatttatcaatggatacaaccggcctcaccacatcgacgacctccaccaccgccttttctgatgactttaagttaacaaaagggttaggatttacatcggcggccacagattccatcttcactgatgaggtaaggcttcatcttcttctgatttctcaatctgtaacagaagaaagtgaactcttgaagaaaataaagaaatcaattgatgcttttctggtttca

SEQ ID NO: 150414 - DNA, 303 bp, Arabidopsis thaliana landsberg
caatttagatgccaaaaccacagacctctataactttctttaatttacgaaactgtttctttcaatagataagtgaatatgcaaagaaagaaaaggaaaaaagatacaaagatcacttcataacataagtgtgaagaagtttcattttgtgaaatgttcaggtgagcagctaatcatagaacggtagcataaatggaatctcccatctccttgccattcctgatataatgtaacaaagaaaaaggataacaagaccgctaatacccgagttctcgacctgcagatggatgaagcaaatgagat

SEQ ID NO: 150415 - DNA, 270 bp, Arabidopsis thaliana landsberg
cccgagtctgtttctttaccttgtgtcaaagttatgtatctagatatggttaagtttgccaacgatttggctttcgaaaagctcatctctggctgcccagctctcgaaagcttaactataaagaggagtgcttgtgacaatgtagattatttacgtgtgtgctctcagtctctattgagtttcaccctcgttggccacttgtacgaggatatggttaaagagcaagtagttgcaatagatgctcccaggcttgaagatctcaagctttat

SEQ ID NO: 150416 - DNA, 1063 bp, Arabidopsis thaliana landsberg
ttcgctctgagcgaccaaaaccctaattctatcaattcgaaatcttcaatttcacatgggtgaacattcaccttctcaaccatcatctcatactcttcctccaaaccaaccggaatcacccaatcacgaaacccctaatccaattccaccggaaaccaacgatgacgactccgcctcatccgccggagtttctggctcaatcgtctcatcaaccaccattgaagcaccacaagtcactgaattaggcaatgtatcgtctccaccttccaagatccctctccgtcctcgaaaaatcagaaaactttcacccgacgacgacgcttccgacggattcaatccggagcataacctttctcagatgacgacgacgaaaccggcaacgaagagtaaattatcacagtcacgcactgtaaccgtgccgagaatccaagcaaggtctctcacttgtgaaggcgagcttgaagcagctcttcaccatctccgaagtgttgatcctctgctcgcgtctttaatcgacattcatccaccaccaacgttcgagacttttcagactccgttcttggcgttgattcgaagcattctttatcagcaattagcagctaaagcaggtaattcaatctacacacgcttcgttgccttatgcggcggtgaaaacggcgtcgtgccagagaatgtattgcctttaacacctcaacagcttcgtcaaattggtgtttccgggcgtaaagcgagttaccttcatgatcttgctaggaaatatcaaaatgggatcttgtcggattctggaatagtgaatatggatgagaaatctttgttcacgatgttaacaatggtgaatgggattgggtcatggtcggtccatatgtttatgataaactctcttcatagacctgatgtgttaccagttaatgatcttggtgtaaggaagggtgtgcagatgcttaatggtatggaggatttgcctcgtccatccaaaatggagcagctttgcgagaaatggcgtccgtatagatcagtagcgtcttggtacttgtggcggctcattgaatctaaaaatacacca

SEQ ID NO: 150417 - DNA, 612 bp, Arabidopsis thaliana landsberg
taaaatattaatctgtttttctttctttctaaaaaaatacatacacgttaacaactacatgcatatctggtccctgaaacttaataaacgaccaaaatgccctttggttgcaagtaaaaagacttaggacctaggacgaagagcgtcaaaagtcaagccgtgagataacctcgtcgcaggagcccacgcattgaccggcaaagaacggtggtgcgctgacgtagcagcctgaggtggtggtggcgggaccgacacgtgttcacatgaagggcacatggtcaaagtagtgggtgggctcatgtgcatgtagaactgaggagagagcttaagtgctctcaactccgttacttctttttgtagccgacggttttcttccgttagattctcgcagcatctccgtaagaactcacagtctacctccgtttgcttcagctttgttctgttaacacatttaccaaaatacccttataagtaaaattgataaatcaggcaaatagagagatcttttgtttgtgtgtttttaatttaccttgctcgtctgttctgaaaccaaacttccacttgtcttgctcttaaccctaattgtttagccaatgcttgcttctgcttctg

SEQ ID NO: 150418 - DNA, 304 bp, Arabidopsis thaliana landsberg
tatttttgaattatgtaaaggaaattaatctaaaataccagagaactaggatacttataacatcacctttctttccttcaaatttttggaagaatggtcataacttaagataagaattgcgttcatagaatatgaatgcttaataattcatatgagaaaatgatgtatttcaaatgccatcgttttgctttgccttggattccttgtaaacgagagaatctgaataagcgatgttcacacgtcttttgcctttacggtgatgcctaaacttatttatatcaacaaacctctttccttctttggt

SEQ ID NO: 150419 - DNA, 161 bp, Arabidopsis thaliana landsberg
aatcagattttcacaggttgtgaatcaaagtaaattggatgaatgatgcataatgtaactattacaggtgtatgaagcagcttattttggtcaaatgtaaaaaaaaaaaaaagtggtaaaaatagtagtcacgaggaatgagacttgagattttgaaaaat

SEQ ID NO: 150420 - DNA, 209 bp, Arabidopsis thaliana landsberg
atttttgtgagtgaagagatttagagtaatcatgggtttaactcgaaatttcattttatggattcttttgtcatctctctttacggcgattcaactaacgtcgtttcaacgcaacactccaccaccacgctctaaagacgcccatctctgcaacggcgtggtcgttttctcacttacttaaccgggaccaagattaaaccaaacgacac

SEQ ID NO: 150421 - DNA, 556 bp, Arabidopsis thaliana landsberg
tttggcatgcgaaataatttattgataatccgtactgaattaatatacatatataaaaattgttcaaaaaccctaatcaagtattagaaaactctcacactcaatagtaatgaggaaaacatttcacaagacaactacttcaagcaaaaatctctagaataataaaaccaaagccttgcatgcaaaaaccacaaactaaaacatatcgattatcaggttcttaattacttactcaatacattaatcagaaaaataaacaagatgaaatccgtagaatattagaatttagaaataaataaaaatatatgaaaaagaagcaatgcaaaaaaaacacgcttgttaagaacaaacaaacaaacgaaaggacaaaaaaagaaaaataaatctcacagaatatatttgtttgtgtatgtttgcctaggaatgatgactggtgcttccatcttcttgatggttgtgatgatgatctccgtcacggttttgctggttgttgttatggttccccgtctccgccaccggtcggtaagcagcattcaacgccgctaaaactccataa

SEQ ID NO: 150422 - DNA, 258 bp, Arabidopsis thaliana landsberg
aacgagcgatctttgtaatgcgacctttgttcaagcaactgagagaatactacagaaaccttcaacttaagttgaatccacccgtaggagcattaccactttggtttccgaattggaaaccggaagactgaacattctcaggagcatccacaccgctaatatcttcctcctcgtcatctgcagcccaatacgactccaggattttgactgctttctcataaatctcattattatcgtgactctgaagattctcaatct

SEQ ID NO: 150423 - DNA, 364 bp, Arabidopsis thaliana landsberg
agaagcaaaagaaaaaaaagctattgtttgaaagaagaagaagttaactatggcaaaggatgtggaagccgttcccggagaaggatttcagacaagagactatcaagatccgccaccagctccgtttattgatggagcggagctaaagaagtggtctttctacagagcagttatcgccgagttcgtagccactctcctcttcttatacatcaccgttttgacagtcatcggttacaagattcagtccgatactgatgccggtggcgtagattgcggcggagttggaatcctcggtatcgcttgggcctttggtggtatgatcttcatcctcgtctactgcaccgccggtatctctggtatgatc

SEQ ID NO: 150424 - DNA, 417 bp, Arabidopsis thaliana landsberg
taacccaaagattcaatatgcataacaataatcgatcatcccaaacaaatatgtctttagaaagtagagatctcaacttctcaacttatcacataaaaaaagtctcctgaaaacatgcattcttaaacaaagtcttccactagtagcatgttgttctctagatagatagatatttcttgcttaatcgatggataggcgtggaacacaaaagtccacaagcagcacagatggccctacgcccgccaaataaaacatcctgctcaaagccactttgacaactacaaacttcttcttgtaccataccttcactattgccatggactttccttggatcttctctgttccaactactatcccatctctaagtccaacgtagcgcgcatactcacctgacgaggcaagtaaattgcctagcac

SEQ ID NO: 150425 - DNA, 472 bp, Arabidopsis thaliana landsberg
gaataacaatttttttactccaagcaaagaagaaagatagaaagaaagaaagaagtcaaaggttttgggacaagatgaagttaggaaagtgagtaaacgaacaagcattgtttttttctttgtacaaagatccgatctttctcggagaaatttcagtgattagattcaaactaaattcccaaaagaagttgaaagaagatgaaagagagagaagggtcgtcgatgtctggtctacttgtttgttagtagagctttattcttgtctggattggtgcacggcaaatcggacacatttgaagatctggtccacactcgcaacaagtcttgtatcaaaaacagaagccaagttagtttgatgttttgatcgattaagtagatgcagaagatggaaattgtgtttgtttcgattttacctgatggccacaaccaaacgccatgtttttcgggttgctcagacatatcggacatagct

SEQ ID NO: 150426 - DNA, 491 bp, Arabidopsis thaliana landsberg
gtcagacaaaatgcagtcgtcaacgtatgcggttaaaggaaacgctgcgtttgcgtttcagagacggaccttctcttctgacagatcggcgacttctaccggaattcgcttcgctggtactaagagcttagccaccaccggatcactctactgttctgattctaaagccatgggagcgacgcttgctcgtgctgatgacgggatccagagcgttatgagtttctcttctgtcaaagctcgatcggtcagagctcaagcctcctctggttcgtctcttccaatgctcttctatttttgtctatcattagatgctgtgattgcttacaagttcttaatacaatttgaagaatctaatgtatagtttgggatttggactaatcatctgatggtttgaggaatgaaatgtagatggagatgaagaagaagctatacctctgagatctgaagggaaaagctctggaacagttttgccttttgttggtgttgcttgt

SEQ ID NO: 150427 - DNA, 279 bp, Arabidopsis thaliana landsberg
aaataagtaagaagataaaaatggctcgagtctcttctcttctttctttctgcttaacacttttgatccttttccatggctacgcggctcaacagggtcagcagggtcagcagtttccgaacgagtgccagctcgaccagctcaatgcgctcgagccgtcacacgtactgaagagcgaggctggtcgcatcgaggtgtgggaccaccacgctcctcagctccgttgctcaggtgtctcctttgcacgttacatcatcgagtctaagggtctctacttgc

SEQ ID NO: 150428 - DNA, 195 bp, Arabidopsis thaliana landsberg
  unsure (1)..(195): unsure at all n locations
ctttccattttcttaccacgaagaaagaagcagaaaaaaagtaaccaaagcctaaaaaaaanagtcagcatcttcggagttggtgggagagagacagagatggagaggagaaagattgtgatgtgtggtgttttatttcttcttggtttattatcagctgttactgccttcgtcgctgaagctactcgaatcaag

SEQ ID NO: 150429 - DNA, 100 bp, Arabidopsis thaliana landsberg
cgttcaaatctttgtctggtctggactgtttcaatgtttacagacatctgctaatctgttaaaaaattccattcaatggttgatttgttcttttcgtttc

SEQ ID NO: 150430 - DNA, 426 bp, Arabidopsis thaliana landsberg
tggttacggagcaggaggtggagctggagagggatacggtggtggtgctggagctggtggacatggtggtgttggaggaggcggtggtggttccggaggtggaggaggaggaggtggaggttttgctgctgcttctggatacggtcacggtgggggtgctgttggtggtgaaggaatgctttgctattgtccatgaaaaattatttatatggagtgtaacggcaattgagtgaagtgtcatatctcgtaagggactatatagtttcacgatttatatgtggcaataaatagagtaatccttcgtataataagccgtagaaaggcggctattgttgaagtttttaaattgtaccacgaccaatattgttgtaagctactactacgtgtgtatcaagtttttataaatggaaatcatagttgttccta

SEQ ID NO: 150431 - DNA, 363 bp, Arabidopsis thaliana landsberg
gttctcctcctccctttttttcttttcaggattcttcttttctatgttttatctttcataatagatctgataattttgatttttcactatatatattatggttaatactagtagctttttcatttcaagttttatccttccattggttctttctgagtcaaattgtctcctgtttcgaaccatatataagttttcaatggttttgtattaactcaagtattcaacattatgtctctctttttcttgcttggatctctaatgctgttcatattttaaagcataggtttaggttagatgcatgtaactgccaattaaaagaaggtcaagagttttttgattgtatgaatatatgagttagtcaaa

SEQ ID NO: 150432 - DNA, 63 bp, Arabidopsis thaliana landsberg
agcaacaactctttatctgaaagaaacattattctctccacattagcctcacaaacaaagctt

SEQ ID NO: 150433 - DNA, 372 bp, Arabidopsis thaliana landsberg
attttggcaacactctgtggcaaagcttgcataacattatggcccaacatagacgatcatgtgcaaaatttgaatacaaagaccacaatacttcacacacaaatccaaccttaattgattcggattttttttttaatacaaacaaagagagacaatacaaacatctaaggattggatctgaaaggatttcgctggtttgatcttggatctacccttggcgacgatgcattgtatccatgcagcatttctctgatctttgagtacatcactgcttgtgacgcttcaccaccattcccaccactttcctgctcttttatcttttcaaacagatatctttctctgccccgctcgctcagcccagtttcaatagtt

SEQ ID NO: 150434 - DNA, 1691 bp, Arabidopsis thaliana landsberg
aacacattaatacatttccatacttggccttcactaagatcagtttttgcacttctctctttctctcgatcgctgcttcttcgtcgctcaatctcaagctccgttccgttagttcttcgtcggagagacggtaaggtttccttccgatttcatcattctcgttgatcatcttcttctctggtttttgtttttgtttcgaaactaggttcctcttcctcgagtttcctgatttttgtctttagaatctgctttagaaatcgaaatcgctagggctcgggaagatctatgtgatctgagtttactattggctaccggatcccgaggagtcgctcctcgtaaacgtcgtcgttttatttcgcccttttgttttaatactatcaggcctgtggtggcgtaactagatcacactgggggactaggacgatttggttttccggctagtcgaaagcgcgttgcccaaaaaattgtgtcggtcggatcgctgagaaaaaacgagcgcattaaggtaaaatatagtcacgtttgagtcttcgggcgagttcgtatcgtcagatttgagaacgcgtcgtcgacgagttagtgcggtggtttgtttatggtgacggaagacgagaatccggactcgaaagagtgtaacagagaaacttttctgattgttgactgtttggttagatttcgtcatgttcccaatgggagagcgggtttatgattgtcccaaatagagtatagatctgagtttgtttttcgctctagtgtcgacagtttcatacttgaatggttctgggctgatctttctcttattatttttttgttgaaataggggtggagagaatcctgctgcaagtggtagctgtttgatacttgagtcattttgtcacagcaacatgaatatgccgctgttggatattcaaccacgaacgttgcagtttgcaggtaagatataaggggactgattcttatcaattgtaaaatgatcatttttaagttccagtgagtagacactgtggtcccgttaatagtttcttatttttttgtaaaatgtggatttcatagcgagggtgtgttattccttaagcaaagtggccaacatgttccagttatgaataccgagttttctgaattctcactatttcgttagaattctatcatagtggtgctattgtttgtgggtctattctcctgtaagatgaattgatgtgatgttaatgtggctgttgtttggaggaatcttctaactctttcctgctactggatttgtatgtgctgacattctgtgatgtggtttcttacctctcatatcgattctgaggatctataataaaatatggaagttgtaaaaggaatatctttgccttggcattgttatccttgtaatactaactggtttcatcttttgtagttgacctgaagaagcaaacttcctgcgtggtacagctaaccaatactacccatcattatgttgcatttaaggtctaaagaagattcttctcaaactttttctctttctttctggcttcaggatttcgaatatcttataaaatttctgagaaaaagtattctttctgtatacaaacctaaactagatgtggtttttgacaggttaaaaccacatcaccaaagaagtactgtgttcgtccaaatgttggtgttgttgcacctaaatcaacctgtgaattcactggtatgcctac

SEQ ID NO: 150435 - DNA, 261 bp, Arabidopsis thaliana landsberg
agatcgatttcgactgtaagtgaactttgattgccgcgaagattactcatatcgccggacacaagtttttcagtgaattccattggcatagaactcgagagaaagagacacagagagagagagagatctaacaagagtcaaagtttctgactttttcgcattctttttgagatcgagttctgtctttgttggcgtgtgagatgaattcttaagaaggaagaagaagaagaaggaaagatgcgtagagagatctcgtttttg

SEQ ID NO: 150436 - DNA, 309 bp, Arabidopsis thaliana landsberg
actgtgaaacaaaacaagcaacgtttcgttgtctattatttagcaaccttttatttatacacacaaatgtaatacgaatgcaaagcagggagagaagtgacaaataatcaacttcatttacatctaaagttgaaatttctattcacttatccaaaagtactatgacaatatgacttatcggtgaaggtgtctggtgctgacaagttcgatgtaaaaaacgagagttccaagaggagaaccttctccattggtaagacgtgttgggttaaagatggtcgtgaagagtctctgtctatatatcaaagaact

SEQ ID NO: 150437 - DNA, 389 bp, Arabidopsis thaliana landsberg
tgcagtgattgcagcattccttctaaagctcaggctcgtcaaatttgagaggcctgaaagtgtttaatatcagatatgtagcagctacgtttaggaaacatacacatataaagtacaaggaaaacttcgataagcagaaaacaaaagaaatgtgtgaaaatgagtaaagtttaccgctgagatgcacaagcccacggttggatatctggtcacagaaattaaagtttaaagattccaggtttgtgcaaccttttaaagaaaccagtccagagtctgtgatatcagaccccgaaaaatcaacagaaagcaacgatgtactttgcgaggagatgacatccatccagtcatcattaactccagggtattcccccaagtaaagatcctgcttt

SEQ ID NO: 150438 - DNA, 231 bp, Arabidopsis thaliana landsberg
tccactcccttcaaaaaaagcctctctctctcctctcctatttatacctctctcgatctctctcgccggcgctgcaaatccctaggtttttcaatcacacccaaaacatttgtagagccccaagtactcaatttcgcttattgatagagagagagagagagagattgagaatcgcgatttgattttatcaatcgatgccgtgaaaatctcgtaatcagattcaaaattgag

SEQ ID NO: 150439 - DNA, 302 bp, Arabidopsis thaliana landsberg
acaatcccttcatctcgtggagaaccaccaaagaaacctttggtgccatctggtcccaaaactctgtcaaacgagacgaagactgttgtccaagttagaacattccaagatttgcttaaggatgagtatgatgctgatttatttgactactacgcttcatcacaactagtattggcttctttggatggtactgtgaaggaagtaggggttcctgcagtgtatacatcgttagacccttcgacagaccataagtacttgttggtgtcatcacttcacaggccatattccttcattgtaccttg

SEQ ID NO: 150440 - DNA, 775 bp, Arabidopsis thaliana landsberg
tcttccttgtcgctattgccttcgccgtcattttcacggcctccatcgtacatggtcgtcataatggtgcagaagatattgtgcattcatcctgcgaacacgcgagctatccatcactatgcgtccgtactctttcgtcatactccggtccaaccatcaccaaccgccgcgatctagctcaagccgccataaaaatcagcctctcccacgctcaaagcgccgcgaagaaactcgcggtggtgcgagactcggtggggaagaagaagcaagagaaagcggcgcttgtagactgtgtggagatgattggagactcggtggacgagctaagccgtacgctcggcgttttgaagcacctccgtgtctctggcggttcagctaaagagttccggtggcagatgagcaatgcacagacgtgggctagcgcggcacttacggatgacgacacgtgtctcgacgggtttcaagggatggacgacggtgaaatcaaaacggaggtgaagcagtggatgacgaaggtggccagggttacgagcaacgcgctttacatgatcaaccagctagatgagacacgtggcaaaccccacgacgtacatctttgatgttaatgcactagatcgttttaatggacggtctttattgtgtgtgttggtttttcgttcatgtgttttaagtgtgagattatctatcgctacgatatatagaaatgagtttttgattttggataatgtcgtttttcgtagttctgattatggtctaataaataacatgttatttt

SEQ ID NO: 150441 - DNA, 119 bp, Arabidopsis thaliana landsberg
cagacctgagaacaccaacactgcctaatcgcaaagattcatttctgactttcgttcttgcttcttgtctctcagttttggaaacagatatgagaaggtccgagattactttagttgtc

SEQ ID NO: 150442 - DNA, 513 bp, Arabidopsis thaliana landsberg
caaaacacaaactctctatactcacaacattgtttaactcatctttctaagttggtttcgattcaagaatatcacaatgactaatgttcgccttcctattctcgtctcctcggtcttgttccttgtctttatttcatcgtccctcttgttccctacacctagttttgctgctagagtaagtcattctctggtgcaagaagaggtcaaaaaggttccagaatacacagaacctgaggagccggaagttccagaagagccggagctgccctcaccggaggagcctgagattccagaagagcctgagattccagaagagcctgaggttcctggagaacccgaagttcctgaagagcccgaagaaccagaagagccagaagggtcaacatttgaatttccatcatggtttccgagctttcctattcccggtgttaatggcggtttgccaaagactgaaaagacaaaacctacatcaacagttgaaagagttaacgtttctaacaagaacccatagat

SEQ ID NO: 150443 - DNA, 349 bp, Arabidopsis thaliana landsberg
ccgtgagaatctgacatgttccatcaaattattcatgttggtgaaagtgacaaataactgactgttacaaagaacaacactaatatgatagtaatagataatggatttgagaatgaaatgattctaacaaaaaccactttatttcaggagtgataaaagtgaagaaacagtcactgtgacgactctgtaagcttatgcctttggaagatcaccagctgcttcaaagctcacaacagaatcatcaatggtttcttctaatggcctaaacttccaccccaagtttttcaacttctctgcacttagaggcctcacttccttctcttttacctccgtgaaactgccaataaac

SEQ ID NO: 150444 - DNA, 254 bp, Arabidopsis thaliana landsberg
tttgatctattctgtcatctgtatatataataaatatttatggacaaacactatttaaaacaagatccagtgtttggtgtcctaaaaagaacaacatccttttcaattaattcatttttgactcgttggagattctagaaccaagagacagttgagataatcgtgtaaaggtcaaatttagctctttacatattgatatgtattattattattttttgctaaaaaaaacatatagtaatatattttaaataaca

SEQ ID NO: 150445 - DNA, 211 bp, Arabidopsis thaliana landsberg
acgtatttggatttgtagttggccatgagatattcgtttccactccgcattaaccacataagtaatgaattattcttcttctcgtcatatgggctaatatcattcaaattcttgcgaatgtaagatgtatagaaaaaaccgcccactattgaattcatcaaaatctatgaaaatgattgtgccgcggaagttgaactgagtcattacaatt

SEQ ID NO: 150446 - DNA, 461 bp, Arabidopsis thaliana landsberg
cacagttccgtagcagagttttagttttagcagagttggtgaaatcaatgggccaccaaaacgccgccgtttcagagaatcaaaaccatgatgacggcgctgcgtcgtcgccgggattcaagctcgtcggattttccaagttcgtaagaaagaatccaaagtctgataaattcaaggttaagcgcttccatcacatcgagttctggtgcggcgacgcaaccaacgtcgctcgtcgcttctcctggggtctggggatgagattctccgccaaatccgatctttccaccggaaacatggttcacgcctcttacctactcacctccggtgacctccgattccttttcactgctccttactctccgtctctctccgccggagagattaaaccgacaaccacagcttctatcccaagtttcgatcacggctcttgtcgttccttcttctcttcacaggtctcggtg

SEQ ID NO: 150447 - DNA, 98 bp, Arabidopsis thaliana landsberg
aaaaaagtttccttttttagcgaatcctctgttttagaaataaaaaagttgtctcctttattaaagaccatcatgtcttccacttctttcaccgacct

SEQ ID NO: 150448 - DNA, 423 bp, Arabidopsis thaliana landsberg
ggaggatacagcgttaagcttatcggttgaagaagcctgaagtaaagagacaatcttgtctgcggtgtctgtgtctccgggagaactggcggcgacaaaactgaggatgacgttgattaacgctggcgagaagacgaggttcgaggttttcccggcggtgctagcgataacgtgctgagttaacctcagaatgatgtcgtttaggttcccaactgaccctttcaggttctccaggatgtcgtattgatcatttactgattctttcaggtccatctttctcacggcgaggataagttggatttttttggattctcttaaaccgacttctcttgttttcttttatgtttcgaacaagtaccagagatggtctcgacaacgagtacttgtagaaggatccagaagatccacaagttaatatgaaaa

SEQ ID NO: 150449 - DNA, 372 bp, Arabidopsis thaliana landsberg
gctgtacttacacaaaatctccaaataaactgttaacagtaattttaaatttcatgggccacaaacgctgttttgttcacgtcatcctgtcgaaattttttcttattcacgtgggtgggtctctacttgggcccaaatcctcgacaataactcacaaagtccataaaggttaggaaacatgtgggcgtttatcttctcgagccttttttggtaattcgcgcccattgagatattgtattagttcgtaattcaaaatgtcatcttctttttcaataacaagggaactctaaccgaagtacaaactaagttcagaatccatagtacagcccatcaagcattttcaccatttaatgtatgcaaattatctactta

SEQ ID NO: 150450 - DNA, 551 bp, Arabidopsis thaliana landsberg
taatggtccaagtgccaataacggagtccctgcggtaagtgttcttgttctcaccttcatcttcaaaaaaatcttccattgttggatcatgtgaaccaaactattgttatttggagatgatgctgatgttttgcgttttatctctgctcttcttaatgcagccttcgttccagccgagcgggcaagaaacaatgccatcaaacaacatactcttcattcagaatctcccacacgagacaacaagcatgatgctacagcttctcttcgaacagtaccttggattcaaagagataagaatgatcgacgcaaaaccaggaatcgcgtttgtagagtacgaagatgatgttcaagcttccatagctatgcaacctcttcaaggtttcaaaatcactccccagaatccaatggtcatctctttcgccaagaaatgataagagtcttgtttttgtttgtttgttgtcctttaagacgatagtactggaccaaccaaacctggtgtgtataaccaaccaacggttctattggttaacggattaatccggttttggttt

SEQ ID NO: 150451 - DNA, 308 bp, Arabidopsis thaliana landsberg
gttatattcattctctcttttctctttccatttcggctcccaccgacgtcatcaatctctaccggagacttccgccgcattctcacaccgatcttcttctctccttccgattccggattccaatttcgttccttttttgttttctctcaaaacccctaaattttcttcctttcttccatctggattctttgtgatccccaaatttcaagactttgatctgattccttctaagatttctccaaagcaaagatcttttttttgttctttggcatctctgtcttgttgatgggcacaactagggtctgctt

SEQ ID NO: 150452 - DNA, 368 bp, Arabidopsis thaliana landsberg
gaattttagtaacaaatcatattcataatacaataacgtaattagaagatttagtagtataatctagtctgttatagactgaaagcaaaaactaaagacgcataaaatttaacccatttgagacattaccatttaacaaaaacgaagtacccgtatcaaataaaaaaaatgagatgagtgcttctcaacaaagaacacagaaggatctgataatccaaagtcaggtatatctatatattgtatattgacctctgtgtatctatattctcatgcgaaagaaaaatgatacaatttcatccgcgactcaagggattatgcttaatgagcctctcctacaaaatggattcaacagagatggcgaaaacatg

SEQ ID NO: 150453 - DNA, 448 bp, Arabidopsis thaliana landsberg
gttccgcggcttcatagagatgattaaatccatatagcaatttcaaaaccacaactacatcagtgtctcagtaaaattcaactattcataaaaccattgaaaatggttaccctagatgtgtcaaaggtaaacaacacttgccaaaataaacttgggctttactagtagagatattcaacacatggaaacagatatcagacattagcaattaatattcgttgagtgtgatactctgagattcaaacttgggctcaaatttctgatcttacaaactagtttggatattatggacaaagagtgacattgtcagagacatatagaaactatcatacggaactatgaagagagacaagaaagacccacagatattaatgatgagcataagaggcagatatacaagattcattaacaataatcactctgttctgcaaaaatctttggtaacatt

SEQ ID NO: 150454 - DNA, 206 bp, Arabidopsis thaliana landsberg
gcttagggttgatgtttattttgattccaatcttgtttacactttataagcagcgaccacaaaacaacatatatcaaaaatcaaatcatgctagtacacacacattcacacggcatttaaggtcgtaaagtcccttacaaaataaccaaaaaacaaaacaataaaaaacagagaaagaacaaattaatcaattattgcgttagggt

SEQ ID NO: 150455 - DNA, 190 bp, Arabidopsis thaliana landsberg
ctcatgagaacagcaatcttttgtggaaatcttcttctaatgccatcagatcttggtctaattttttcttctcaccatctgtcatgaccaacttagcaggttccaccctcagcttgttatcgttcattgcagcttccttctttctcatcggtgctacttcgaaagggatttcagactccagagaagcaga

SEQ ID NO: 150456 - DNA, 59 bp, Arabidopsis thaliana landsberg
aagaatattggaaatttctgaagcttttctatagttgatctcgagccatgcctccaatg

SEQ ID NO: 150457 - DNA, 749 bp, Arabidopsis thaliana landsberg
gaaggagacaacacaacacacacacacacagagcaagcaaaagaggcggctagggatcagagagtggttccttcactgaaagtttcttcttttcattctcttcttctccttcagattccttgcctcttcttcaagattctcctctcttccatgtgcgtttctgtgcttttgaagacgacgatgatgatgatgatgtctttatattgaaaccaaattcgtctccacgattgtttcttctgagttttgatttttcagatctcgcttcttttccggtgagtttcacgcttttttctataaagctcattgatttgttcttagttttgtttctcttcaatttctggaatcgatcaagatcttaatttgatggattagtgagatttaagatctgtttttttcttttgcagatttgttcaatcatcatggcttacctgatgtagtaattgggatcaaattcattcacaaagctcgagtttttattattagtggctactgttatctgtgtatagaagaagcttgtgtgtgtggttctctacgtttcatgatcggtttaggtatctgttatatccggctcgtgttggtttcagatttaggcactggtctagaaggtctttcttcggctactgcttcttctgttcaccaaaagaagccttttttggtttcttcttctgtttcatgtcgaggaacttagacagtcctgttcagacacaaatggcagtggcagttttcaagactcctcttactggagctag

SEQ ID NO: 150458 - DNA, 138 bp, Arabidopsis thaliana landsberg
gactctaccccaagggattggctgtagagagggtattgcctttaacatgttgattcgataatgcctgcttagttagagatcgctaaagggatttaggtcagtgtctagctttgcttcagcatttctatcacgggagtg

SEQ ID NO: 150459 - DNA, 105 bp, Arabidopsis thaliana landsberg
tctgatacagatgtactttgttcattcaaataatggtctacaaaaagtaatttaaagaatacaagttttgaagagttgttcatttcctctttctctgtttcaagc

SEQ ID NO: 150460 - DNA, 131 bp, Arabidopsis thaliana landsberg
gatccaaataaatgtgacaatatttactaaaaatcaaggttacaaatcttggtttttactcgtttggtacatgtacagactattcttaaaaactgggtctggctctctctctctctctctgtaagaattac

SEQ ID NO: 150461 - DNA, 393 bp, Arabidopsis thaliana landsberg
ctgtaataatattaatttaatttgaacttataattgtttaattgtcacagaaaaaacaatgatgtgtcatgtgtttatgcatacattgaaattcaacatatttacacatttactactaatgttggttctttgcttgagtctctgaatccacaaattcagcgactgaagaagtcatctgatttggtttcttgggagctttctcttcagggatgatgtctctctcaggttctttcctcttcgaacttacactctgagaacctgtatgcattgttcctagactcggtctcatttctatctgagaagagcctgtggctgcactaactgtaacccttttttttccactcctgagaaactcttcctcagcttttaatcgttccaccaacatacaaaccg

SEQ ID NO: 150462 - DNA, 431 bp, Arabidopsis thaliana landsberg
ggttcaggtgagcgcacttgtagcacaaatcttccaaatgagagtgaaaacgaagaacctgacgggagtgatggttggtggatcaattccagcattaagcggcctcgaggacgcattgaaagcagaacaaaaggtttcttccatttcttcttcttcttcttcttcatctttaacatgtaccagagtttaatggggtcttgtaaatgtatcttaaggctccacctggaactgcaaggaggaagagaaaggcagactcaaggaagaaatttgtagagtcagcatcaagcaagcctggtcctcgtggcttcggctctggtaactaaaactatttcagcccaatttggttaatttctaaacggattatttttttgtataagttaatgaatgagacagaaaccttacaagttaattaccaatttgttgacaaaact

SEQ ID NO: 150463 - DNA, 403 bp, Arabidopsis thaliana landsberg
cttgcttaattaatacgagtctctgaattagaaagacttatatattacaaaaaaaaacgtagagaggtgttacataagaagctttcactttcacagtacttatatggatattcgaaagaaactcacctaatgatctcacttgtaaggtcacgaaccagttgtgttttcaggagaagataagccattcgatacggtttcatcatcaccaagttgtgaggattcttgatcagggaatagctccagtcgcatagacggtgcaatgttattcacatgaagccatgttagctcccataagctatctccaccaagagcacttctttgcaatagcacgcctttcgtcttcatcaccagcaatatgtttttgagaagctctggtactgattcttgtagctggtcgcttttt

SEQ ID NO: 150464 - DNA, 110 bp, Arabidopsis thaliana landsberg
gactagatggagaggcaggaggtaagtcaaaacaaagcagaagtgagaagaagagtcgcaaagccatgctcaagcttggcatggaaacccatcaaaggagttagccgagt

SEQ ID NO: 150465 - DNA, 236 bp, Arabidopsis thaliana landsberg
tcaactcaaaaagtaacaatttgaattacttctgcaaatctaaaataatatctagtgaagcgaatatgtgtttctttgataatcggtgcgatcagaatctgacggtggtggtggatgtggcgtggtggatggaggctgttcctccacaaatcatttctccggcgaagccatcggtttctccgattctagagaccattttagaaggcggagagacccgagaagactatcagaacaag

SEQ ID NO: 150466 - DNA, 265 bp, Arabidopsis thaliana landsberg
ttagaattcaagctcacacgagcattcgatcaccaagacaaattacaggaattcacaaatctgtctttcattacacagtgtttttgatacacataaagctcataaggtacacatatttctatttttacattcattagttgaaagggataacaatatcgccaatgttgttgtgccatggatccgccaagtgagttgccaagttctccaatggtcctgtccccgggtaagccgactgttgcacacagaatcctacaaacgccaacag

SEQ ID NO: 150467 - DNA, 470 bp, Arabidopsis thaliana landsberg
gttttatgatagtgatgtacatttttgagacgtatttggatctgaggcaactcactgctctcaagcttccaactctcccgaaaaccttggttggtgtaattagccaagagaagtttgagaaatcacgagcatacagtcttgacaaaaggtttcgtcttgatcatatttatatcattttagttttttataattgccaggggatatcatcactgagaactttaatatatgcagctattttcactttgttcatgagtttgtaactatacttatggactctgcaattttgttctttgggatcttgccttggttttggaaggtacatatctggtttcggtatacagtatctcattttgaatatagagttgttacattacaattgtaaagttttcatttttaccttagatgtctggagctgttttaccgaggttgggccttgatccagagaatgaaatactgcatactctttcatt

SEQ ID NO: 150468 - DNA, 138 bp, Arabidopsis thaliana landsberg
tgtgatgcaaacagatgagatgtgatcagaagtcactaagtcaagccaagcaataacagttttggggtttctaacagtcctaagcgaacatgcagaaaacagaaataataacagaattactaaagtcacttgaccaca

SEQ ID NO: 150469 - DNA, 178 bp, Arabidopsis thaliana landsberg
ctttctcctccgacacactccaaaactcataaatctatctgatgcgaatttgactaactctttcgtaaattaggatcttacttcaaatctttaactcaccaatcttcttcttattcaaagattagagagaaaatggacaacgagctggttatgaacacagagtttccatcaccgcgga

SEQ ID NO: 150470 - DNA, 381 bp, Arabidopsis thaliana landsberg
ccctcctcaccggagatccaccgtctaaatcgtctctaaaaatggagaaatcgttgctcgattctggcgaaacaacggagataattaccacagataaaaacgaggaaacagtgaaagacactctcagagaagttaaatctcaggacatagaccacggtgaagcacccgtaccggagaaagtgcctccggcgtataaaagaaaagtttccgttgctgaagaagaacgctttctttataaggttacgacttttgcttactctactctctatgttctattctagtgaatggttttgattttcgatttgttctgtgagatatttttctggaatctgtttttatatgtttaatagttctcggagacgaagatgtgatggttaataa

SEQ ID NO: 150471 - DNA, 540 bp, Arabidopsis thaliana landsberg
gttctctatggtcctggtgatgtggtccagtggtggtggtaccattgacgccgttagagtacttgctcgaagtcggtgcagcaactgtgttacctccacggctcttacggcgaagaacaatgaaccaagtaagtggctcgagaataaggatacaagcaccaagaaagatgaggatcccaatgtaagcccatcgccatttatcctccgggtccaaaatgtcgaatcctttgaaaatgttgacaatagagaggatgatggtcgtgtatccaacggtgtgatggtacacgttccagtacgttcgatatttgtggtctggctttggccttacaagcagagcaaatacttgaagtgtggcaaatgtgaagagtgctattccaaggttacgatgggttgagtaagatgtgcctggtgagtcgttaccaagcttgattccggtggcccaaccggctaccccgatgacgtaacccgacacttgaaaggcgatgtggagatagaaccaggttggatcggcgaagactttcatgtaccgagccatcattg

SEQ ID NO: 150472 - DNA, 373 bp, Arabidopsis thaliana landsberg
cggaaacatttctttcttctttcttcttcttctcacgatcggtcaataacttgctcataacaatttcgaaatcctctgcttcatcatttgaacttcgatttaagggttcttgaattttcgaataaaaatctcacctttaaatgggaaagccaacgcggaagaagaaaaatccggagacgccaaaagatgcttccggcggtggcggcggcggtggaggcaagtcagggaaaactgtaccatcgttctacttcgagggtatttgacgaagatatggagattttcattagcagagcacttgagctctaagaagaaggtaacaagttgttccagatacgcgaccacgaaggtgcgatgttgagtttcgcaaagcttg

SEQ ID NO: 150473 - DNA, 408 bp, Arabidopsis thaliana landsberg
aagtctcggaggctatgtgttggagataaggtcgattcgcactgtcaggttcatcgaccaatctctcttctccaatcttctcgtctatctcagcttttgcctttttcaacacttcaggtttttttaataaattggccatcgcccattccaatgttacggccgcagtatccgctccagctcgcatcatactctatatccatttaattcacacacgggttgatacattatctacacatgtacacatataatatctttataatataaatgtaaaaacataaaccatctttcttctttcagttttatgtttgcatttagtgagtccaaggaaaaaaaattatatttaaggtttatatgtatgagaatacttacgagcatgagccctttgatgatgacgtcactgtaatactt

SEQ ID NO: 150474 - DNA, 173 bp, Arabidopsis thaliana landsberg
  unsure (1)..(173): unsure at all n locations
ttttagtagcacatgctcgtgcgacaaaattttatgatttatgaccacattttcataattaccggcaatttttttaaaaaacactatacagtatataaacaatttgagattagacgagcttcaatacatttttcattnttgccctttagagctgncttctactttactttctt

SEQ ID NO: 150475 - DNA, 181 bp, Arabidopsis thaliana landsberg
gttggtccaataactatcatgtaaacctttttttccctttcgtatctagctcttctatgtctctgttatttcagctactctttctctccgaaaatgtagttgattcccagaaactctaataaacttgtttgtttcatattcatatattaagcaatatatatatgacatcttttggtatcaa

SEQ ID NO: 150476 - DNA, 89 bp, Arabidopsis thaliana landsberg
aagatgtcgaccggtttagctctgaatcgctgttcactttcggtatgtagaacggccgtttctttacttaaccggccaactgttctccg

SEQ ID NO: 150477 - DNA, 169 bp, Arabidopsis thaliana landsberg
  unsure (1)..(169): unsure at all n locations
cgtgacgttttaaattaaagccccaatagcaaagatagaaaaaagaaactttatttctcttagtaatacaataatccttatagaacgggtcaagcaagatatctattttgtntgtttcccttgttaatcgttataaacttgtttctcaataaaacattgagtttttaaa

SEQ ID NO: 150478 - DNA, 212 bp, Arabidopsis thaliana landsberg
acctaattggagaggaggagttatagagccaaaagatctgcgatccaccatagatggataaacccaaaaatccaccaaaagagatcttaagctttcgtaatcaaaaagagaatcaacgaaccctaaccgatctgagtatgcatgaactgagaagcttataatcttgtttccttcgtttcgggctatatccaggtgtgaaaacgataccgatt

SEQ ID NO: 150479 - DNA, 464 bp, Arabidopsis thaliana landsberg
cgctttgagtgaagatgatgaatgttgcagtgacagccactccctcgtctctcttgtactctcctctgcttcttccttctcaaggtctctcctttttctatcttactctctcgcttactatgaacacttggggggttttaaatgggtttagttggtgaattgcagggccaaaccggcgaatgcaatggaaaagaaacggcaaggtttgtttttgaaacttctctttttatctcctccaagttcgaattagctgatgaattctacaaggaactctttgtttaggtggtaacatgactaatgaaccatgcatggatagtgtttgatgaaatgcttcagtgaaacttgaacttctttgaattcaaaaacacattctttgttgtgtttttgcagagacgattagcgacaaaggtggctgtttccggtgctatcacagctggatttgagctgaagccaacctcatatcc

SEQ ID NO: 150480 - DNA, 461 bp, Arabidopsis thaliana landsberg
tgattgtgatgaatttttatttgttatgctaaagagattatgatgaaataacgtctacaataaatcattaaatactccatacacgactccaccatgaatgggagatcaaaacaattaagtaaactacaaacaaataaaattgaataaaacaaataaacgtgtgtcccctaaacgcaaaattaaaagatacaaaacaatatatcctctcactcactcacgtcgtcgtcgtactaagcttggccgctttgaacggcggatgaagcagcccaaactcgtccttggcatcgagcggcctatccgtctgattgcgcgtgggtttcacgcgccggctcccaagcgatttatgcgtgaaaccatacatttgaaggatctgattgtctccgaaattaaacgctctatccatctgccgtagacaccgttccaccggataatctccaaatttcccgcacggtttacacccg

SEQ ID NO: 150481 - DNA, 272 bp, Arabidopsis thaliana landsberg
gtacaaggaaattcattccagaaaaaggcatcgttgttatttggcactcaccacgttgtggaggtaatacaaatttgctttttcagttcggttaggacttgggacaatgaaagaaaacgctcttattactttccggctacttcatgatatttgtcccttttctgctgcaggataagtctaacggtgggaaccaaggactaaggcaaagggctgaagcactagctgccttaaattcggcatttaactcttctagtaacaggcctgcctattcg

SEQ ID NO: 150482 - DNA, 313 bp, Arabidopsis thaliana landsberg
ggaaatagctgaaaagtgaaaaaatcaacaaaagaacaaaagcttgaagctttactcatcaatcatatctgttaaaactagggggaaaaaaactgaatgcgaataaataaccctggcaataaaaaataaaaagtaattctcattacctacaaacaaagacgcgaacttgatcaacaaatatcaaggaaacgagaattagatgaagaataagactagtggaaagaccagagagagatacaggcctttcaatggaagctattacatgagtgagaactcctcagtcatagctctagaagaccgatgacgaccatca

SEQ ID NO: 150483 - DNA, 159 bp, Arabidopsis thaliana landsberg
acattcaaaaataatttggttagagagtcttaaacgaaactaatagagcacacaagtttctcaacatggccagtcctaattggccatctttacttatggtggtcttagccttgtattccatggttgcgtatacaagtgctcaatactctccaacaccaa

SEQ ID NO: 150484 - DNA, 414 bp, Arabidopsis thaliana landsberg
cccactttatatgtaactgaagaatcactggtgttagtggtggtgggttacatagtaagagctctctgctactattttaagaattatgaagaagattgattataaaggggttagcgttttcattacttcacaccaactaaagcctttctcgttagataagtaacaagcatttactcaaaagcttcttcctttctcactctctctctctctctgtctcttcttgtttgctttagacttaagatgggtgcggcgcattttagtaaggagagggtcttcagagggtttctggtttggttctgcttttggggactgatgtctctaacatgcgctgggagactcagtgtttcaaggcagaattttgaagtgcacaaacacttgaatcgattgaataaaccagccgttaagagcattcag

SEQ ID NO: 150485 - DNA, 81 bp, Arabidopsis thaliana landsberg
agaaccctaatcactactcaagcaacataactaagaacacaaacccagaaattactgaaatcataccaaaatgtagatcta

SEQ ID NO: 150486 - DNA, 577 bp, Arabidopsis thaliana landsberg
gcgttggcctcaaacatggtcaacgcttaaaacccgaacaggcagctcgctctccaatccatgctttcctcctaaattccatcccatccgatctctctgtttatttttaccgttttgttaggctcggttttccccccaaagcgtcgtcagtttgcatttatgtgtttcaaaagtgtttcttcttcttttgcatttttcatctaattctcccgggacccatgatgatgggtcggtccatccttaagaagtaacaaaatgaaaatttctatctttatgtaggaagtgtatattaggagggaaggatgaaattgttagtgaaatgtgtcattgggtatggttccccaaatacacaggtctgctgttggtgtcggtgttggtttgggtttgagagtgggatgaagttttggtgctttatacgagaaggaacaaaacagaaagatttgattttgaatttttgtttttgtatgcaattgggaattttggaagaatgattcttttctctcattgcctttgttgatttgtactcttttggacactcttctttggccttttcttaataaaagaaatgtctttttta

SEQ ID NO: 150487 - DNA, 342 bp, Arabidopsis thaliana landsberg
tgtccttctttttctgaaagtaagtagaaacactaacttacttgttcaagtaacacgcattgcctaaagcgacatgtatgtgtatatagatatagcttaaagtttgtaaatttgtgaaccaaaacataagaaaagtgtggagagaatctgatatgaagcttgagagaaatgagtaacgcttgctgaggagcattgaaacttaatttatgacatgttattgtcgatgtcgaaagacactcgcgtttatacaaacataggagtcatgatacattacagagttgaacagagtttgggaagatatgaaaaatgattagttggtaatgggtaggacatggacaccaa

SEQ ID NO: 150488 - DNA, 194 bp, Arabidopsis thaliana landsberg
catgtgtctcatatataaatagatatcttataagttattgtaataataaagcaaaggaacattaaagaaaggaagtaattaaaagaagatgagagaaactagcatatatattaaaagctcaacacccaaccaactcttctccttccatccattactcttcactggttcggcttttcctcctcctgtcccatcta

SEQ ID NO: 150489 - DNA, 223 bp, Arabidopsis thaliana landsberg
gagtaaagagcactaagggaaacagattgaaaagagtttgaaaaacaccatcatagttcttaaaaatcgtcttaccaactcaacaacataaaatcccagataaatccaatacaaacgaagaacataaatcagaaaaccaaaatctttgcctagatataagagactttgcgatgacgagagcatcattactgactagcgccaagccacttggtgaagttatcga

SEQ ID NO: 150490 - DNA, 97 bp, Arabidopsis thaliana landsberg
aaaagatacaaggcttaaagcctacaacgattgtgcagcaagaaaattggagcccaacaatagcccattagagtaacatctacagcagaaagattct

SEQ ID NO: 150491 - DNA, 130 bp, Arabidopsis thaliana landsberg
attacttgcttctgcagagttcgtcacaaaacaattgttacaatgtcacaagaacagaacattttacatatgtataaaaaaatgaaataataaacaacattttgggcatcttaacaagaaaactttcgtg

SEQ ID NO: 150492 - DNA, 156 bp, Arabidopsis thaliana landsberg
tcacctaacctctgcatcacttgttatgttatttgtacctaaccagaattgtttgaccaaaaccgttttggtttcggtattggtttgctgaacaatcatctgtactggatgactcacaatctcattttttataaatttaaaatcagttttgattaa

SEQ ID NO: 150493 - DNA, 207 bp, Arabidopsis thaliana landsberg
aggggcagtgtaagctgaagggaaagcctttgtacgttctggtggaaccaaaccagtttgatgaattaaccttataaaagccttttctattcaacgattatgacaaataatgtaatcggtttaatcgattttgtaactaaggatttgtttgttttctattggctccatgtggaatgattcatgctagttactatgaaattcggaata

SEQ ID NO: 150494 - DNA, 322 bp, Arabidopsis thaliana landsberg
ttttcttcttatatagaggtgagtccgttggataacaaaatatgcaagacaaggagtgatcgtttctcaggagtgtgcataagcacaaacaattgtgccatcatctgccaacaattcgagcactttgatggcggtcactgcgaattcgatggagccttccgtcgttgtatgtgcaccaaacaatgttgattcaatactctctatttgatcattgtttctatataattataagggacacactttgttaatttgtgtcctctctccatatatactatatactatctcattatttaagaaatttaatggatttttaataataatt

SEQ ID NO: 150495 - DNA, 114 bp, Arabidopsis thaliana landsberg
cagaagagaaaaccctagctagaaacgacgatccagagatgacgcataagagcaatcagttcaagggccaacagaagaggaagactattgctcctaatcgccatggcaaatccg

SEQ ID NO: 150496 - DNA, 133 bp, Arabidopsis thaliana landsberg
aagatttaacttatgagctttgcggtgtatacgtataagatactccgcaaaagcttttgactcgcatatgagaatgcttcatggacctctttcgctatattgggtcaccggtctgcgtcattttagctggaaa

SEQ ID NO: 150497 - DNA, 184 bp, Arabidopsis thaliana landsberg
cgagattgcgatcacagagtgtcaaagcaatctgctttttctcctctcagattcaaaggttctctttgaagcttcgcaggcggctatactgtgatggcggattatcatttcgtgtataaggacattgaaggagcgtcaactcaatgggatgatatccagcggaaattgtggaatctaccggaga

SEQ ID NO: 150498 - DNA, 867 bp, Arabidopsis thaliana landsberg
gtagaaatggaccacgacaagacaggatgcccaagcccaccatgaggatccaagctatgtactaacaactgcggtttgattggaagcgcttgcacaatgaacatgtgttctaagtgtcacaaggatatgttgccccaacaggagcagggcgctaagtttgcatctgcagtgtctggaacatcgtcatccagcaacatcataaaggaaacctttaccgctgcgttggtcgatattgaaaccaaatccgttgagccgatgactgtttctgtacagccatcctctgtccaagtcgttgcagaggtagtagcaccagaagaagctgcgaaaccaaagggaccaagccgatgtactacttgcaataagcgggttggcctgactggattcaaatgtcgctgtgggagcctcttctgcggaacacaccgctatgcagacgtacatgactgctccttcaattaccatgctgctgcgcaagaggcgatagctaaggcaaacccggttgtgaaagcagagaagcttgacaaaatctgaaaatctaagtaaacttctctggtttcatcaggtggcctggtgtttccttctcctgtctgtgtctggttcaagtattctcatgttaaaaaggttttatataaggtcgaatgaaagcgtgcttgatctttagcgtcttccatctctctgtggtgtggaactttctattatctgtgtttgcaagcagagaaacgtgctcttaaaaaaaatgctttgtgtgtttatctttctactatttttgagcactgtgttattgtttcctgtttggtctgtatcatattgagattgtctctgtagctacatgaagcttatttaaaaaggcctgtgtttgtccttcaatca

SEQ ID NO: 150499 - DNA, 262 bp, Arabidopsis thaliana landsberg
aaacacaacagaccttaaaaagagtctgtgtggctacaacttcatctgaaaaaaaaaaatgttccaacattgaaggcaatacaatatatatagtcttctgcacctaaacactgtccacatagagaagaacttaccttacaccgtgacaccattagtatttacagacgactcctacgacgccgttatgtccccttgtaaaaccaaaccggtttcttttgagtaatcaagattggtttatatggatccaccactcttattttca

SEQ ID NO: 150500 - DNA, 781 bp, Arabidopsis thaliana landsberg
ccttctctatagatagatctcagaatctctccttttttgttggctttacccttatttggccattcctgtcttccactttgtcatcttttccctttctgatgggatccgccgccgaactcacggagcccaccaccgggaccgagaagcttcaccagccaatagaagttgaagaagatgacgaacaaattgttgatttggagaggaaaacattccgtcatggaaagggacacgatactagtgtggacagtagtacaatcaccaacaccagctcgtcgtcgtcttctagcttttccggtgatggtggaacggaagagacccccgatttccacagcaacggcgatggagaacataccgatttagtaaatttggaggtcccggagctagaaactgaaattgtatttcaccaagagcatgaagacgggaagaattgcatcgtcttcttcgacggagaacaaggttagttactaaatctccgattatggatcacttgaagaaattccaagcttgttggagctgagtctatcgtctttttgtttccttatcaagtagagtaattagcctaattgcctaaagaaggttttggattatttgtgattttagtcttgtaatcctgaaattggaagcctgagtctgaatttttagtgtaggatggtagattttctaataaaaacgtttcttttggtgaagtcgtagtcatgttttgttgtttgtatatgaaggaatttggaaatgtcgccactgcgattggacctacaaagagggatctttgttatgcaaaggt

SEQ ID NO: 150501 - DNA, 188 bp, Arabidopsis thaliana landsberg
cccttgagagaaagatttgtttcgcctctcaaaacattttcaattcccgccaattttcttctccgagaatacccccaaccttctagaaaccctaatttggtttaatttcattctccactactttctctgaaaccaaactcgagatctctcccccaatcatgcctgcgatacaatccccatcggggaag

SEQ ID NO: 150502 - DNA, 323 bp, Arabidopsis thaliana landsberg
aaaaaagcttctttaatttctctctctctctgtggagtgttcgaatctccaagctctctctcaaatggcagcgtccacatagtaaagctgaagaagcactgtatctatctacagagaaagtgaagaggaagaaaaggaagagaggatatagaaattaagctggcgacttttagtccgaggcgagcaatggcagagttacggcactcgagctctctcggtagccgatcttcttcttctccgttacgtgccgccggagatgaggattcttcatcgcctcatgtacacgatcactctctaacggcggagacgacgaagatggtcgc

SEQ ID NO: 150503 - DNA, 436 bp, Arabidopsis thaliana landsberg; identical to SEQ ID NO: 50874
  unsure (1)..(436): unsure at all n locations

SEQ ID NO: 150504 - DNA, 864 bp, Arabidopsis thaliana landsberg
ttgatgatgttggtgaccatggtgtcatatccatggggtaacttcccagcacccttaggaacgacgtgtactcttgaacctccgcaagcgcgttctgtgcacgcggctctgccatcgatgcctcaaaatcaacgtaaaacatgtactcaaagttcttcgacgtaccaaagctcccgtcaccaacaaccctaagcgggcggttatggtgaggccgggactcgatcttggtcaggctaatgtctctgaaagcgaaagccgagaggactttaaagaggacgctagttcctttgtgctcttgcgcagcaaagacgatgctagtcttgaatggccggtccgtgcgtgggattataggctcacgcgccaacattaggaagcgagtgacgttccccgggtcgtcttgaatcccatccgctaatatctggaggttgtaaagttctgcggcgcgtgcactcgctacagccgcggtgtcatgtaggtcgttagctgagatgtactccgcagcagccgctgtgtcatggaatgcctcacgcgctgcatgtggtgtaaggacgtcaagggagtgttccgtctgcgctagggcttgcgggtgagagatcacccgcgaaatacagtcagttcgaactcccggaagtgcgaggaggcaatggtggaccggaatctgaacttctccaacgatatgaagacggtgacggaggaggagatcatagttccgatgaatcgaaccaccgagtgagttctctaccggaagcacagctcgatcagcgatccaaagctccaccgcttgaaaagcaacgtcgaactggtcacaaggaatggcgtcgcaattgggataagcttttccggcagctgcttccgagtacgcac

SEQ ID NO: 150505 - DNA, 163 bp, Arabidopsis thaliana landsberg
gaaactatctctcctttttattattaatggcttgtggaaaactgctgaaacaaaatttctttgtttacacatgaatcaagaaatgaacctgtacagatttcttatctaagaataagcaagcaacataaaaataggaaaccagaataaccgaaaggagcatgta

SEQ ID NO: 150506 - DNA, 876 bp, Arabidopsis thaliana landsberg
aatggcggcaatcagaacgatgacgaacatgattcttcgcgagtttatccatcatccacttctccttcactcttcatcgaaatcgtgtcaatctcttttaccatgtctccgtctcactcccctaatttctccaattccctctaattcccgattcggatccgtccgatgtgcggcgtctacctccggtggaagcggtggtgatcggaaagtctcttcacggttgtcgcaggtgcaacagatgcttcatgaagccgaagagagagctagttccgctggcaatgagcctactcctcaaatcactctaggcaagcttttgctttcatccatttggaaacaaactgagtttagttttaaggaataggttatggagaattctactttatgatgactcttgaactttctagagaactgagtttaagttatttgagccaatgatcatctgtttacatgaatctcaaatcaaattcgctaatcactgtatagtctgtattgtatatacataaatctcaaattcaatcactttgtatgattcaaatctcattttcaggaagggaaggtttgaattttgtagtagattgatgaataacgtatatatcgacttgaatgtggtcatagtttcatgtgtatctgtttttggtatttgcagacaatgttacactgaactttgctagaagtggtggtcctggaggccagaatgttaacaaatgtgtgaccttgttcttgtgcctttacctttcttttcattgtagtttttagttacttgatgtttcagtgcttttacttttcccttgcagtgaataccaaagtagatatgcgcttcaatgtgagaaacgcgtactggctgagtgacaggatcagagagaaaatcttgctgac

SEQ ID NO: 150507 - DNA, 456 bp, Arabidopsis thaliana landsberg
attggcaacggacggtgggaacaacataagcaacacaacgatttattctaaggtgatgccaccaacaagtgtgatgacaagacttattctcattatggtttggaggaaacttattcgtaatcccaactcttactccagtttattcggcatcacctggtccctcatttccttcaagtactgtttcaaacttgtcttattttcacttttctttggttttggtctactattttaaccactttctttatgcataaagggtcagccttgaatgcgtatatgtttgaaagttttttctgatagattgaagtaacaaaagatttgagaaagatctctttattggaattaaattgatgtggtctgtgcaggtggaacattgaaatgccagctcttatagcaaagtctatctccatactctcagatgcaggtctaggcatggctatgttcagtcttggtcagttc

SEQ ID NO: 150508 - DNA, 249 bp, Arabidopsis thaliana landsberg
tcctcaacccaatttgtataactcagaatgtggtctttgataagatacgtttaaaaggcaagatcaagctgtctcaaggtcatgatcaagctgcagaacacaatacaaatggaaattgaattgcttacacctaagcatcacagagagtgttatcaattcttccaactatatataacctagagttcagcttctttgttcccggaaacaccaagaagcttggcgagttcaccgctctcatacgcatctacg

SEQ ID NO: 150509 - DNA, 776 bp, Arabidopsis thaliana landsberg
gccgaagctgaaacttcttcatccatcatcatatcatatgaattttttctagtgatcttctttttgattgagaacatgagtgatcaagaaggagactgggatttttacctcagaatcctaagcaacagcgcgcgggattctacggatcctgcttctgatccatctatactacaatcagtacgcatcttttgtccatttattgagaattggcttgagactggtattaagtgatacattgctttcgttttgtttgaatgtatatggattaggtgaagaagctgcatgggttctgtaaaatggagaaatcagatgatcttgtggctagaatttatccacaattcaataaagtcttccatcgttcggttgcttcactatctcagtccgagtcaggggcgtccaaaggccttctcttgctagtacattattctccctgaagaatttcagatgaaagtttgtttttttacgttttgggttctagtgtgtattaaggattctgtgtttgtgtgtttaggccattcttcagttttttcttgattttggggatatggttctgcacgattctgacccaagtttgaggacattcttccgctcatgtcttagccggtatggactaccttttatgtcttgactgggtcttgttgtggctctgtgctctgagatgtgtgctactatgcgtttatgtagataaattttgctgatatgatcatgattttctttgtagtgagttctcagatgccgctgtggcagaggcaacttgtgaattccttgttgtgaac

SEQ ID NO: 150510 - DNA, 631 bp, Arabidopsis thaliana landsberg
aaggtaaattagtgattgttgtacgctttagatattaatgtaatgatgttaatgggtttgctgtatgagatccttctataatatacttactccttgttacatgaccatgcagcatttgattttgacgtaccaaaaggcttctttgaagcatgcgaacacataacatccaaaagagaagccattgagttatgacatatgttaacaaacccaaaagtagaaataataacacacaccttaagtaaatagaatgaagaaccggaaaaagtaaagtacacaaacttcaatacagagctaaaacctatacagccaaacaaactacttccataggacagaaaatgttatgcgaaaatgtcaaacatctctccctccacccttttttcttgtcgtcatcgctaagcagtgtaagccgatctaagtcagaaagcatacttatctttttcatccttaagttatatggtaattcaataaatcacagaggatgtaaaggaaagcaagagaaataaaaaagagatataaaggttaaaaagagcttaaaaatcacaccagcctataacggttttacttgtttaaactgatacgaccacaagaactagtcacatctcctccctcatctcattgtgtactccttgtt

SEQ ID NO: 150511 - DNA, 428 bp, Arabidopsis thaliana landsberg
attagagttgtgaagatattcattgatacatttattgatgatcccatggctttggctgagcagctcattgatactttcgacgaccgtgtttcgataaagcgttctgcggttggtggtagcggtgcgtctgcagttgttccatctggattctgtatgaagttgtggcattagagaatgggaacttgtgctctgtttttttcaagtcattttcaaaacgttattctaattattgggaaatttgcattattggaacatttccatgcaagaacagtagtactgttgctatcgaatagattgtctttgtcggattatttatttatttttagtggatttgattccatttataattaagtaattagtcctagactgaattattcttatttcgttgactattggattatgttattttatcaagtaggttatgaaaa

SEQ ID NO: 150512 - DNA, 439 bp, Arabidopsis thaliana landsberg
agagtttctttcaaatcccctaaaacctagaaaaacaccaaagtctctctctctttttgttttactccaaaagccttttacctttgagatttttctatataattgtcagatccttcgttactactgatgctagctcctttagggctttttctcgtttactcatgtcaaattaccttcttgtcccttggtgtttagggctctgatcctatataataatacttcataggaaggagaaggagcccttcgtcgtggtttacttggtcccgatcggagatggagagagaatgtgggtcgaaggagttgttcagcaaagaggagctacaagaaataagtggagtccatgtgggagacgattacgtcgaggtgatgtgtggctgcaccagccaccgttacggagacgccgttgcgaggcttaagatattttcagatggagaacttc

SEQ ID NO: 150513 - DNA, 265 bp, Arabidopsis thaliana landsberg
tttccgatacaatattagatatataaataacacaaagtgaactcctaatcagggttcattttataaatttattatttagttattgcggataaagaacaataataatatggggatgtttaaaaggatcaaggttatcttatctcttgctctcgtagagttcttggccccttgctgcaaccaaggttgagggcccaaagataccatacctttatcctcgctattcgattcgtgggagaatcatggcctggtaccatttggtgtacaa

SEQ ID NO: 150514 - DNA, 334 bp, Arabidopsis thaliana landsberg
agagagtccaaacaccaagaccagctcctttttcacctatctctcttcttcatctgaatcagattttgtatcagaaagatggcacctgagctcataaattctggataagatcaaagtcagagtctttcttgtttttcatcacttacttgtatgacagaagaagatagctcagctaaaatgtcagaggatgttgagaaatatcgcaacttaaatccaccgtgctcctcctcctcctcttcttcctccgccgctacattcacgaacaagtctcgaaattcaaatcttctccccgccgtgtcagatcatgccttgagacgtttagagacgtcgtcag

SEQ ID NO: 150515 - DNA, 85 bp, Arabidopsis thaliana landsberg
caacaacaacaacaacccaaaacccaattttgttacctcttctttcctcaatccttaagtcaaaacaaacaaaaagcttcctttt

SEQ ID NO: 150516 - DNA, 405 bp, Arabidopsis thaliana landsberg
gtatgtcctaggaacataaaaaattagaatgctaataaataaggctataagtacaaagatcagaggaacatatattgaatacaactagattcgtatagcttgagaatcctcactatgtaccactaaagcatttatatagcttttaggctaccttcaagatcggtgacgaccaggagaagtagttcgattcgtcttgtacttccaaaactcatctttcttccccttcgtcttagctttaacccgaccgaatttgctattaattataccaagtatggcagtcttatcctttctgttctttgtctttgccttgtcttccagaatcgccctaagtttctcataggaccttgggtctggtacttgcccgcttttaaccatcatcttgtggtaaaagaatgcccttttgaa

SEQ ID NO: 150517 - DNA, 120 bp, Arabidopsis thaliana landsberg
aaaaagggttcttgtagacttgtacaaacttgctatgagaatgtctttgtcaaaagtctctctatctgtcttttatgcatcctaaaccatgggagagataatcaaagccttttatattat

SEQ ID NO: 150518 - DNA, 421 bp, Arabidopsis thaliana landsberg
tttcactgtcgaatatctctttagtcaaaagacagagttcatacatgtttagtctgtgtgacctatagatcaaaagaaacaaaaccctcttttggtttctgcaataatggggtttttagtacaataaagtttcaggaaatggatttcaaagctaataaaggaaatgactccttcaattcaatgcccataaaaagaggcacaagaagggcaaaacacctcatacaaccagaagaagagggtctatagttttgcattgctcttgagtgttttcccatcattgtgctcaaaagattcataccccttttacttggtaagatgttctttcatctttcccaacaagaaaaatcttaaatgctatatatcttacttcactcggggaactccattcatctttgcttcaaggttcgagccctctttcagt

SEQ ID NO: 150519 - DNA, 93 bp, Arabidopsis thaliana landsberg
gaatttgggaatggacggagaagagcttaccgagcaggagactgccttgtacgaccgccagattagggtttggggcgctaatgctcagagaag

SEQ ID NO: 150520 - DNA, 375 bp, Arabidopsis thaliana landsberg
aaaagagaaaatagaccatttaaaagtaataatatataactagagaattcatctgttatatcgtcagaaaaagaaaaaaaaaatcggtaattgaagcaaagaacttcaaatagtgtttatatgtacaaaccaaaagtaatgctctgttttttttccaagtgaatgaacaaatgtcaccaactcacctgtcactcacacccctgagagccaccggaaaagctcacttatctcttctccggcatgattcgcttctaaatccatcaccgtcaattcctcactccgacgactactcccagtaaaaaatctaccagagcttctaaacgacattgcacgcgacgatatacctcgtgagagtctgtcaacgtaatccttgag

SEQ ID NO: 150521 - DNA, 106 bp, Arabidopsis thaliana landsberg
  unsure (1)..(106): unsure at all n locations
taaaactttaaacacagataaattgatatttaattagctttctttcacattntaacaaatttggagggctcttttgcaaacaatacattatcagttttgtcttaat

SEQ ID NO: 150522 - DNA, 339 bp, Arabidopsis thaliana landsberg
tcaccttcaatcctcatcacatccatactcgaatgcctcagttctccattctccgcttctaccgggttctctttcttgaaaagcactgcaagtcgaccaccagctccaccactccttctgtcctccacaaacggcttcatcttcgtcctccttctcatttggacatccgccaattcaggttttaacctttcaaccggaacgtccgcagcacctgcatctagcacatccggagcagtgttttccattgcaaccaccactactacttcttcttcgactccggctgctactagtgcaccagcttcttcagctcccgcttctacaatggctttcccttctttt

SEQ ID NO: 150523 - DNA, 115 bp, Arabidopsis thaliana landsberg
tgagacgaagcttgatgagaacaatcgggcaaggcattatagagattacacaacacagatagattactcactgcgaaacagagaatggtagctgaggccttgcccaaatgccctg

SEQ ID NO: 150524 - DNA, 190 bp, Arabidopsis thaliana landsberg
tatcttggtggcatgcaaaacattttttgggtgaaataaactaaacttccacaagaaaatattacttagcaagaaatgaacttcacagtaatcaaactattatatggttaaaatcgtgcaatcacgttctaaggcctctcaggaaccccaaaataaaacccgacacactgtgcttcccgctccataacac

SEQ ID NO: 150525 - DNA, 322 bp, Arabidopsis thaliana landsberg
tgatgagattacttttctttctactacaatttcatgcacatacatatgtcacaacgtacaataaaaatagcagaaataattacaaccacactttgaataacgatttcttcattttaacttattcaaacaagatcttttagtttactaggctttggacttaaccagaatcaactactttgtgagtccttaaatgcttccgtttagccttcttgggctcaactcctaaccattgttgaatgagctcaaacactctttcatcacggagaagcccgcggtggctacccgaaactcctacgctagcaactgctttaaactgagcagc

SEQ ID NO: 150526 - DNA, 539 bp, Arabidopsis thaliana landsberg
ggacgaaacgttgcttttgctggaaacaacaagagcttgtctctagagttgctaaggccgctaaaggcccagttatcttagtattgatgtctggtgggcctatcgatatatcttttgctgagaaggatcggaaaattccagcgattgtttgggccgggtatccgggtcaggaaggtggtaccgcaatcgccgatatcttattcggcagtgctaatcccggaggaaagcttccgatgacttggtatccgcaagattatttaaccaatttaccaatgacagaaatgtcgatgcggccgctccattcgaagcggatcccgggtcggacttaccggttctacgacggtccagttgtttacccgttcgggcatggtttgagttacacgcgctttactcacaacatagccgacgcgccaaaagtgattcctatagctgttcgtggtagaaacggcaccgtttcagggaaatcaatccgtgtgacgcacgctaggtgtgatcgtctctctctcggagtccacgtggaagttactaacgttggctcg

SEQ ID NO: 150527 - DNA, 125 bp, Arabidopsis thaliana landsberg
atcattgagaatagagagaagaagagattcaggtgatacatgtttcttcttcggagctttattcaccattgttgatttcagtggatctgtggataaaccttgaaaactaactctgttcttcatcc

SEQ ID NO: 150528 - DNA, 97 bp, Arabidopsis thaliana landsberg
atttacaaatattcctaagctatggccgcgttaattaaaagaaaaaaacagtatttgttgattattctactaagaaaagaatggaaaaaataaaaaa

SEQ ID NO: 150529 - DNA, 280 bp, Arabidopsis thaliana landsberg
ctattaacagatcgttatcaaagtaaaagcaaaaacaaagaatatgattacttcatagtgtgttagcagaaatcataatctaagatttcaccccactatcactaaaagggcagagaaacaaaaaacaaaaacaaaaatctagtgtctatgggtcggtagaccgtaggttacagcaaatcacaaactcctttggtctctcatatcactgaggtttctatacaaagatgaaagaccaaaccaacctaaatgagaacaataagcctacactctctttcactgt

SEQ ID NO: 150530 - DNA, 457 bp, Arabidopsis thaliana landsberg
cacttccacatccaggtcgcgttgcttcactctccattgcaaagagaggtctctgcgatttctgcaactcacccctgaaaccttcttaatatacttcaactgccactatacctaaaaacttcctctgtctccgttgagctatgataaagactgcagatttcactctcttcttcttcatcttcgtcttctctcccttgttgcctctagctcaatctcagcttcctgatctcgacccacaagacaaagcttctttattgatattcagagtttcgattcatgacctaaatcgaagcttatcgacatggtacggctcatcgtgttctaactggacaggtttagcttgtcagaatccgaccggaaaagttctctctctcactttatctggtctgaatctctccggtcagattcacccatctctttgtaagctctcttctcttcaaagcttggacctttctca

SEQ ID NO: 150531 - DNA, 999 bp, Arabidopsis thaliana landsberg
ttcattgtcttcgcctgcgagcgctaaaattatctccgagcattctcaagttgggtgattcggtacggattactgatttgggagagaaaaaccctagattggaattagattctgggttcttgggctaaaggtttcttcatctccttcgaatcatccttttgtaagtccagtggatgtgaaaacccagtactcactgattctttttattaggaattttgtaaggttttgggtagagttttcacagttttgatgatactaaaatgtgggccactgggtctagagaatgaagaatcttgcttttagtgacaaaggttgttcctttggagtagtaagtgagcaagatatcagaaaaactgaacctttaatctcaagaatttactttgattggagcttgtgaagtccttgtgttattgttgcatgatgttttctttgagataacttggcaatgtgtgtttggtgttattgtagagggagcaagacgatgagtagaaaccctttcctggatcctactcttcaagaaattcttcaagtgattaaacccacacgagcagatagggatacgaggatcacagtcattgatcagttgcgtgacgtcttacaatccgtagaatgtttaagaggtgatgactcttgatgcacttttgtgcttctcccatttttcttactgtctagtactgccttgaaccataccagccatggatgtgattatgatattggatatgaaagtgagatacttcgagctttcagtaaggtaatatctgctggaattgtagctgcagaatagtagaagtggttcatgttactctttcgcactattctcgttctggaaacaaattatttcatgtgatgcttatagccgctcgttgtctggttctgtaattgttaggtgctactgttcaaccatttggatcctttgtgtcaaatctcttcacacgatggggagacttagatatctctgttgacttattcagcggttcttccatcttgttcactggaaag

SEQ ID NO: 150532 - DNA, 877 bp, Arabidopsis thaliana landsberg
taacgaagaacaaattctgatatgcaaatctcaaatgatcattgacaattcaaagacaaagtactttcttctttactttacatactataaaacattgagtacaaatgagggaatccatcaaagcaaatctcacaatcacaccatttccaggttttctaaaaatcaaatctccatgaaattatgacacttttttcttcttttgtatagcagggaaatggtcatgccagtaaccaagaacataaaaagagtctaattcgcggtagtagaccaaatgaatgcttccaataagaaataaaagagaaggaaagggtatacacgagcggaacccgaaactgaccagtgatgatgatgatgatgatgaacacgataggagaactctgtagtagcttctacttcagaggatgagatttgaacttatcctacaaagcctatcggtttaatgtaagaagataaatggtctaactttcctctctcattttcctcttcgtgttttctgttatcatcatcatagcctgtttcttttgctttcaagcattgatccgactttaagagcagcgtgtgcttcgttctcttgtcctagagctgatagagctacagcttgaagataggatgcgatatgccaagccggagatatcacttgggcttgcattgcatcattcagcgcctcttggggcatctcattcattaggtaacacagacttcttcttgcataaacagtcggggaaaccattgtcccaccctcaatgaactgttgcaaacacattcttagattagaatttaccctttctctggaaacttaaaccccaaagacaaataaacaatggcagtagaaaagatctaacctgagaatagcagccgatggcatttgcaaattctt

SEQ ID NO: 150533 - DNA, 235 bp, Arabidopsis thaliana landsberg
gggccaacggttttctatcttcaggccgctgctctcttcagccttggaatggataaagacgcttgtgaatccctaaaagatggaacttccttggaagccaagaaacataacaacagaaactgaaaacttcaagtgtataggtttcttctctcttccgccttcttcgttttgtgattggattctgagaaagcctcattgtctctgtcttctttaagcattatcttaaatttgtggt

SEQ ID NO: 150534 - DNA, 248 bp, Arabidopsis thaliana landsberg
cttgattcttctttttttacctgacgagagagattagattccggcgaagagaatgacacggaggtgttggtagagccggcggagatcgccgtggcagaagccgcgacagagatggaggctgcgatgattccagttttcttcatgtcttgatcttaaactttcccaaattcgtggactctgtttatacttttttttgtttttctgtgttaataaaataaaatctgcaaccgtaggcagatgagagaaaa

SEQ ID NO: 150535 - DNA, 1175 bp, Arabidopsis thaliana landsberg
gtccgatcacaacaaaatcctacactttcccaaataaaaattaaaaattcaataattaaggagtttctatttaattaataaaaatagagaaaaacatctattttattattttagcttttattcacaccgccacaaactctcactataaagccgatccatagataaacgaggaccggccagaaatcgcttcaccattcccaaatctctcttccattttctccacacaaatttctcttcaatctccgataatggaaggaaccggcgttgtggcggtgtacggtaacggtgcgataacggaggcgaagaaatctcccttctccgtgaaggtcggtttggctcagatgctccgtggtggtgttatcatggatgtcgtcaacgccgagcaagctcgtatcgccgaggaggctggtgcttgcgccgtcatggctttggagcgtgttcctgctgatatccgcgctcaaggaggcgtcgctcgtatgagcgatccacaaatgattaaagaaatcaaacaagccgttacgattccggtgatggctaaggctaggattggtcatttcgttgaagctcagatccttgaagcaattggaatcgattacatcgatgagagcgaggttttgactcttgctgatgaagatcatcacatcaacaagcataatttccggatcccgttcgtttgcggttgccggaatctcggcgaggctctgaggaggatccgtgaaggtgcggcgatgattaggaccaaaggtgaagctggaaccggtaacattattgaagctgtgaggcatgtgaggtctgttaatggtgacattagggttttgcgaaacatggatgatgatgaggttttcactttcgctaagaaattagccgctccgtacgatctcgtgatgcagactaagcagcttggtcgtcttcctgtagtccaattcgccgccggtggagtggctactccggctgatgcagctctcatgatgcagcttggatgtgatggtgtctttgttggttctggtatcttcaagagcggtgacccagctcgtcgtgcacgtgccattgttcaggctgtgactcattacagtgaccctgagatgcttgtggaggtgagctgtgggcttggagaagccatggttgggatcaatctcaacgatgagaaggttgagaggttcgctaatcgctccgag

SEQ ID NO: 150536 - DNA, 277 bp, Arabidopsis thaliana landsberg
ctaaagaagattgcatcaatgaagaagaagaaatcaagcaaggaggttgatggtgcttcaacagctgctgcaaaggaagcagctgcgaggaaggcaaagttggccgcagcgaagaaaaaagaaaagaaaaactacaatcagcaacctgtgaggtgaagaaatcaatccacccaccgttgtgatatgaacataggttttgttcatatgagacttacttgccttgaacaaatcttttgatggggaatgtggttgggtcgtgttttagagttactgatac

SEQ ID NO: 150537 - DNA, 211 bp, Arabidopsis thaliana landsberg
gatggaagttagagaactctttaggatgtctttgtttgttttcttctactttctagcgtgttagtgtacattggtgtactggagcaaatcttccttaactctttagtagctgacaagtatgatctacatttgtgttagtgtccatgtataatgatggcttgtgtatccaaacaacagcttctgatgcttaacagttacatgtttatgcttc

SEQ ID NO: 150538 - DNA, 455 bp, Arabidopsis thaliana landsberg
aaatcaaaaagatattcaaatgaaaacatacaaaagaaagtctcaaattttccagcttttcttcttgatcatgccattgaaaatggtcatcaagaaaacatacttgagttgcttatacatatggaaacaacaacaacagattgatacacaacaacaaaaaaagaaagaaagaaagaacaataataagtttaggtagaggaagagcctccacctttggaagaggaagtgatacctctgcaaccagcaccttcatgccattcaagcatgatctcaatctcgccacattcgacattgttaagtctaaggatcaagtcttgtgtgatcttaccattgttccaaacaatgctactctcatcagataaacaattgtgccttgaatggttgaacccttttgatagcacacccattaggtagcctcaaaagctccatccccattttcaaagcctctaagtatg

SEQ ID NO: 150539 - DNA, 431 bp, Arabidopsis thaliana landsberg
tactcagaaatattatggattttatttagtacctttgatatgtagagagacgactttatacatcacaccaagagactaataagaagtttgatagcttcagcactaagttccatacccataagaagaatcaaccagaaaagaaaaaaagcacaaaagaaatgaaagtgaggaagtaataaagacatatcaagtggtttgttcttaaacaaattaagatcattagtgtcctggtcggaactcgaaggaaggacctccacgtctgatctctcctttagaatgatgatctccattttccggtagcttgaacctcactgcatgtttgatattcggtggaggtggtcctcctccgcctccgccttcgcgcctctttcacctctcttgttatcaaacccgaattctatgtcctctcctccgtctcttccagaaggttt

SEQ ID NO: 150540 - DNA, 446 bp, Arabidopsis thaliana landsberg
aacacatcgaaactcgtttcttactctcatactccttgagcttcttcatttctatatacatcaacaagatggggcagatccgttgtgtgattttgacccgaaaggtgaaaacttgatcagtcttttattggatagttcttgtgagtttacatttggagataaacattgagtctgaataatgtagactacataacttcaatagctcagctgaacgttgcttcaaagctggatcacatccactttgtatcacaagcaaaagctttgcagccaaaccaacttcaacagcaagagatgaacattcttcagaagctaatttgcaaactgaccaaagaatcgatatcgcatagtttgtgcatttctctgataccttcatcagtaacctaacggtatgcggaatcgtgttaaccgaatctttcaaagcaattctgccttcgctttctaaacat

SEQ ID NO: 150541 - DNA, 286 bp, Arabidopsis thaliana landsberg
tttcttgattaaaaacaggttgctataatgggattgttacaaactacttagggcctaacagacccgcgacaaagaaataatcctcatgtcttaagagtagtatgcttttttttgataaaccttgtatggctcttgtttccgcaccagagattgctagtggtttgtctttgtgttttcgactctctaatccttgagtagcaaactagaaccttgagctcttgctcatttgtggagttcaaagacttttcagtccagatgcaaaaaatgtgaaatccgactttttctc

SEQ ID NO: 150542 - DNA, 622 bp, Arabidopsis thaliana landsberg; identical to SEQ ID NO: 10016

SEQ ID NO: 150543 - DNA, 198 bp, Arabidopsis thaliana landsberg
tcacagtctgcaattgattgaatgtgttttcaatacttatatactctacactctttctttctcttttacattgttcttgggtccttttgtaatactataaaagtctatacctggattcattggagaatttatggactattattgtatccctatttatactcggcattaaacttagttgttacaaagcctaacgttcta

SEQ ID NO: 150544 - DNA, 373 bp, Arabidopsis thaliana landsberg
gaagaatgtactggagtgcgaatccagatagagattcgagagctggatccttgaaattctcgtacccaacgctctcgcagacctgagctactgcagctttagcggctgcgtggctaaactcgtaggactcggagcagccagaggaagatgcggcatcgttcctatcaccttcttgagctctctctgtgttcattgctctaatttgtttcaaaaagctatctaatccctgaaattagggttttctcgtcggtaagaccacatggaccgccggtttaaagagaatcgaagaaatttgcctccgtcaacggaaaagacctaacgtcgacgaagcaccgggaaatatgaagagagaaagagagacagagagaaatgc

SEQ ID NO: 150545 - DNA, 1071 bp, Arabidopsis thaliana landsberg
aagccctaatctctgcttctgtaaagttcaacatttggccgagtcaaagaaacagagtgattctctgatccgattccggcgaaagaggacgaaacaaacggaacttgttcatcatcttctccagaaatgacgtcgtttcaggtgatgcgttcttcaaattcgagaaactcggatctatctcgtcgcatctcttctgcttctacttcttcttcgtctataagacctcaacaacagttccggcgagatctaacaagtgtcggttacggcggaagaaacgacggattatacagttcaaattcgatgacggtcgaagggattttacacgatactttcgcatcagatccaccagcaccaacggaatcttcactcttagatgcgtcgataaatctgatggatgcttctccagcaccaatggagataacaacaacgacggcttctgatgttgtggatcacggcggaggaacggagacgacgcgtggtgggaagagtgttgatgaggtttggagagagatggtatcaggagaaggtaaagggatgaaggaagagacgtcggaagagataatgacgttagaggattttctagcgaaagctgcggtggaagacgaaacagcggtgacggcgtcggcggaggatttggatgtgaagattccggtgacgaattacggattcgatcattctgcaccgccgcataatccgtttcagatgattgataaagtagaaggatcaatagttgcgtttgggaatggtttagatgtttacggaggaggagcgagagggaagagagcgagagtgatggttgagccattggataaagcagctgcacagagacagagaaggatgattaagaatcgtgaatctgcagctaggtctagagagaggaaacaagcttatcaagttgagttagaagctttggctgcgaagcttgaggaagagaatgagttgctttctaaggagattgaagataagaggaaagagagataccagaagttgatggagtttgtgattcctgttgttgagaaaccgaagcagcagccaccacggtttttacgcaggattcggtctttggaatgg

SEQ ID NO: 150546 - DNA, 323 bp, Arabidopsis thaliana landsberg
ttctgcattaaaggtgattaacaatggaaatctttgtaaggcgtcgaccatgtatatacatgtagacatatttttaccagttgtttttttggtcttgaagctgatcaacgctagtcttgttcgtcggtagatatcttaacattgttttcaacaatacatgagacagctcaattctcaaatcgtctaaaccagtcaacgatcgtcctggaaagaactcgagtttcgctaagaggaatggtctttagcgcctgagccacagcgtctgctggcgagtacacagacccaatttgccactttgggtcctggagacacataatgaagtt

SEQ ID NO: 150547 - DNA, 254 bp, Arabidopsis thaliana landsberg
gtttcgcgtctcttctcttctctctcagaaaatgctcatcagaaattgtctcctttttgtttccttgatgtgttttctcttctaatctccggtgaaacaaagaacaaaggattcataatacacaaagcagagaaggagagagagatacgaggcttttcttcatctttatggcttctatgaccgaaaaggaagctatggtggatccttttctggtcgaggctcttcaaaatcctcgtcatcgtctcaccagttag

SEQ ID NO: 150548 - DNA, 144 bp, Arabidopsis thaliana landsberg
gtacaaggtcaaatacaaacccgtaatctccggcatcataacaagaggacgggtcataaggttgataggcgtaacgtcaaagttcttttcttttggatcaacatctccgaggtgtctcgtgacggcgacgacgtcgagttcttc

SEQ ID NO: 150549 - DNA, 416 bp, Arabidopsis thaliana landsberg
gaagtcagtaaggatcaagacgctactccggttgaatcatcagcagctgttgaaacttcaactcgtcctaagaggctctgtagacgagtcttggattttgaagccgaaaatggagaaaaccagaccaacggtgacattagagaagcaggtgagatggaatcagctcttcaagagaagcagttagattctgggaatcaagagttaaaagattgccttctttcggctcctagcacgcccaagagaaagcgcagccaaggtaaaagaaagggagttcaaccaaagaaaaatggcagtaatctagaagaagtcgatatttcgatggcgcaagctgcaaagagaagacaaggacccacttgttgcgacatgaatctatcagggattcagcatgatgagcaatgtgactaccacaaaatgca

SEQ ID NO: 150550 - DNA, 238 bp, Arabidopsis thaliana landsberg
ttacttctcaataggaaccatttagtttacaaaacacaacagagaggtaagtcacgcatcgagaacttttttttctttttcttttttggtttctcgtttaattttggagtcatcaggtaatggttttgagtttgtcttgttgtgtctatagaacatttgtaacatcttttacttaagaggtatttaatcttctttatgtcaaagagtttgtctctgtttattggcattttcgtctaaa

SEQ ID NO: 150551 - DNA, 380 bp, Arabidopsis thaliana landsberg
ttttgtgacttttgggctccatcaaaactagtcaactttattacacagctccagattttggacatcaaaggctcagtgttgtcatacaaatgcttttgtgacttggtctctatcaaaactagtcaacggttttacaaagtaggtagagaatgttttcaattaccagctagagaaatctttaaaccctgtggaggctgacgcagtagtttttcttttcttagacactccaatggttgaaatatctgagtctagggaacctttagtgtctttagtggctgtactactcatagctttcaagtattttccgacaccaccgccacccgctccagcttctgttgttcctgatcccgggttgctgtaccacgacccgatcttctcct

SEQ ID NO: 150552 - DNA, 106 bp, Arabidopsis thaliana landsberg
aatggtagaaatggctcctttgtctgaacatttattttagttcataataagaaagatgatgagaaagaataggaaaaaaaaggaaggtgcttttgagggatgtcca

SEQ ID NO: 150553 - DNA, 843 bp, Arabidopsis thaliana landsberg
caaacgagcggacggtcaagattgtccgatcagtatcgtctttttagtcagtcagtcctgaacgccggctagatcaaccactccatctctcgtgctgaccacgctccgattctccatttctttcccttttgacttttcacttccaatttttcggtatcagatctcgacgatggcttcacaaatctctcagcttgcttgtttctcatccaccaatcgccaatttcacttccaaagccgatcgtttccatgccctatgattcgtccccaggtaaatatctcgatatcgcatgaaaaagacttggaatttactcatctcgattagattacgtccatgcccaatactctatttgttctacttttcctgattactctcaaaaacgtttgagcttgattgatttagtcgtaatcgaatatttgcttttgttttctagaaatggttctccttgagacttgaattgcttctctgttttctctggttgagttggttgggaatgtaccatgtcttcaataacaaaaaatgcctttttgttcacctttttgattgtctctatgtgctaattatcatatgttgagctctcttctaaattttttgggattgatagtgtctccactagtggcttattggctataaattggttcagtcttttgtagttaaaagtgttgatgggaatagctctgaaacaccagcttctctaagctatacagctgaggtttcaaaacctgttgttgagaaaacatccaaaccgtattccactgttgatgaaactgctaccaataaagagagcatcacagagccagtagaggaagatgttgcctcacaaccaataagagcagcaaagatcc

SEQ ID NO: 150554 - DNA, 166 bp, Arabidopsis thaliana landsberg
  unsure (1)..(166): unsure at all n locations
cccaccttatagaattttctcgccctatttttctctcaacaccaaaaatttgtattttttttactattgtttaccccaaaaagtattgagaatcgcanaaaaactgaattgtaaaaaatatttgagaaagagaaatacaaaaaaaacaaaaaaaaaagttttaaag

SEQ ID NO: 150555 - DNA, 442 bp, Arabidopsis thaliana landsberg
gtgaatcatcatctgaagagtttagactcaagtctgatgtaagtgttcatgtttgtgtatgtatattgtttttgtcggaaaataattaaattggtgatataattcatatgcatgataattctaaagattgcaagcataagaagtaggattagagatgaggagagattattagggagcgatctatcgctagcaatgatgacgacgactgtcagatcggaaaagcagcaatcggacggtggaggaaatcgagtggtgggaatggcagcatcatcaggattctctcctcaaccttccccttaccgcattcctcacaccttccacttctctcgtccctgattcatcatcatcatcatcactatcatcacaatcatcatctgagctagtgttaaccaagttatgctttaatgaatttgagttattctcgagctatttttgggctctg

SEQ ID NO: 150556 - DNA, 439 bp, Arabidopsis thaliana landsberg
gcctcaactacggaatacctccgtttcagctcgaggggaaggatggtaatggattcttcgacgacttgagttacttggatctggagaactaaacaaaacaatatgaagctttttggatttgatatttgccttaatcccacaacgactgttgattctctatccgagttttagtgatatagagaactgcagaacacgttttttcttgttacaaaggtgaactgtatatatcgaaacagtgatatgacaatggagaagacaactatagtttgttagtctgcttctcttaagttgttctttagatatgttttatgttttataacaacgggaatgaataatatacacttgtgaagttttgtgggccttagtgtgtctcacaatatttaaaacctttacagaggaaacactatacgatctccaaaaaaaactcatcattggattc

SEQ ID NO: 150557 - DNA, 267 bp, Arabidopsis thaliana landsberg
ttatcactcttaatcaaactacacattaagcaagcatttcttgagttttgaaacaaaacactgttttacgtgttcacagcaacatcaagaacaacaacaacaacaacaacatgaccgttttacaatacagccaaaaggcaaaagcttattctgaaaatacacaatacaatataatctcacacaaaggaccaatttgatgaaacacaaagccagaatgccaatggagcaatttttctttctttcatttaaggaaccttttcccaaggc

SEQ ID NO: 150558 - DNA, 261 bp, Arabidopsis thaliana landsberg
ggaagattaaataaaaaaagagaaagaaatataagagcttcctcaatcgatcttccatttttcttcttcttcattgtgaaatttgagtccaatgactgtcactggtcgaattttccacctgtagtcaatttgaagaaatttaaccagtttgttctactggaaaaatttctggtttcacacttgtgttgactctttcactggaaaaaaagaaacgaaaaaactccgaagagtcttctctgggcagtgtaagtaagctaatgc

SEQ ID NO: 150559 - DNA, 147 bp, Arabidopsis thaliana landsberg
gaagcatgtaactggcatcttattgactgccagaaccatatcgccttgttcaagaaggttttcagcttttgatcctgccaggcaacctttaacacgcagaacttgacgtctaacaggatccttcttgactaggacctgtgagaacaa

SEQ ID NO: 150560 - DNA, 158 bp, Arabidopsis thaliana landsberg
ggaaaccacgcaattcgcatacatgtaattcgccaaattgagtcggatgaaacgggatcaaaaaaaaatatgagtatggggtgccttacacgcgatcgaaccagggcttgcaacttgtcaattgacctccatcataaacgttagggcaacatgggctt

SEQ ID NO: 150561 - DNA, 63 bp, Arabidopsis thaliana landsberg
ctgacttcgcaaagaagaacactttctctctgaaatctcaaattcatctcttctcttccgatt

SEQ ID NO: 150562 - DNA, 93 bp, Arabidopsis thaliana landsberg
ctatataaaaaaaaaaaagtgagagagagagcaaatctgtgtgatggaagttgctcttgagtttgggattatttatcttttcaatatcatttg

SEQ ID NO: 150563 - DNA, 166 bp, Arabidopsis thaliana landsberg
gaaggatctagatcgtgcagcgacgctttttcatgcaatgtgctgaggccctttttaatgctttcattgcctatattatcattcccaccttctgcagtttcaatcaccggccaagtcaggtaaacaattataacgttttctcaggatttatccatcaaagtattcc

SEQ ID NO: 150564 - DNA, 624 bp, Arabidopsis thaliana landsberg
cgtgtggcgttgacaatttgatgatgatagatgtaataaacttgcaaatatttgcattatacattcagaaaacgagaagcaggtatttatcatttctatctggtgagaatttatagtcccccaagtcacactataagtccttgtttttcattttctagattgggtatgaattcaatggaggccaatgctatggaaatccttcgacgttttttttatgatatgataaacaatggatagagtcatgttccgttcccagggtacttgttttataaattgactttttaaggattcctgtttcactgatcaagtgtttgttgacagaatctcgctttgttattttcctatcttgctttccattagtttttgaaagtgctttcaatccaaagttctggcgttgagaactcgatggtgcaaaaaaagagaagcatgtatttatcatttctggtaagaattttacatgtaaatccttgtttttcatttttcattgcattggcctcgaaccttgatttatactgaaactaacagttatccattttctcttgttaatgcaattcacaccatagaaagcataaaaccaacgtataaagtcaaaaaggtttggactggtgatccttgctctccaag

SEQ ID NO: 150565 - DNA, 198 bp, Arabidopsis thaliana landsberg
aaaaataacattcatgaatcattaatcaaaggacttactaactaaggatcagtagatgatacaaaaagttttactacttaaatcagttctaagagaataataatcacaagtttaacaacacattgttacactctaatcaaatttcacaaatgtttttcttcttttcatctcaaatttcacatttccactaatcagaca

SEQ ID NO: 150566 - DNA, 507 bp, Arabidopsis thaliana landsberg
gcgcgtcacgaatcgtcaagtagctcgacgcaagatcgtaagctgagcgagcacgtggcgcatgtcgacgaaggaaggaaagcagacgagtaaagagcgtggctgaagtggtggagcgtcatgttcacagtcacgtggatgagatctttaagaaggaagcggcgagtgagccgggaaagtccatgagtgagtcaacgcataactcggggaaacgagttaactcacaagctttagagattgcttgactcggtttacgagctagacctgggactgattggtttaacttgagacgtgatctgactccggcgaagatcgcggcggcgaggataagtgagatggctaagacgatagatgatactacaagcttctttttgcttcttcggttgttgttctccggttgttctgacgtggagacttggttaaggattggagctgtagtagtggaggtggtgaccgaaccagttgctccggatggtccgagcctttcgtatcccattttgtttcttg

SEQ ID NO: 150567 - DNA, 402 bp, Arabidopsis thaliana landsberg
gcaggagccggagtgattggattatcgttagctacatcgaggaaatgcaggcaagaacagagattgttcacatctgtccttaatctaaaaagactgtatatgttcatattgatgaaaagattgacccaatactttatacttaaatctgatttcagttctgtcaaatgcattgaggttaacaaagaagcaaggctgtcttttgagaaaacaatccagcggttgccgaactcattgaattgcagcatcagttgccaccatgcagatgcttcagttgtaagtagtgttgcgtatgcgcaaaaatatttccaatttttcaaaagattataataatgtggtttaccttgtatcaaaattctgcagaccctctttcgtggataataggatccgatgtagtcgttgtgg

SEQ ID NO: 150568 - DNA, 563 bp, Arabidopsis thaliana landsberg
gtcgccggcatattgatcttcgccggaggatatggcgatttcagaagaagaagccaaactcgaaaggttcctagattggcttcaggttagatccggattaagtgttgtttttcagtcctgatctgctgctctatatcatggcattttgtgtttcgatctaatttcattcaggtgaatggaggtgaattaagaggctgcaacatcaaatattctgactccctaaaaggatttggcatattcgcttccacctccactcaagcttccgatggtatagtattgttcttaccatttcttgctgggtttttttccggggaatatgtatggaaagttgatattgaattctgattcagctctggaaattttcagaagttttgcttgttgttccgcttgatctggccattacccctatgagagttcttcaggaccctctcctgggccctgagtgtcagaaaatgttcgaacaaggacaagttgatgaccgctttctcatgattctgttcctcactttggagcgtcttcggatcaaatcttcttgggagccgtcagttattatttttatctat

SEQ ID NO: 150569 - DNA, 382 bp, Arabidopsis thaliana landsberg
ttttgggtcaaaccttttaacaataccaaacctacacatatttttgttccttcgtccttgatgatatgagagattgctctcttatacttaccatgtgatacgaaatacaaagtaggaaccagagatgtgttagatacattcaataataaatcatcgtagaccacaaattacgcgttacttgagaggcaatcattgtctcccaagtgtctctttcttttttcctcacaaacactatacagagactttttaattactgcgtgaagattacgaagagcataacgagatgcgttgtttggcgagtaactcgttaagcttcttcatgagcttaggatcagagcatatatactcttccattgactttctcagattcctcagtgtctct

SEQ ID NO: 150570 - DNA, 187 bp, Arabidopsis thaliana landsberg
ttctaacgtggttcttggattcggtattggttgtggtatcgggttcgggtttggatactgatttggagttggcggcgggtacagtttcgatgacatcaaagagagatttgacctatgagaaaaagctccggttcataattccgggtcgggtttgggtaaaagatttttaaagcattatgttaatttt

SEQ ID NO: 150571 - DNA, 427 bp, Arabidopsis thaliana landsberg
gcctgtgttttcaggttaaaatgctaaatttcaactgtgataagtcatgatgttggcatatataactatacaaaacacagtgaagtaaaacacaaataagtacgagcttagagatttgatgcgtcgtaccgtgaacctaagaagagtcattcctcattgtgacaagctactttctaagagggtctcagactcagagagctgctttcttcacctcgaaaaaatttgagcgttctctgtttgctgcatcaatgtcttcttgtgatgccacggccacggcaacgcctttatcactaacagagtctattgcctctgcgaattccttgaagtccttcaaactgaaaaaggataaaatggaagttacttttcttatctgtttgataataactatgtcgaagaattggaactggctatttggtaatattcaaag

SEQ ID NO: 150572 - DNA, 359 bp, Arabidopsis thaliana landsberg
gggcaaaaacctgaggagaaacacttccaagtcaaatcctaatcttcctttttctttttaccccaacccctcttctctctatacacataatagtttctacatctaccacggtccacaagttcgtaccgtcaaagagtccataatatcttccaccaatgcttcttttttggtctatcaatccaactagttagttcaatccattttaaaacagccggtcattttggtcaatcactctaaaaagaaataaaaaatagaaagcaataagcatcaacgttccagttatgctgattttcgtagctaagggatgaagtatggagtgtctcttttgcagtttttttatttatttagatatgttgtga

SEQ ID NO: 150573 - DNA, 233 bp, Arabidopsis thaliana landsberg
gagaaatcacacattaatgctcgaactcggggctcaagcctaaagaattttggtactgtgagattcactcactgatctcactttctttgttgttgttcgtttttgctgtaaaatctagttactgtgagtcaagtgaaccagcaagtggtcatcaatgtgtaagtcctgtattgtggtgtcacttgaatatagatgactcatgtgttaataataaagtttcgcaatgtcataca

SEQ ID NO: 150574 - DNA, 181 bp, Arabidopsis thaliana landsberg
ggtaaactctaagaaacaaaagatattataagccaactttatcccccaccaatcaacaaaaccaaaaaaaaaatgtaagtaacaaaagaaagaaatattgatgtagattttgtatgtatccttgtcaaatgtaaataaaatgtacacctgctgctgaatcagaaaccaactaaaagtcatt

SEQ ID NO: 150575 - DNA, 78 bp, Arabidopsis thaliana landsberg
gaagagcaaataaagacctgatcaggtttatcatccatgcttggggttctgtatcattcacgcatcgtaaactcgcca

SEQ ID NO: 150576 - DNA, 99 bp, Arabidopsis thaliana landsberg
cacaacatcatacccaccaacatatataatcttgatcataaaaagataaacagaggccgctatcaagaacaagactaagaacaagacttcacaggagtc

SEQ ID NO: 150577 - DNA, 218 bp, Arabidopsis thaliana landsberg
ctagtcctgaagtccctatcactcagcgggcgtgcaacggttaaagtttcttagataaccgttgagtttgttaaggcaaatatacaagattctacgaagtataaaatacctaagctcatgtactacgtggcgttccggacatacatgcattacgattaaactcaactaaaaagaatagtgtaaacgatcaaacaaaaccatataaaccaccaacgtaa

SEQ ID NO: 150578 - DNA, 249 bp, Arabidopsis thaliana landsberg
aggtatgtagaagattttgaaagcttcatgcttcaagatacttcttcgtattattctcgcaaggcgtcaagctggattcaggaagattcttgccctgattacatgttgaaggcatgactcgtgatatcattttctaaaatttgtttttatttcacaatagttgaaattatttattaacttctgtgctttcatgttacagtctgaagaatgtctaaagaaggagagggagagagtggctcactacctaca

SEQ ID NO: 150579 - DNA, 85 bp, Arabidopsis thaliana landsberg
aatcgtaagctatatgtttaatcttctgcacaagtcagaagcctgaataaggttgctaagtcaatcacactatactcattaatgc

SEQ ID NO: 150580 - DNA, 321 bp, Arabidopsis thaliana landsberg
cttctctggtcattctgctattcccagcttgaggaatcagagaggaagaagccattgaagctaacacaagcgattccaggtgaatcaaagacattggagtatgaatctaacttaaccttggagcagtctggtgttgccaattccatgatgtctgctacgtgggaatgaaatatcatcatatctataaaattatctattatggtgtgtttgtttcttaaggtttatcagattagttgtttaattgtttttaaactcgacttttttttatgaaaagaagaacacattatggcccttgatccccaatgaaatggaaaaatcgtc

SEQ ID NO: 150581 - DNA, 574 bp, Arabidopsis thaliana landsberg
tttaattagaacccccaaaatctcttcacaactgtaaaaccccaatcacctctttacatgtgacttccttattactctcttcttcttattttcctcctcttcttcttcgctctagtttcccccaacaatcgccatggcagcttcgtctctcaatctcctcctcattctctctcttctcactttcatttctctccagagatctgaatctctttccgataatccatctctcactcttctacccgacggattcgactggccgatctctcactccgatgaattcgatatcatcgacggtgaagaaagcttcgaagttacggaggaagacgacggcgtaacagatcgacggtcattgtactggcggaggacgaagtattacatatcgtacggtgcattgtcggcgaatagagtgccatgtcctcccagatctggaagatcgtactacactcataactgcttcagagctagaggtcccgttcatccgtatagccgaggctgctcgtcgatcactcgatgccggagatagatgaagaaagcttaaaactccatgggcattttcgtaattttgccaaccatg

SEQ ID NO: 150582 - DNA, 1329 bp, Arabidopsis thaliana landsberg
ctcgggaggaaagtacctgaaggaaagtggtactgtgaaggttgtagacccgttgcacttggatcagctagttcccaaacgcatattatatccgagcaacaaaggggtagtggcttttacagtagaccgtcacctcttgtagtttcagggcaatatcaagatgtgtctttaatagtctccccacgtacaccatttttcaatggagagaacctattttctccaaggattcctaatggtgatgctcaaggttcttctccatccggcttaggggcaaccacattatccagaagaaggacgcttcacagacacatacaaaatattatcaacggtgatagacttattaatatgggtgctagaactggtggaacatcgagtgatggtttcgtgactacacaaataggtcatggcagaacaatcgacccatctcagcctgtagcgagccaagaaacagggatatcgttgtatgcaatctctgaggaaagactacccaacaacaattcattgatttctgcccatgaccctgagcttttgtctccaaagttagatgaatttggaagtgaagaagcattcagacgtttgtctaataatacatttcttggtgagcgacctatcgatttaggattccatcatggactggctcagggtgatcccttggttagtaatcaacaacgtctacacagccacatgccaaacacaatgtcttccatggcaggagaacgactgcaagaaagagttaaagcccatctcaaaaacttgtccagtcaaaacgacttaggtacacataatccaattctctcttcacgctcttggtttaacccgttatagtcttgtttccagtttccagttacattatagattcaactcttgtctgccctctgattgtagtgttttgggtactcttcctctgctttattcaggtcaaaccactttcgacgagatttccacgtgctcaatacacacgatactggcagcttgtgggcttgaacacgagagcagtgaagtccatcttgttccgccaccagtgacgtgtactcaccatcatatgacacctggcagcagcagcagtagcagtagtggtagtagcctgatgaaagggtgttgctattcttgttttgattcatttgtagaagatgtagttaagatgattctagacacaagacaaccccattggttgagtctagggctccactaaacccacttgcttcaattgtctagatttgttagaaaattcaatttcttttgttaagatcctcaatcattacttttagcattgtacatgatgatacaagtgcgattaattttcattaaaaaagaagtttaactttttat

SEQ ID NO: 150583 - DNA, 433 bp, Arabidopsis thaliana landsberg
aagttttaaagaataggaagaatataaagaagaagaagatggcgaaccacaaggatttaactgagatagtggatttagaatacgtgcctcgggttgataggaagagggatcgtggtaagttaagccaagaaatgtatatggaagacgaggattttgaactgtatgattttgataaggaccggatgccgaggagcttcaagaaagggcagatttgggcgatatatgatggtggtgatgacaaaatgcctcggagttactgtttagttagtgaagtagtctctttgaatccttttaaggtatggatcagctggttggattttgagagcgagaaactaatctcttggatgaagattagttcttctcatatgccttgtggtaggttccgggtttcagagaaagctttgatagaacaagtgaaaccattctctcacct

SEQ ID NO: 150584 - DNA, 347 bp, Arabidopsis thaliana landsberg
accctgagatcagagggagcttcgcttggggcatcaagaagaagaaaggtggtggaaagaagaagaaaggtaagaacttaaaataaatttccagacttttaccctatatgacgtgatccacatgttgattaaaaaggttcaatttggtgtttcgcagcacaaaaggcgggagagaaaggagaggcttcaacagaggctgagccaatggacgcaagtagtaatgctcaagaatgagtaagaagatttgtctttgtttcttttaaagaatttttgaaacttgaggtacctctttcgttgtatgtttgggtttcaagagagtctcttcttaaacaaaaaaaaacaaacaa

SEQ ID NO: 150585 - DNA, 136 bp, Arabidopsis thaliana landsberg
ccagaaatgctgttaaaccagtctctccattagccaaagccaatacgaaagaaacaattgcagccacaatcaatatcttgacaagtaaatcatcaaattgtttcagaaccagtttccagaatggcgttcctgcatc

SEQ ID NO: 150586 - DNA, 265 bp, Arabidopsis thaliana landsberg
atccattcaggcccaactttggtcgtcatggccatggctttacttttctcaaggttcactaattgggtatggtgcgggacccacgtagccgggaggtggtagacaccattgaacgtttcttggtgaagatccaaggccagtattatgtaactcacactaatttgtaaccagtagattgatccattcacacacaccgatttacttcccactcgcattatatgaggaggtgacatcagtttgctccattcgccagattcaatatcaa

SEQ ID NO: 150587 - DNA, 99 bp, Arabidopsis thaliana landsberg
gcctacgttacaggcaatggtaccaagaataaaaactggaaaaatatataaaaggtcgttggtccatgcgggttccccgtaataattgtgacccatacc

SEQ ID NO: 150588 - DNA, 294 bp, Arabidopsis thaliana landsberg
aaataaaagagaaatataaaagtgaaataggcgctgatatatagtgatatgtggatagaggtaaagcaacatgaacacaatgttttcgatggtggtttaactagactacctatagctattctttcgtttttttctgaattatataggaaacaacaagaccacaatcttttcaatgataagaggtcccaattaaaacaacaatggaaatactagaataattaagctgtgacaatccgatttggagttagattaaaaattgtaatgttttgtatttgactttttccagtaattcct

SEQ ID NO: 150589 - DNA, 693 bp, Arabidopsis thaliana landsberg
  unsure (1)..(693): unsure at all n locations
atgaagatcgggattaattttgcgtgatctttgaagtcttcagaaaagaaatatcttcccctgaactcatctcaagtgcttgttttgtctgatctttcctgtataagcgtttcttctccttctctttgacttcagctctggagttcttttcattcactgttttcgaatatgaacctaaagatttgtgttttcacaatctgaatctgtttgtatctggttaataatggcgaaatgataaaccttgcaatctaccttctgttatgagaatagagtttcagaatcagaatcagaatcattctgtttaaaatttggtttaagttgtattacaagtacatgcaaaagacaataagtgtttttgtagcagatggatcaagttcgaaacaatctttgtactgaaagaaaccatgtcatctatacaaagcagaaacagaatttcagaagaaaaaaattaaagttggcagttttcatgtctccaaagacatttgcaggtgtcagtttttttacagcttcttataaccggccgttctgttgttgtagacatggagaagactatcacaagcttgcctagaagatggtctctcttggggagaagttnttgtgcactgaagtgcaatctcaagcacctgacaagctgcgtcttcctcaaatggcacaagtggcttaagctntggatctatgagnttatctctcgca

SEQ ID NO: 150590 - DNA, 110 bp, Arabidopsis thaliana landsberg
agggttgcacattatggtgaacttgatgctgagtgtataaacgcatactatcgatatggattagctctcctggcaaaggctcaagctgaagctgatccacttgggaacat

SEQ ID NO: 150591 - DNA, 103 bp, Arabidopsis thaliana landsberg
tccattttagctttaaatcacaaaaaaaagagataaatttcttcaaagaaattataagttgacaccgccctttttataaacaaccctaaaagtgtaaaaataa

SEQ ID NO: 150592 - DNA, 744 bp, Arabidopsis thaliana landsberg
tgtcttcttcttctacataaaattgattcgcctcgaaatttacacagacttgtcgctctctctttctctcttatttcacagagcccctaaacatttccaaaaatcttgcaaaggaagaaaaacaatggacaaattttggactttcctcactgctcttcattcaggcgctgggtaattattcttaatcttaattttccttccattatgtttccaaaattagttactttttgatttcctctgtttcgatttctaatccaaaccgtaatcgatttgttggtaatgtatatgcaggcctatcgtgatgttactttatccattgtaagtttctctcttgttaaaccctttaacaaaagaaaaagtttctttctggttcgatctctctactttttgttgaagatcaaaaacaaaaatctgtgaatatttactaattatgtttttgattacaggtacgcatcggtgatagcaatggagagcacaacaaaagtggacgatgaacagtggcttgcgtattggataatatattcgttcctctcactcacggaactgattctgcaatcgcttattgagtggattccgatttggtatacggtgaaacttgtgttcgtggcttggctagttcttcctcagtttcaaggcgcagcttttatctacaaccgtgttgttagagaacagttcaagaaacacggcgtcctccgctccacccactccaagcccaccaagcccaacatcctccactccattttc

SEQ ID NO: 150593 - DNA, 344 bp, Arabidopsis thaliana landsberg
accaattctcatattaaaatccacaatactcaaatccccaaaataaacaaaccctaaaatttaaaacaatgaaatgttacaaaagctcatcaattctctcaaccaatcaccacccattcttctacaaacaacaaccaatctcctctcttcaaccatcttccttcccaacaactatctcttacccgacccgaacccgaacccgattcatatccacccggatccaatctcgattaacccacgacgatccagtaaaacaatcggaagacttatccttctacgatcttctcggcgtcaccgaatcagtcacactcccagaaatcaaacaagcttataaacaacttgct

SEQ ID NO: 150594 - DNA, 324 bp, Arabidopsis thaliana landsberg
aactgggccaattcaccacgagaaaacctaaattttattgaggtagcttattgcacggcggcgattagttgttttacttgttacaagaaaatcattccacggcggtggagaaaaaacaaaagagagcgagacaaagagagactacaatggctgttccaagaggaggaaatggtttgaatgaagaagaagatgttgacggagaaaacgctatctttgaggaaaacggtgttgactacgacaccgattccgagcttccctctcacctccgtgacttggccgccgctgctcaggccggagatgtcgccgccttgcgcaccgccatcg

SEQ ID NO: 150595 - DNA, 640 bp, Arabidopsis thaliana landsberg
cttgttctgtaaagactatatgtaagagaatcaaattcaaataaattagattcatcaatcagttggataaaaacttggctaaaaagtgtattttaatgtgtttttaaaagggacagaacatgaattgggttttgtgtagagtgttcttgaagaagagaagcaatagtaatagtaagaggaaagaagatgagaaagaagaggtggagaatgagaaagagacagagacagagagagaacgtgaggaggagaacaagaagagtacttgtcccatattttatgactttatgagaaaagacacgaagaaaaagagaaggagaagaagatgctgtgatttgaatttgactcctgctacttgttgttgttgctcttcttcgacttcttcgtcgtctgtttgctcaagtgctttaactcacacatcttctaatgataatcgtcaagaaatcagttatcgggaaaataagttttgtttgtttctatagattaacaaacttgggaacaacttctattaactttaataaattagtttatgattgtttccaaagttaattatgcaatccaggagtctttcttggttttggtaattaatagccatattttatagcttatctaattgtatcaaatgttgatatctggttgatca

SEQ ID NO: 150596 - DNA, 477 bp, Arabidopsis thaliana landsberg; identical to SEQ ID NO: 14186

SEQ ID NO: 150597 - DNA, 238 bp, Arabidopsis thaliana landsberg
aaggttctggtaatagaagcaaaaaacggggcgttggaaaatttctcctgaagctcaagccatcagagaagctcttaatccttggaggaacaaggacgcagaaacaagcaaaaccccataaatcattcaaggagctctttaattctcgtttaagttcatttcactctcaaaactttcgcaaatgctgcttcagtttcttactgcttgaaagttcaatatttcattttagtattttttg

SEQ ID NO: 150598 - DNA, 901 bp, Arabidopsis thaliana landsberg
gtttctctgatgagagacaacgaaattcactaagcagcaaccctaaatttacactcctggttagtaacattttatctcaatttcgtttatttatcaacaaattatgtttctatttgcttcaatttcttaaatctccttaaaaagtttcgttttttcccacccattttgatacgaaatgtgtccaatttttatccaatttggttataatttcttattgcatgtccagtatttttcaaattttctattaaagtttcaatctttttgtataaacactcataaagaatcaaacttttgatgttgtgttgtgtgtttaggatatgagtgatacaatgcctgagatcgtgtctcctttagtagctgaaaactctcaagaacaagaagaaagtgtgttaatttcattggatattgaagaagacaagttgtttctcttacatttcatcataggaacttactttggaccagatttaagaaaacaacatcatcgtccaaagcaatcagcttttcagattcaagcgttgaagaatgttgtggtagatgagttaagtggctcacttatgaagagagctgagctagaacgtgtgtattatcacattattagaaatgttgatccgtctctagtcatgaagccgaaaaagttacgtgaatatttcaatgcgaaacgcaatgattcgaacagggattaccctcttttcgtggatctttttccgcgaaaattgcaccctgaaacccatgttaggcataagtttaagtttatccggagcattgtgttcattaatgatccagatacttcttgtatgagagaagaatgtgttgcgcggtttaagcggcttacgggattggatagctttgctttgagccttagtgttgatgtaactaaaagtaacggcgttgttgcagctaa

SEQ ID NO: 150599 - DNA, 57 bp, Arabidopsis thaliana landsberg
ggagacaaagaatttgaaggttttttattcacttgacacaattaaaatcataaagac

SEQ ID NO: 150600 - DNA, 563 bp, Arabidopsis thaliana landsberg
  unsure (1)..(563): unsure at all n locations
ttgtgatatacaagtggaatcgactggtttcgtccgaagacgcaactatgtaggaaacacttgtcgtatggtgcaactggtggtttattatttgtcagaggcaaagcaggggagagatntgcggttagaaactcctctagctcaagctgttgttgaaggcactggagatcattgctgtgaatatatgactggtggttgtgtcgttatacttgggaagtaagtagaactctttttctcagcctctagccctaaaccaaaacctagaacttaagagtgtcttaaacgccaaatatcttaatagtttctttctgaaaattgcagagttggtagaaatgtagccgctgggatgacaggtggattggcatatatccttgacgaagacaacactctcctccctaaggttaaacatcacaaattatcttgaagatattttctttattgtttgtgaaacattgaaatgaatcgcattgaacaacagatgaacaaagacatagtgaagatccaaagagaaacttcaccagtggaacaaacacagcttaaaagcctgatccagggtcatgtgg

SEQ ID NO: 150601 - DNA, 224 bp, Arabidopsis thaliana landsberg
tcccgggggcgtccccgtcctcctacaccgagagtagcggtgctttctatctcaaccaaaggaaaaggcccataagtgaggaagttattttatgtctcaacactatgatttttgtatttagtttgatgtaaaatttacaggccaaagagatccaatctttgtaaatcagatgattacattaaagaaacaaatcaaaaacagattaaaacaaacaaaaaaaaaaa

SEQ ID NO: 150602 - DNA, 1239 bp, Arabidopsis thaliana landsberg
ccaacacctcttcatcttctccaaatcaatccatcaatggagtcttctcccatctctctctcttcctcctcagatctcacactctgaaaatcccccaaagccatgtcttaccttcttcgctccgatccggtctcacgaatccacccagaacctcaatctctaacctctttcgaccacttcgatctcctccctgactctctcctcctcttaatcttcgacaaagtcgccgacgtcaaagatctcggccgttgctgcatcgtatctcgtagattccactctctcgtccctttcgttgagaacgttctcgtccgtgttgattgtgttatctccgacgatgattcctcttcctccgacgagaatcatcgattctctttaaacactgcatcgatctcagacgccggcggtgctggtggctccttctccgccttgttccgtctcgtattcgctccaattttcaaaccgtttcaaatgttagggcagattctaggaccgaaacgatcgtcttcttcgttcgatgcgtcgttttcagcgattaacgatgagatcggcgtaacgcatcactctccgactcaggtattgaaaaacttcggtgagattcggtttttgaaaatcgaacttcctacaggagaattaggtatcgaggatggtatattgttgaaatggagagctgattttggatctacgcttgataattgtatgatacttggagcatcttcggtgattcagtcgaattcagtgaagaatcatgagaattcggttgatgaagacaatggtaacatacctgagtcgttttacactaatggagggcttaagcttcgtgtggtttggacgataagctcgttaatcgctgcgtcggctcggcattatcttcttcaaccgattatcaatgagcataagtcgttagatcgtttggttttatctgatgctgatgggcaaggtgttttgtgtatgaatagagaacagcttgaagagcttagagttactcctttatcagcttcttctgcttcgaagaggacgcttgtgcctgcgttgaatatgaggttgtggtatgctccggaattggatttacctgatgggacggtgttgaaaggtgcgacattggtggctattaggccgagtgagtctaagaaggaagtttgtgatgcttcttggttgtctgatgcttttgaggaaccgtttgggactgcggcgaagatgttgatcaagaggaggacttattgtttggagatgaactcgttc

SEQ ID NO: 150603 - DNA, 192 bp, Arabidopsis thaliana landsberg
atcatcttaaaggctttaggctctaaaagaaaaaatagaaaaaaaaaagcgacctaaagccatgtcgaaagcttagtaaatttctccatataaaatcttaaccccttaagaaaacaaggaaaaaaaaagaagagattgtttaaatattatataaaaaacctatttttctgagaaagaaattttttgaaaacc

SEQ ID NO: 150604 - DNA, 525 bp, Arabidopsis thaliana landsberg
tacgaccactagtactggtttggtgtatttcccattgtacgctttggatatgcatgaacaagggaggtatatggagctcgctgatccgaggctagagggtcgggtaacgagccaagaggctgagaagttggttcggatagctttgtgttgcgtccacgaggagccggcgttgaggccaacaatggcagcggtagtgggtatgttcgaaggaagcataccgttggggaacccgaggatggagtcgttgaacttcttgaggttttatgggctgaggtttgcggagtcttccatggttgaaggacaaaatggggagagtgaaactatggtcttccaccggcgagagagctctaatagtggcggctctaggcagtctgcgtcttacatagcgtctcaggaagtgtccggcccgcgatgagatcgcctaaatgtgaattatttttgtcttttgttttatttggttttggttactttgttaatagtgataggccttgttcatataatctctactatatatgaaaattattg

SEQ ID NO: 150605 - DNA, 649 bp, Arabidopsis thaliana landsberg; identical to SEQ ID NO: 6577

SEQ ID NO: 150606 - DNA, 57 bp, Arabidopsis thaliana landsberg
agacccaagaagctaaactgttgtacggatcatcgttgatgttgtctttgaattgaa

SEQ ID NO: 150607 - DNA, 319 bp, Arabidopsis thaliana landsberg
  unsure (1)..(319): unsure at all n locations
aaagaaagganatagctttgcatacacatagtgacataactgtgcgtgaagctacctatcaggccttggtgcatacgtttccttcacaaacccaaccatctttggactcgccaccttctttcacagcctcatcgccgttttcttttgtgtcctcgtttaaagcacacttggcgtgaagatcaaagtcgcattcgtcgcaatggtaagaccatattgtcccttcttcctcacacttatcgcatgtgtaaacctgaacacgagttagttctagctcatgttcttcatggagaacatgtttcagcttcttaggccactcttt

SEQ ID NO: 150608 - DNA, 604 bp, Arabidopsis thaliana landsberg
ctctgggactcacattcatccaatccaggtaaaaatcaaatccactaagttttatttctcttcattgttgttcttgcgttgatccttcatgatttgatcggaatacatggaaaaaggtggtgtaattagatcgagctttttgtttctccgatctgtttgacatttaggttgatctagtgctatcatgtgtagatcgaacattcggatctgtatttcccacgaatcctcttgattcacgtgatatgatcattgtctcttagtacagagatgcattgtatgttctttggtttgggatattccactaggatcctagttgatgatatctaatgtgatgcgagttctctatggtctttggtgagaaactttgttttggtgattatagcctcttacaactactaaaaactgtgattacactttgtttgacttttacaacccattgcctgctgtgattgatgaaacaactctcggcggtgaatgcttgaagtttgtctattctttgatactctaagcttttgtttctggggcactaattgacttttcttgctgcttaggaggcatgtcgacatctgaagataaaccggaaatcataagtagagtagttcat

SEQ ID NO: 150609 - DNA, 213 bp, Arabidopsis thaliana landsberg
caagaatggattgagtatttatgttgattttgaataattttgaagtaatatggcaaggtaaaccttatataggctgaaaatggttaaacccataccaacctactgagcccaataattggcctcaccattttgctggtcaaacctatgttccacccgagaatctaagaatgacacgccccaccactagcatatgctcatcttcttgcctctgtt

SEQ ID NO: 150610 - DNA, 353 bp, Arabidopsis thaliana landsberg
tgaacggtaacgacaaaaccgacatcgggatggtggtaagtctctcgattctgtgtccctttgtcgttaatcttctgctgctcttgactgatgttttactttggttttgggagcaggtgattagaggaaacagcattgtcactgttgaagctcttgaaccagtgggcagatcttcttagctcgttatattcattggttatgatctttttgtactaagcactagctatgagaaatcttggtggtagattcgcagttacgatgaattgattctgtaagaagtctacatgaatactcttttcttgtactaaaaagattgcaatgaacccccaccgatgaatgtgatggcttgtact

SEQ ID NO: 150611 - DNA, 207 bp, Arabidopsis thaliana landsberg
atgtgattaatgatgcagctggcagctcaagtggaaacacgatgaccccacaatgttcttcaatggattcactgaagcttttagatggtaaaggtaaaaagagattaagagttaactatgctggtttaaaacaaagagaaaaagctttatttctttacatagcatgtttgctcggtggtgagaaggctgatttgctagcacaatttc

SEQ ID NO: 150612 - DNA, 237 bp, Arabidopsis thaliana landsberg
gttcccattgctaactacagtgaaaagaccaaaacttttgtatatcaggaagaagggacagctgtttttaagctatacgctgtccattcagggcatgagccgggggctatggatggaaatgcgagaatcatgcatcgggttgttggtcataagggttttttgatggatcaagagactgtctacggagtgcgggacgaagacgtggaaaccgaagggatgggattgactgggaaggat

SEQ ID NO: 150613 - DNA, 325 bp, Arabidopsis thaliana landsberg
aattttcttccttttcacacagagacatcggaggagaaaaaaaagggcaaaaacaaaaaacaaagatccgaaatttttcctctggaaatatctcagtgagtgtctgtgtcaaacaaaaaaaacaaggaagaaaatttactacatttctgtattatttagcattaaaaggatctgttccaacgataattctctgtctgtgataaaagaaaaattgaattttttcttctatctatctacctctgctcttcctcgccatttcttacccagaaaaatagaggataacaaaaatctgtttctttcgatgatcatcgtgacactatctctg

SEQ ID NO: 150614 - DNA, 209 bp, Arabidopsis thaliana landsberg
agagaagataaaggatggtagcaatgggtctgttgcagataactcttaccatctttacaaggttattttccattatttccattggctacataaccagtcacattctttgattatcattattaagaagaaacaagatacgttgcaggaagatgtggcgttattgcatcaaattggggttaatgcatacagattctcaatctcatggtcga

SEQ ID NO: 150615 - DNA, 698 bp, Arabidopsis thaliana landsberg
  unsure (1)..(698): unsure at all n locations
agcttatagacaactaagaaaaaaaaataaaaatgaagatgtttatctctcctcaaaccctagtactattggcattagctcttgtcctagcttttgcagttccactgaaagcccaagaccggcgacaagactaccttgatgtacacaaccatgctcgagacgacgttagtgtgcctcatataaaatggcatgcgggagcagcccgatacgcctggaactatgctcaaagaagaaagcgggactgtcgtctcattcactcaaactcacgcggacgttacggtgaaaacttggcatggagcagtggtgatatgtccggagctgccgcagtgagattgtgggtcagggagaagtctgactacttccacaaatcgaacacatgccgtgctggaaaacaatgtggtcattatactcaagttgtgtggaaaaactcagagtgggttggatgtgccaaagtcaagtgtgacaatggtggaacctttgtgacttgcaactattctcatcctggtaatgttaggggacgtaggccttactaactatatgtgtacgcagacgaaagaaacttgtccatagaggacgtgtgtgttttctataatttggaataaatgatcacnnnnnnnnnnnnnnnnnnnnttcctttgtacgtttatagcttgtataatattttgtcatggaataatacttttttcttgtgtgtgctt

SEQ ID NO: 150616 - DNA, 301 bp, Arabidopsis thaliana landsberg
catgaatgattggttgaaacttaaccattctattaaccaattgcgacccggtgacgatccatgaacactaaaaggcatatcttgagtcattttcatacaaatgcatacctttaaaaccacacaaatccgtagaacgaaactgataaccataatatctaaaaagatcactcaaataacaattttttcatcattaccaaatagagagactttgacttagaagagttcagtttccttgtgggtatggatcacacagtcagactgtgggtaagccacacaagtcaaaacataacccttctgcaag

SEQ ID NO: 150617 - DNA, 359 bp, Arabidopsis thaliana landsberg
caaagtttcattttcatattaacacaaaatctccatacatattaccaaaccaaaaagatacacaagggggagagagaccaactgttcttggttcagagtttgcatcttgtttgagccgtcaccgtttcttagacttaacagccacaacacctttataaagcttcacgcgatccttcaacgcatctcgccgaggccgagccaccttattgtttggatcaaacaacaaaacttcttcaaacgcattcaatgccaaaggaagctccttcttcttctcataagcatccccaaggttgttccaagctgttacataaccgggttgcagcttcaccgccatttcaaactgagcaattcctttgtca

SEQ ID NO: 150618 - DNA, 567 bp, Arabidopsis thaliana landsberg
ctataacatttcattatctttttagtgaatcattgggatacaaaaaaatatgaccacacagagggtcaatgtgtttaaaactttgaaatgaagaagtttaaatgagagataaaacatagaaaaatatatgaatcatattctttttgtacatactcatgacctctctctctctcctataagcaattgtacaaagaaaaatgatctacacacccaaaaaggttttcaataaccttagaacaaagcacgagcatgccccatgtatgattgatactttgcttggcatgttcctctgttcttgtctttttactttttgtccttttcataaacaataattaaatgttcaaataatgatgataacaatcaagtcttgatgcttacgcttggcgacttctggtcttgagctttaggtcttcgatttttcttagaacccgaagacgaagaagaagaagaagaaggatgattaccacttgattttgctcgaatgtgtgaacgatgattatcaggtgtcgatgaagacggagaagaagacagtaaaggatctgatcgtgatcggtttcttagtttctt

SEQ ID NO: 150619 - DNA, 144 bp, Arabidopsis thaliana landsberg
cccttgcaaacttcttgtctcttgggaaagaataatggcgtagttatatcaaaacaacttacccttttgtcaattacataaaattttacgagtttgaatctgaatagtacttaacacaatattagtataacctcactattttac

SEQ ID NO: 150620 - DNA, 227 bp, Arabidopsis thaliana landsberg
atcatcttttcgataccgaagcagcaaccttcgcgccgccgagagataacgagaaaaaatggggaagaggtcgaaaacatcaaggaaagggaaaaaagcatggagggctaacattagctccgaggacattgaagatttcttcgagaaaactaccagagatgctctctccggtggcaatctctccgctgctcccagcgaagacttgttccacgtcgataaatcccatg

SEQ ID NO: 150621 - DNA, 95 bp, Arabidopsis thaliana landsberg
cgggtgtctcataactctgaccagcgtcttaagattactggattaggatctgtaattggcagtgttcactatttatgataatatcctattcgaag

SEQ ID NO: 150622 - DNA, 398 bp, Arabidopsis thaliana landsberg
tgcaataagtgcaagcttaaagaagaaatgggtgagctccatttttgctgggaagagaaaagcttaatcgttgcttcagcttggaggtaagataagtgacaagagcatatagtctttatgtttcataaaacataattatgtttttactgtaatcttgggttattgtgtaactggttaaatcatctccatgtattattaccagaggttaggggtgatcacaggtactaaaagctaatctaacacttatggaagaatttttctttctttttttttctctattatgtaaaaataattagagttttggttctaaacctatttgctaagtgtgaatgagtctttacatgttcatatttcagttcaaatggttaaatttgctaaggttctcacttactattagg

SEQ ID NO: 150623 - DNA, 375 bp, Arabidopsis thaliana landsberg
tcatggctcttcttcgtcttcctggcatttccctccaaattctaggtcacaaatcaaaccagaagaaccctaatcccaatgttgccttcaccaatcactctctctctttatctactccttcactatgtcgtctccatcgtcacgggacgtttccagactcaattccagcaaaatccagaaacctcacttcgtacttctccaccacaacacaagagccagtcctcgaatcttcttcttcttcttcttcagctcctgaggtagtagaagaagagatttctaaaaccagattgattgctcagaatgttccatggacatctacacctgaagatattagatcgttgttcgagaagtacgggagtgttatcgacattgagg

SEQ ID NO: 150624 - DNA, 479 bp, Arabidopsis thaliana landsberg
tcttgttttcttgtagctccaagtttaatggaagcattaactacttcaagggttgtgccagttcaggtcccctgtagaaagctctcttcactttttgctaatttttcttgccttgagttaaggagatatccttgtagaggtcttgtctccattatgaaccatcccaaattgcttcgtccagtgactgcttctgtgcagcctcacgagttgtcgactttggggcatgaaggcaacattgttccttctaaaggtaactaattctaattacttcagaatctgttgaatttagattttagggaataacctgagctgcttggtactaggaggtatgaaggaagagttctaagagttaaattacaaactgttttaagcttttgaattgtttatagattgctgagtttctttctacttttggttgttggttttctgaattgctagaaattcttgatctttggagaagtgttgaagcggaatgtttc

SEQ ID NO: 150625 - DNA, 211 bp, Arabidopsis thaliana landsberg
acatagcaggagaagccgcaattgcttatgagcacggtgcatatatcgaggctcttatgccgaagctacgacaatctgattatttcacagagccacgtttccaagaactagcagctaaggaaagagcggatccgggttactgcaggcgggtaagagactttgtagtgggacgacacggttatggtagcataaagttcatgggagagacaga

SEQ ID NO: 150626 - DNA, 129 bp, Arabidopsis thaliana landsberg
tttgcttttaagaaaagaagaactcaataattcaacatatatctgtacacacataattgaataagatattcgacacatcaatcactataggttacattataaccacacaaattaaagaagaaaaaaaaa

SEQ ID NO: 150627 - DNA, 503 bp, Arabidopsis thaliana landsberg
gctcatcgcccgacttcgctttcgcagtttgcattgaattgaagcataagcaacctccaaattccgacaacaaccgatttcctgcagagagagtctctctttgtttgccctggataggaaacctacactactctttgtgatttgattttggtatctgaattcagagtcttgcttctgggttttggtctgggttttgcaggtttagtgcttgaatctgatgttggttcaagatcgtgtggctcctaagccaccaaaatctcggatcagagaacttcctagtcgggaccgattcgctgaacccaaaatcctagatttctcttcatgggtttccgacaatgtctacagaatcgtaatcatcttcctcttcatcgtcaccgtcgctgcgttcttcttccactacaacaccaccgacactgcttctctcctctgtttccgatcacaatcatctcggtctcgtcaatctcacactcgcccacaaatcaactggaacaggatccaaatcg

SEQ ID NO: 150628 - DNA, 660 bp, Arabidopsis thaliana landsberg
tcaaccctcggcgacctcaagctctccgtctccgatcttcccatgctctcttgccactacatccaaaaaggttgtcttttcacgtgccctaaccttcctctccccgcgcttatctcacacctcaaacactctctctcaatcactctcacccacttccctcctctcgctggccgtctctcaacctcctcctccggccacgttttcctcacctgcaatgacgccggcgccgattttgttttcgcccaagcaaaatccatccacgtgagcgacgtgatcgccggaatcgacgttcccgatgtagtcaaagagtttttcacctacgacagagctgtgagctacgagggacataacagaccaatcctcgccgttcaagtgacggaactgaacgacggcgttttcatcggatgctccgttaaccacgccgtgactgacggaacctcgctgtggaatttcattaacaccttcgcggaggtttctagaggtgctaagaatgtgacacgtcagcctgattttacgcgggagtctgtgctaatctcaccggctgtgctcaaagtccctcaaggtggtccaaaggtgacatttgacgaaaacgcgccgttacgtgaacggatattcagtttcagtagagaatcgattcaagagcttaaagctgtggtgaac

SEQ ID NO: 150629 - DNA, 340 bp, Arabidopsis thaliana landsberg
tggtttgacagtattgtatctatatgcccgctcaataaattaaatatgacgttgggaaacgtgtagagaattttctagcagtagcaccttactaggatctgtaaatttacttgatagttgatcagtgatcacaaagctggaagtgcaatatcttaagacaagttaaatagagttttaggtaaagaagcacatagtgtgttgacaaaagagtcaactatttatatgtttatagataatattatgtttttggtcttcatcattcactatcttctcatgtaaataatattaattaaattatttatgacaaaaaagtattaattaaattattctttgatatatt

SEQ ID NO: 150630 - DNA, 152 bp, Arabidopsis thaliana landsberg
gggagagaggagacggagagtttttattttcgttaccggaaattttgatctccgatggcttcttcttctgaatctgctcctccaacaaactccacctcttctccatctccaccgtctaataccaattcaaccacctcttctccgccggctcc

SEQ ID NO: 150631 - DNA, 220 bp, Arabidopsis thaliana landsberg
gggtcggattatcgacccggttgaagctttacaggacccgacgtttctgcacaaaaggagagaataaactcgagaagacggaatctagcgttgcgcatcacagcgacactgaatctagtgtttctcgctacgatgagacccataagaaactcgataagctcgatttcgttacaactgcgaagatcttgttcactgaaccacccaagaagaacgaattggg

SEQ ID NO: 150632 - DNA, 485 bp, Arabidopsis thaliana landsberg
atattcagattcaatagtgcggtattgagagggaagaactgggagctcccactgccaccatttgggaagggctggtgagtgacttctctctgtttcctcttcggagctacttgtatagataaagagagtgagtttgggttttggttccacaggtttgagaatgtgtatatggacggtgagatcagagtggccaaggacatcagaggagactacttaattgttgatcgtgctccttataactggactgaatcatttgtataatttgtgatgctttttgcttcttgtataagttatacaccatttctgtctctctcctttatcattgggcctcaaatagatgatgcaggaatatagggaggaggaggaagaggaatttgaaggatcattcaaagtgtcatccttgagtttatttagggtttttgtctgtgtttgtccacattttctatgcccttttttaatgttattttcacaatccatgacttaaa

SEQ ID NO: 150633 - DNA, 309 bp, Arabidopsis thaliana landsberg
  unsure (1)..(309): unsure at all n locations
acgaaagccctaatttctccaatacgcaaagcgagtgtcgaatagagagatcatctacgaagaagnnnnnnnnnnnnnnnnnnnnnnnnnnnnnncgatctgacggtgaacggcacaaaactctcaatccaacaagacaatggctctatgcacgtcggaacttccgtctggccttgctcactaatcctatccaaattcgctgaacgctggtcaacactagactcatcatcatcaacaacatctccaaatccatactccgaactcttcgatttccagagccgtcgatgaatcgcgctaggaacaggatgc

SEQ ID NO: 150634 - DNA, 223 bp, Arabidopsis thaliana landsberg
aagctgggatctctcacggaaagggatgctgacaaaagtagcagcagctctcagagccaacagggatatttggaaagccattgagatgatcgagtttgtagaaagtcgggattatcctgtggagtttgagagttatgaggtagtagtcgagggttgcctggaggttagggaatacattttggcagggaagatggtgatgagaatgactgatagagggttcata

SEQ ID NO: 150635 - DNA, 162 bp, Arabidopsis thaliana landsberg
ggcaatgatcactagttaaacgacttctctgtttcgctagtaaaaacagagcttttatagcgttttaggtacaacaatcaatcaatctctctctctttctatcactctccgaaacaaattaacgagaccaaatattcttaaaccctaaaaccctaatcaaac

SEQ ID NO: 150636 - DNA, 352 bp, Arabidopsis thaliana landsberg
tttcgatttcaaaatccctccgcaaaaatcccccaaatacgatctttgttcttgtgagatttccaatcgaaatcgagaagccatggataacagcagcagcatcaattccaccgcttccacggcctcaaatctgagcacggcttctctggaaaagctagatcaagcggcgagctgggtcagcaccaccgttatttccgccttcttcgcctccctcgagcgttgctcatgcgttaacctatctacctccgatgatgacgatgacggcgaagaatctcacaaccgtccccttgctctctccgccgctcctcacccagacgacatcgtttagattccttcgtccggtaaatccttc

SEQ ID NO: 150637 - DNA, 86 bp, Arabidopsis thaliana landsberg
ctcctatttctccctcaaatcgttttctccagttttctggggataaatcttcctcctttttgcagaaccccatgtcggtgcgttta

SEQ ID NO: 150638 - DNA, 386 bp, Arabidopsis thaliana landsberg
aattctcttcctttttatctctttgatacatctcaattttgttcttttgccttctctttgatcttatctcttacgattgtgcagatctcaatctctatatccttggttgtgtcagattctcttagggtttattttctctcccaattttgtttgattccttgtccaaagtttcttcctttccttttgacttctttttgtggtacattgaatcagaggtgtaagagtaatagtttcataactcaaatccccaagtgtacaaattttcctcttttggttctgggtttggttgattccttgttagaaatgtaaatttagggcttttgtatctgaaaccgatcttcagacttgtgtaatcttcttgatcttcatgcaagattgatggttct

SEQ ID NO: 150639 - DNA, 150 bp, Arabidopsis thaliana landsberg
tctcatttactacagattattaagcgaggtaattaactaaagtaataaccaaaacagaaacttgtgtctaaacatattgtagatgacctaatttgaccagtgatgagaaaacggcatgtttatatattgcccctttctatttatatactc

SEQ ID NO: 150640 - DNA, 397 bp, Arabidopsis thaliana landsberg
agatattaaaaaaaaaacagagaaaaatggtgataaaaaggatagagctgtgtatagagctaatgaagataggtatggagtttgtagtggtggtggctgaagccgtccagatagttatgcggcaacacctcaaccaccgtgctccacctcctccgcctgtcctccgccagggtcttctcccttataccgcttcttacccttctccattcctatttggatttctcccttgaatacctttttcttgttatgaaattattctgcttcttttcttcttcttttttttttgttctctgtgtagatatttagatcttattcttcttaattcttgtaactctgtatattgcttaatttcttcaaccagatttgcagctctctttgatttttttttaaaaaattt

SEQ ID NO: 150641 - DNA, 127 bp, Arabidopsis thaliana landsberg
  unsure (1)..(127): unsure at all n locations
ctctgtttagggntgattgtctgtgtttgtgatatgattacttattaatgtgtaattattcttcacttacagaagattaagaattggtttaaggaggacagttttgatggatttgatataagatatg

SEQ ID NO: 150642 - DNA, 218 bp, Arabidopsis thaliana landsberg
gttcttcttcttctcttctgtgtggagttgaaagaccaataaatgctgttagtaatggttagttgagatgagaggtaaaaagatcccgtagtccgaggagtgtttggtttcttgcaaaaggatagtgaggcaaaacatgggtttggtttctcttgtctcctttcattcatcccttttccattaatggtctctccctcttccaacaccaacctcttctt

SEQ ID NO: 150643 - DNA, 457 bp, Arabidopsis thaliana landsberg
gcaattattatttacaatatgaaacacatgttattatacaagccaatcttttgacctttcgagtcttggaatcccaaatagaaaattcactaaggactctcagaatcctcaaccagcgactcttcagtcgtgacgttcttcgaaattccgaccggacggcttgctatatactgttgcaccaccaacactgatgccaccgtcgaaacactttcgctttccgttaacaaattcccgatcggtccaagctcaggcgtgtcgcttcttacgtttatccctgacgctacagaaccttccggtgacttccccaccaagaaaaggttgcttttagaatactctttaataacttcgataacttcctcgtaacatttcacgattttctcttcgtaaatgatttgagattcagaatccgaattagaacgagaactttcttgttcttttatctttgctttaagttcgg

SEQ ID NO: 150644 - DNA, 574 bp, Arabidopsis thaliana landsberg; identical to SEQ ID NO: 12346

SEQ ID NO: 150645 - DNA, 590 bp, Arabidopsis thaliana landsberg
attaaaaatctcctttttaaaaatccattatttcctaaaaacaaacaaaactacttcaatgcatttatctgaaacacgaaattgagaaacatcaatcaaatcagattaatcatcgcttcgttttgaaaaccctaattcctcaaaaatcccaatttttatcccaattaaaaatcgatcgaaatcgaaatggaaacagaggttatgaaaattgttaaaacaaaattgaattcgagaaaagaaagaaaaagatcgaagctttaattaccttagaaggaggaggaaaaatggatccgagaataccagaagaggaaggagaagaagggttttctctggaaccaaaatgctcagaggttcacgaggaagaagaacaaggagaggaagacgaagctttcttctttcttccttccattggaattcgtcgctcgctctaaaaaaaacactctttcagctattatacgtatatgtatgatgtatctgtctatatacgtatgtgtaaatacggagagatatatatatatatgtgggtgtgggtgtatgtatcggtttatacgaagggtgaagttattgagagaattgtgaaaatatttggg

SEQ ID NO: 150646 - DNA, 146 bp, Arabidopsis thaliana landsberg
tatattttcaaactttcttacactctaatatcatatgaaagactataatgtactttcaatataaattacaatcaactgaaggttattgcacaaacacacacaaaaaaagaagcaatcaaaatcccccaaaagtttgttgtcttttt

SEQ ID NO: 150647 - DNA, 1028 bp, Arabidopsis thaliana landsberg
atgggagattctacggggtgtgggaaaggaggactaatgattccaaatcataagtctgctaattcttataacctctcccttgagttgtctcttgttgactctgtttgggattgtaatgttcggaccatgaggtattcctatatacctgagtggttgtagtctttgaaatcctcttagacaacgagtttagtgcattttactttagttggaatcaaagagttatagcaagcaataatggatcacacgttgtgcaagcaagttgttcagccagttactaggaaagtgaagaagcatggtaaagatgaatttgatcgtatcaaacaagctgagaagaaaaagagacgtttggagaaagctcttgctacttctgcagccattcgggctgagcttgaaaagaagaagcagaagagattggaagaacaacaaaggttagatgaagaaggagctgcaattgcagaagctgtcgctctgcacgtcctactgggcgaagattctgatgattcatctcgagtcaagtttggcgaagaaacgggtttcggaatggatctgtttagagatgaaagaaccaactatgttcctcgccaaagttgtgctagctatgcggttcaagggattgggtttgtgtcaaatggttatggactaggagatagtaactggtcagtgtcatataagccattcatgaaggatgtctgggataacaacatggtaatatctgcagatttgattgctgctcaggctgtttcgtcactacagatatctgaggacgctgataggaacgcttatgtcttcaagacgatgttcgggggatgacaaaagccatcgtgccaaacttggctgcagaaacaagtgtttgctatgagtagagttgcagtttttttctttattctagaaccccttttggtgtgaaaattcctcctcgttgtttatcttttgatgttagactagctgaaaagatgttttctgaattctctttgtaacattcacaaatacgttctaagttttatacagattacagagtacctcttgaa

SEQ ID NO: 150648 - DNA, 224 bp, Arabidopsis thaliana landsberg
  unsure (1)..(224): unsure at all n locations
gtcagatttttaggtgttttatgtaagtataaagggcaaagttggtcaaaatagctagtcacnatttactttcattgtcctttagcattccaagacagatttttaggtaaatgcaaattaattcgaatatcacctggcgtgatatagtatcttgacggtcccgattatgcaacatgaaccgatcgaggcacatggaccatatcaccatgatctctcccaagagt

SEQ ID NO: 150649 - DNA, 305 bp, Arabidopsis thaliana landsberg
cagaggatcagtctcagtgttgatttcaggtgataaatctctttgctttgacaatggcagaggaaattagattctttgaactcaacaccggagcgaagataccatccgtcggtctaggaacgtggcaggccgatcctggtctcgtcggaaacgctgtcgacgctgctgtgaaggttccgtcttttgatttgcgatttattgtaacttgttagtgacgtatagctaaattgattctattctactacttaatgcagattggttatcgtcacattgattgtgctcaaatctatggcaatgaaaaagag

SEQ ID NO: 150650 - DNA, 303 bp, Arabidopsis thaliana landsberg
aacataaaccaaaacgacccaaaaagaaaaacacataggcgggtggaaattcctcctctgcccctacccacttctgctttttaaaccacaagacagaagcttgaaaaaagaagataaaacaaaataaaaaagtgataaaacaaaggaacccattggtgaaacatagaggtcccttaagacacaccactctactactcaacacccacttactaaaaccctaatccttaacatgactaaaagagcccttataaaacaagctcttttctccattttacccctcaagagtcaaagaagaagtttcaa

SEQ ID NO: 150651 - DNA, 61 bp, Arabidopsis thaliana landsberg
aactaaaaagctcataagactattacttagaagagagtcgatcagatatgattttagcgca

SEQ ID NO: 150652 - DNA, 289 bp, Arabidopsis thaliana landsberg
gattagagaaatagaaaaatcaaaagaagctttggcaaagagctaaagatcaaagcttttctttgaggtaattcgtttgactcttttttttttttttgcttgaatcgtgttgttctctttgttctgctagagatttgatctgtaaattatgtgatttattaagaaattgaaagctctgtgtttcagaatgagattgtggattgtgagtgtactcgtgcttacacaccttgtccttggagctctctgttgggggaaggatggtcactacactgtttgcaaattagctgag

SEQ ID NO: 150653 - DNA, 54 bp, Arabidopsis thaliana landsberg
atccaaagatgtgaagcttcagatccttctcggctaaggctaagtcacaacctt

SEQ ID NO: 150654 - DNA, 813 bp, Arabidopsis thaliana landsberg
ctcttcttcctcgatcccacccagcttctacttcgttttccaattctgggtttcgattcttccaatctaaccatctcttctgtaagttttcttctttacctttgtttggtttttgcatgttacatgtttgacgaaatgtcttaaagattcgtgctttccatatattaacattgatgatccgtaaaaacctgaacacgttgttgttttgatctgaatttctattgaaaattttgcagcatctccaaggaactcaatctgttctttttttgtacatgtagtttctatatattaatctgaattttatctatgtaatcaaaatgttgcagcttcacagtctggttcactcatggaagtgtttaaagcagctttttcagaagcgtctaattcttgtgataggattgcgattaaagccgatggaaagagttactcttatggccagctaacatcgtctgctttgaggatatctaaattgttcttaaaagatgatacgacaaatgtatggtttttggtttgaaattgtagctactatatctactacttgaagctatcatacagtttgtttacagctttatggttattgactttttgtgtcttctataaatttcgtagggaggtcaagaaactaagaagtatgaagggtttggtagtctaaaaggagctagaatcggaattgtggcaaaaccttcagctgagtttgttgcaggagtcctggggacatggtttagcggtggtgtagcggttccacttgcactcagctatcctgaggctgaactcttacatgtcatgaatgattcggtatggaatctacttgcc

SEQ ID NO: 150655 - DNA, 382 bp, Arabidopsis thaliana landsberg
aagattcgattctgatatatgaacgtggctgcttcttcgttcagatctagtacttttctggaattccacactctaattgatctattcattgcgcccgcaattatgcatatctggagcttcacccgattttaatcgttgaattctcactaagtcgagtccgttttgatgggtgtgttctcaatttgtcaacttgcatcagttttgtttccaggtatgaatttttgagctccaaggatccactgccatgtatttatgctgctaaagcttgaaggcagtagtggaatcaccattaagttccttgccttgtaatttagcttgatttgagaataaacaaatgggaaaagcatcaggcttgcttctgtttctcttgggttttggcttc

SEQ ID NO: 150656 - DNA, 695 bp, Arabidopsis thaliana landsberg
aatccttactatttgggaacgttgaagagatgtaaaatgatatgtatgtttccagtgaaagaagactgaaagctttgtttgaaaatgttagtcctgtcaatgctttgtagagactgaatgctttagtgtactttgtgtgtttggatcgagttcaggtggggaatccatggttgatagatgatcaaaaattatagttgctcctcttcgttaaagcttgtttaggctaaaaattggaaggtgatccttttgtgctagtcaagtaaccatggagtttatcatcttctcactgattggtactaataatctgtacttatatctacttttcaggaacaaagttttgatataggaggccagaggctgtggttgatttcaacactaaattgagaaggatgatgacatattgatgatttggacgactgtaaaattatgggggaattcttgtttttacatggcttgtaagagatctttcgatatcaaattcataaaccataaaatgtgagttatttttctcttatcttcttatttaggttaattcaaaggtcttttatgtacacaacctcttctctttggtggaaagatatcattcgatggccagagttttcattatctacagatctgtataatactgagctttgctctttcatcttcttcttgcttttctttggtaattgaaatgctaatgacgtgtttatatt

SEQ ID NO: 150657 - DNA, 484 bp, Arabidopsis thaliana landsberg
atcaaagccaattggattaaatattttataggaaaacatgtacgatcctaatctacaatatgtatatattcatatcattgttttttcttagtgtgagtcatctgtctctcactatgtcactcttagacgtatgaccgtatacacacatacacacacaccacatcacacatgttatcttctctctttttggttataagggcattcaaccctaagttcacgatcttaacgaacccggagctgattttctaccactccgatgatcccctcgaaccttcgggaaaccttcccgccctgagatttaggagacagtggccaatgaccagaagaaaccgccatgtccttataatgtatgagactctctagagcttccacaacggcaagcattttgggccggtctttagggtttgggctcacacattgtaaggctagaagagctgtatctttagccgccttgacgaatcttgtcccgcgagcctcgggtcca

SEQ ID NO: 150658 - DNA, 288 bp, Arabidopsis thaliana landsberg
ccgaaaaatcaggaagaagaagaagaagattgacaaacaaaaaggattcacctttagtgactgagtgagagaaagagattgaaggaaaaaaaaaaaaaaagggtgaagctttggagagaggataaccacgtagaggattctaatccgtggttgcaaacgaaggacccagaagtgaacacgatactctccctcccttcccttgttcaatttctttctttgttctcatcattaaatttctttgacccaaagtttcaatctttttcagtctctgatatctcttgcgccggt

SEQ ID NO: 150659 - DNA, 624 bp, Arabidopsis thaliana landsberg
tatcttaaaatgggaaggcagctttacacgacgacggttctctacttagtcaccctactcttcatttgccggacaatctcagccgtccgtttccctccggaacaaccaacaaccgacgacctagatttcatccgtacgagctgcaacacaacgctttatccagacgtatgttacacgtctctagctggatacgcctccgctgtccaagataatccggcgaggctagctaaactcgcaatcggggtttctctctcccgcgcaaaatacacggcggcttacctctccaaactctcgcgtcgctctggcgctgcatcctctgccgccgtcaacgactgcgtttcgaacgtgggagatgcggtggatcagatgcgtggctccctaaggcagctccgagagatgaaccaccgtcgtcccggagctccggcgtttaggtttcagatgagtaacgtgcagacgtggatgagcgcggcgttgacggacgaggagacgtgtacggatgggatcacggaggagatggaagacggagagacgaagacggctatttgcgatagagtcgcagacgtcaagaggttcacgagtaatgcgctcgctctcgttaatacctacgccaataatggagcctaa

SEQ ID NO: 150660 - DNA, 265 bp, Arabidopsis thaliana landsberg
cttctcattgtgtttggcttctcgatcttgcatagggagaactcccagaaggtatttaccttgggttccatccacgttgctgagctctgcagaacatcaagaatgtgtttgcgcagtaagagttgaaactcatgaacacatgccacagagcatgtccatgaggattcacaggccactgagatatcgtcttgcagaagacacggtcacagaaccagcatatgcttcccactaagatggtagcaacataccatttcgcaatcctttt

SEQ ID NO: 150661 - DNA, 55 bp, Arabidopsis thaliana landsberg
gttcgctgttgttttttcatcttcttcttctccttctctggttctctgctttcgt

SEQ ID NO: 150662 - DNA, 669 bp, Arabidopsis thaliana landsberg
ggacaacgagaggattcgagagctatagagacttcagatcaagcagattcgtgagcttggtttcgaggaattacaagtcgaagaagtcgatgaccttcacgattccgattccgatgataataatgatgatctctcttcatttcctttctcttcccacgctcaagcttcgtgagccaatctctcctcttaacacttgccttttggtttccctctacgatcctttgttacttattcgttctacactctcttcgtgcctatttctagtgactacgcgtggctcaatgtgttgctagaatcagtttcaagtgtttaaaccagtttgattttcgagttcttgcttagttagggtttcgtgatgtttgatagttgtaaatctgtaatcctttagataacggatccaacaaatcagtaatctctgaattggcatttggtggtgcttgacagtggtaacctcggtgatgatgaacttatgttcaacccagctttggcttctttacatatgtatcttggcggtacggatcgattctcccgtcttgtttctttccgaggtagtttcttatgtgtttaccacatttgagcttatatggttttgtaatgtttaacagaggttgaagacactcaaaacagagtttcttttgtggatggaggaacggtattgagattccgctt

SEQ ID NO: 150663 - DNA, 350 bp, Arabidopsis thaliana landsberg
cgtttgtaatatatcggttatacgtcttgtcgagaatctagggtttctttctctatctctctctccttccatggattagtagcgcctccctttctccatctctccatagcttctgggctcgattcttcttctcgggcttcttaaccatgttcaattaaacttcgaattctcgtcctcaccttacagatctcggtgagaatttccgcctgtttaacctaattatccactttcaaaacctttgaattttctccgattcgatttctcggagatccagtggaggtctctgattcgttgcggtacttcaacggaagctattgggtgcattaaaatggattcgaagatcaaaaagc

SEQ ID NO: 150664 - DNA, 597 bp, Arabidopsis thaliana landsberg
gcatcgtccgccattggatgttcttctttgtactatcagttcgaaaattttatgtgtctgggtactttcaaataggatattaaagatgggtaaacctcactcggtacccgaaacccatataaaatataaagcccaaagatctactttctttataaaaataaaatcagagatttatatttgtataagcctactggtgtatgttagttttaaaatctgtgttgttgaaaaaaaaaaagaaaaggaaaaaagagaaataacgaaatgaataaaactttgtgcaggtattttgtttgtacattactggacacttggaagaggtattcgatgcagagcatcgcaaagagatgcttcgatatatctattgtcaccaggtatactttaaaatgacaaattacacggtttggatatcaatgagtaacttcgactagtgatctccatatgaattacatgtgtttatgtcccttaattttcagaacgaagatggtggatggggattccacattgagagcaaaagcattatgttcactaccacgctgaattacatatgcttgcgtatacttggaataggtcccgatggaggactagaaaacgcatgca

SEQ ID NO: 150665 - DNA, 113 bp, Arabidopsis thaliana landsberg
tctcaacctttaagttcgattgatctttttttggtaagtaaatcttctgtccgagattccatattttctgatcttctcttttcgaattcttcaatcttcaacgatcccaatct

SEQ ID NO: 150666 - DNA, 341 bp, Arabidopsis thaliana landsberg
acggatgggcccattactttatttattccacttttgtcttagtagtaccgtgagggggcaaaacaaccctgttcatgaattggaaccataagcggaaaaaaacatctatacgaaaaacctgattatacagctttgtttgttctcaaatatgggacacaagtgaaggaggaggatacaaagacagaaacatgaaaactactacataaattaatactatcttatgggcaatatattaatacagacatgagtatgctgtgttcttagcaataatcatgttgacctgcaatggatagattcagtctcaggtatcaaaagcttcggaccagaagcggtctgtcaag

SEQ ID NO: 150667 - DNA, 245 bp, Arabidopsis thaliana landsberg
aaaacttacgatttttttttttaatatagttcactaaaaccgccgtaaaaatggtatgtaacagatgcgtaccaataccaaatgtagtgattacacgggattgtatagctagtcaacgatcaaaatcgaatcccttagttacaataagaaatcaaaactataaataaaatataaaacttttaaagcaggggaaaaggaattcaaacttacaagtatcaaaaaaagaagttactcttctccccaat

SEQ ID NO: 150668 - DNA, 689 bp, Arabidopsis thaliana landsberg
tgggagactttggaggtggaagagaagtcatcaccagtggattgttcaattcaaatggaaatggcaaaagccatggagactctctgagtggattaggacaagtgacgaaacactcctcaagtcaaaaccccgacttaaggctctacctaataagatcatgtaatcaagttgcttgccgttatctgagagaatcttttagtgttcaagctctctctgcctgtgagtatgagacttttatggaaaggatcatacaagtgggtgcaggtaatttatcaatccttcctagattatttaagcaactcggagaggatatcattgtgtttctctaacgtagatcagttcatgcacgacagagattagacttgctgccgtgtttcatttgggaggaaaagtctttaaggttttgtgtgatattggaaatttcgttattaggcgtgtctaccgcatcaaggagaaccaccaggacgagcggcgggtgctgctgattgcttgttgtagctaacagatagctgatggctttttaggagtcagattgttcttttcatgttgatagaattgacatcttatacacatcactaaatgagctcatgaggaaataaacctcatcctcaagttgcagatatttgtatgagcaatactggttttatttgttctttggtttgttgtaaatgataaaatatttgtttagt

SEQ ID NO: 150669 - DNA, 198 bp, Arabidopsis thaliana landsberg
accaaatctaatcgccgacatacattgaactcaaatccgctcagaatctccgacaatcagttccaatccatggctcagaatcaacaacctattttccagaccaaacctccaggtaataataagaatcaacaaaccagatctctcatttcttgatctcctcttcttacaaaacaatttgattctaatttcctctgtttc

SEQ ID NO: 150670 - DNA, 590 bp, Arabidopsis thaliana landsberg
catgtaagagagagagacattaatcggcttggcggttggataaggtgtgtttgttgtgttgggagcatttactgataccgatgtggctgtaccgttcacctggatcaagagagtggttgaattacattctttgatactagtgtttgttaatcaaatcattatagtgttttctcagtagtataagttcagaaagtttctctggctttgcagattgacaaggtcgagcacactcatttcatacaagatcaataaaagggatgaagaatgactctgataccacacacaaacactcgctcgtctgattgtgaacaatttattcacttctcttatgttctgttctatcaaatgtatcagaccaaaaatctattttgaggtcttcttggtctgtaaggtaaatgccagttatgatatgtcatatttgagcaagtacatgaaaaaaagaagcaatgtataaagagaatgagatcatatctacaggggactgtgttctgatcagataactgttgatagaattggagaagaagttttgtgatctcatttcctcatctcacacctcgacacacagcaccaggttgaagatcatccagttt

SEQ ID NO: 150671 - DNA, 244 bp, Arabidopsis thaliana landsberg
tttcctcaaatctttacagttataagaaaagaatccaaaaaaccctgcaatttctccactcttatggtttaagagagggtccactataacttgaccggttttcttattctttcccatctccatttctcgtgtggcttgaccttcactgcttgaaccagacgggtacagtccgtagtcactggttggattactgtactcgccggttgtgccgtattcttgagttccaagagccattttcctaaac

SEQ ID NO: 150672 - DNA, 375 bp, Arabidopsis thaliana landsberg
ctgcatcatcatcaaaatacaagcttcgttattatgaaactgttttgattgtaggagaaagaaacagctatgttttctcactagcattctcaccagctcatgttgcaagctttgtctatgttgggagcttatagatcgctcctccattagcttcgaaatggttgaatcagcctgcaccagatttaaactctttagcacagttacatatagcacggaagttatggattttaaaatttgataagcagacctgttttaacttggattcaagagcatccactttcagcttcatctcctcaatgtctttaaccaacttaagttcatccaatcctctgacattctggccatctgttttctgcagctggacaacatctctct

SEQ ID NO: 150673 - DNA, 397 bp, Arabidopsis thaliana landsberg
tacaatgtttttggatcaatcgtatcgtgattgccatggaaccattttgtcattccgtaagtttggtgacaaaacattataaaagttgtttccaactacatttcagaaacattcatttaatggtacgttatttatttccacaagtatattcattacatgtggtttttctcactttattaaaatattggagaattgtaattgacaaaatttattgtggaataaaacaaaatattctacatatcaatttattgaggcgaataaacaaaaggggagcgagatggtcattggtcactatattagctaagcccaaatttgaatctaacggggattggtagatgtttcagagatgggcctacatttagcccaaaatgcggattcagattttttcccgtgacta

SEQ ID NO: 150674 - DNA, 313 bp, Arabidopsis thaliana landsberg
atgaacgtgaagatgactggcaaatgctctgatcatgatcatcgtcaaacattttaacaatctcaagctacaattctttttttccttttgttaaccagctctttggtttttatatggtgtggggtatattacatcagatcagaccacattgttgtactataaaatcttttgggattttcaaacatagattgaagcatgcgaaaatggaagagtagagaaatcacaaggtatatgaacatgatgacttcattttcccattttcttttaagtcgtcatcttcatcataactcctccttcaccttcaactttcact

SEQ ID NO: 150675 - DNA, 232 bp, Arabidopsis thaliana landsberg
gaagaatatgaggttgggattaatctcaattcatcaccgaatctgattccgccactttgttcttgcctctttcttctcctccatgccttctctttcgatattcatatctgcttgattatttctttagtagttgcagaagcttcataagcagcaaaactaaaaggttctaaagcttttgtcctaatttaatccattcgattcatacatgttatttcggtaaattttgctgtct

SEQ ID NO: 150676 - DNA, 417 bp, Arabidopsis thaliana landsberg
gctaggcgatgccttccgctgcggtacatgcccttacaagggtctgccacccttcaaattaggggagaaggtaactgaatccttcatatctatcaccattgtaaagtcttgttaatccttttaagaatacaccttattcatgtaacttttgttcctctttaggtaaccctatctcaaaacttccttgaagctgacatataagcatgtgaaaggcatcttcatacatgggtgtttctcgccgaggccaaaaccttttgctaatcgcagagtagtttcatcatttactttgtgcgctttcgtataatttgtttgttggtacttcttttattttgtggctctaaaagcttgtagaaaattgtttgcgttgcccacaaagcacacaccttagtatcaatgaagaacggttttgcattggtt

SEQ ID NO: 150677 - DNA, 102 bp, Arabidopsis thaliana landsberg
gaaaagtaaagtgaaagacgataaattctccatccttgagctatttcagtttcaactagacaactattatcttggttatataataaggaaccatgaagataa

SEQ ID NO: 150678 - DNA, 269 bp, Arabidopsis thaliana landsberg
gaaaactaatataaaaattcgatttttttttggaaaacctcaaaaacacactcttctctctctcttcttcttcttcccctctttcaatttttttcagattccgagtacaatccctaaatctccgtctctctgtttctctcttctctcaagtctcagctatgaatccttactagggtttattctttctgtgtttctcactctgcatttgcttctgtggagtagatagattcttcagggctaaatgagtcattttctcactttctgcttcc

SEQ ID NO: 150679 - DNA, 386 bp, Arabidopsis thaliana landsberg
tgatgaaactctagaaccattttgcctcttgtcaaaatttacacaaggtttaatattggctacaaataatctgcgttatatgattagagaagcaagctctggtcattataaccttctctcttcaagaactggtactgctctttctcctcctgacaactttcttcacagtaaccgtgttgtcgctcttctctttgttgtctgtactattcacagctttaacagaatccggttggctcctcatgcgcagtatctcaccctttgcagagcccaagtcctcctcgagcttcttcactttcttctctagcacttccctttcttttcctaggctcatcacgaggatatgtgcatcttccacattttccttagcttcttttgatgcattcttt

SEQ ID NO: 150680 - DNA, 304 bp, Arabidopsis thaliana landsberg
aaaacaaaaaatctaaaatcaaaaaacaaaactgtcatgcaaaataaaatattgttataaatttgatgtatctgatttataatttatgcaaactcaagtcttgtcacaagtaattactttctacatgtacgagcatagttatctctttttcatttcacggtacacattttgtttttcacggtacacatataaatcacatcattcaaatcacgcattaactaacgaattatatctaccggtacatagatttataagtacattaacatcttctatttcaccggtacgaagccgcaaacctggtgat

SEQ ID NO: 150681 - DNA, 895 bp, Arabidopsis thaliana landsberg
ctctctgactccgttaacttccgagtctccgagcattctctctctctttctctttctccatcgccgcgattctgctcagctctgagaacggcgcaagcttagattgccggagaaaactttatgcattgtaatgtcttcttcttctttttttttcgtttctttctaattcgtcttcgtctgcttcttccgcaagctcgtgttgttactcatctctctgcatcgacgattttcttctagttttgttgactttaggttttctttagatcttcgatttctcaacatttctccttaatctgattgcgttgcttttccagttttgttgtacttgggagcagcttcaacattggagcatcggcgatccaagtcggaagttcacttaccttcggaaaacgcgactctgacctatcggaaatagtaagatactcgcttagatcttgatcttcattgtgacattggtttttctctcgcggctttttattttccataaccgaccaactttctttatttcgtcaacgcgatttcaatttggaattcgaaatccttgtaactggagcagttagggagtacttgatgaacttggatcaatactgtttctatatatagctgatgattgatttctcttcctaaattgcagtttcattgacctcatatggagtgtgtctaattgctagtggttttgtggcttattgaagtcttgggaatagtatattgaggatgctattgtagtaaagaaagtatggaagatcttcggctatcaccgctgaaattaggtagctttaagtcttcattgtcagggaggtctactccaaggggttcacctacacttaggaaagtgcattcaggcaggactccacgtagagagggtaaaggtagtggtggagctgttcaatggttc

SEQ ID NO: 150682 - DNA, 192 bp, Arabidopsis thaliana landsberg
ataatctctgcataattgctgcgattactctgcaaagacacaacacaaaaagtgctttttttaatcagatatttgctgggctgcactttaactctcttcgtgcttggttttccgatcttagtcgttactaattgagtcggagactgttcatttcctgattctgaagaaagttttggagaaagagaagatgtc

SEQ ID NO: 150683 - DNA, 405 bp, Arabidopsis thaliana landsberg
atttgttttgctttgtcagtcaacggttgaccaattgactcgcccaccatccatgacttcttcagcttaagttatgcactcatctctaatctccttcttaaaaatatctgatgaactgtaacgttttgtttcttctctctgttctcgtctctgttacggctggagttacggcggcgtaccttcctaccgatgtctttctcttcaactgcggcgatacttccaacaacgtcgacaacagtggccggaactggacggcagaagatcggaaatttctgtcgtcgaatttagtcaacgcttcattcacttcagaagcgtcataccaaaaagcaggggtttctcggattccgtacatgaaagctcgaatattccgatctgagttcacctacagtttcccagtcactcccg

SEQ ID NO: 150684 - DNA, 503 bp, Arabidopsis thaliana landsberg
cttaacaaaacaaaaatcgtaaaggataaaacctaagaagctcttatccctttttgtcaatcgatctccacaatctgaggccttctctctgcagctttcttgcgtataaagataccccatctcaaagcagctttaagctttagccatccaacaacagctttccccgagcctctattacgttctcttcggtacgtgttatcgatctgagcttggtacgggatgctataaccgtaacaagactcatcagtctgaccaaaccctccttgtgttcccacagtgttcacaccgataccaaacgtcttcaacagtctctgcatatcgtcagtctcaagcatttcagaactccttagtctgatttcttcgctgaaaatgtcttcaagaccttgtcctgcagctcttggtggacaccaatcttctccattgtatgagcttgaatcattggagctttccatcgacctgttgtagtcttgtacgttgcaagggaatgagggtaataattggtt

SEQ ID NO: 150685 - DNA, 784 bp, Arabidopsis thaliana landsberg
attggcttagtcacttagtagatctctcatagaagaaagattaatccgtttaaaaagtctatagctggaactagatcccatcttttagattttcaggctatatttcataactgtgtggatctttttgtataggattatagttgagttgcaatctcagttagctaaccgacaaaacttagcttgtttaatgtagagtgggaggagttaaatatggtaaacagaagatgataagcattgggaaattgagttgagagagcagggatgctgtaaaattaatctctgaagttctttgtttggttgatcctcggttcccagtggaaaagttaaagagaaacacgttttgaattttatcagtgcactgcatttgtaggtcttgagtcgtcaattatatcttcctgcaaagtcctcagctgagtcaaagtaagtttctcttccaccatcgtttttctttagttgttttaatctgctagttagtaatccactatttgacaaggttgaactgatttgttactgttgaaacactatgcagagatggggatcttcctcttatagtagccatcgatttgcagcctatggctccaattgaaggtgtcatccaggttcaaggggacataactaatgctcggactgctgaagtggtaaaatttctcgactcctatctcataaatttttctacatctctttcttcctctttaattatgcttcaagtttgtgtttgtttccatggcttaccttttccggtgttttttttcaaggtcattagacactttgacggctgcaaagc

SEQ ID NO: 150686 - DNA, 67 bp, Arabidopsis thaliana landsberg
tgcgatcgaaacaaagaaaaaagttgctggagattttgaagatgaccgaaccaaagaggttaataaa

SEQ ID NO: 150687 - DNA, 276 bp, Arabidopsis thaliana landsberg
ttcaaccatcaatgtgcaggttatcaaagacatcttgttcaattccgctcgtcagtccaagaagtctgctgacgactcatcagatccagagcccatgattacatcgtgaagttggtctattcttttgttttttggctgcggaaattgactatcggtttgacccggtttatgaggcaatgcccattgttccctatatctctagtgtagtatctgcttcagacaaagatctttgggttattaaatgacattaacataaatcgatcattatgtttttgc

SEQ ID NO: 150688 - DNA, 317 bp, Arabidopsis thaliana landsberg
ttgagatcaacataaccatttagggaaagaacacaacaaaatacaaattccaaacaaaaaattctcctaactagtcctcatcaatagcttctacaaactcttttctcactagtcaattttttacacaaccaacagtcaaaaaaatatatctctcaacaactcaacaatgtatttgtaataacccaaaactacaaaaacaagtaaaaagaatgttgttgacttacacaactcttcagaaaaagcttgaatcttctgttaactcagacaaagaagagaacccaaacaaagactgatctttagctctttcaatcttatgc

SEQ ID NO: 150689 - DNA, 124 bp, Arabidopsis thaliana landsberg
caaatggcggcgaaagtaattacatttatggcggttatggtggttactgcctttacggccaacgccaaaattcccggagtttacaccggtggtccttggatcaatgctcacgccagcttttacc

SEQ ID NO: 150690 - DNA, 308 bp, Arabidopsis thaliana landsberg
cgcttgttttttatataactgtctcttcatattctcactccttcttctccctcttcttcctttttctctcttaagtgctataaatgttcatatttgtttctagctaagaagtttgtataaggcagtggacatggctcctgtttcaatgcctccaggtttccggtttcatccaacagacgaagagcttgtcatatactacctcaagcgaaagattaatggtcggactattgagttagagataatacccgagattgatctttacaaatgcgaaccttgggatttacctggtatatttctctctttgcttc

SEQ ID NO: 150691 - DNA, 274 bp, Arabidopsis thaliana landsberg
tttgctcaaccatatgatttcattaatatataataatgaataacagttctatcatataaataaataatttataatccaccacatgacaacagatgggttttcccatttatttaactataaacagtattttgctctcacagatccacaaggacaagcatattcaaggatgttttagttcttaccgaaaagataaagagagaccagacgaatagaggtaacttggtctacaagttagagtggccaagccggagaagaacacggcgccacgaagggg

SEQ ID NO: 150692 - DNA, 262 bp, Arabidopsis thaliana landsberg
aacataactcatacatgaataacaaaagttataacaacacaaaaccacacccctccctctgtttgtatacccaatgaaagccacaccaaaaaaagaaatgtgaaactaaaaaacagatataaaacttgaaattaaactattgagttctctgaccccatgagaaacccaaattaatccaaatataccctcgtaatcgcaatgagaagatacaccaaccgatgtggtggaccttagaattcacagatgggaagagaaaagaaaa

SEQ ID NO: 150693 - DNA, 994 bp, Arabidopsis thaliana landsberg; identical to SEQ ID NO: 50755
  unsure (1)..(994): unsure at all n locations

SEQ ID NO: 150694 - DNA, 275 bp, Arabidopsis thaliana landsberg
gggtattgggcgttttttggtacgttaaaagaaaaccttttggtaaggtcattaaagataaacatttgggtaagcccaaagaaacagagttccgtgcattgcaaatatgcaatgcactgcaattattagttgtttggatttgatatagagactgagtctcgaaaccatagtatgtaaaaatataatcacgttcaaaagctgttaatttgttataatcttataacaattgtgttttaagatacaaacctactttgtgttatgatatttgttcacta

SEQ ID NO: 150695 - DNA, 251 bp, Arabidopsis thaliana landsberg
aggaaatcatgatgacctctagtcgattaaaatacagtaacgctagtgtagccataattcacctgttaaaaaagttaacaggtgaaaggattccaaagggagagcctagtgctacaagtgtatcacccttgctacttgatgaagcaaaattcatgcttggttgaccctgatttacaaaatatttgcgtcacaaagatgaaccataaatcagaaagaaggaaaccgggaggaaaatcagggaaatatttacc

SEQ ID NO: 150696 - DNA, 169 bp, Arabidopsis thaliana landsberg
gttatgagagcccatagcttattagttttaaacttaggcattgtgacagaagccaaatcccattgtgggttatttaaaatgtcaacttcttacggcttacaaatactacagttgaggctatctatggccgttatgattgtattttaacaaaagctatttgtcagatcat

SEQ ID NO: 150697 - DNA, 539 bp, Arabidopsis thaliana landsberg
acataataaaacaaaaagaaaaaaaacccattctttccaacacttgaaaagaaaaatcataaactttactaataataaagtttactattaatgaagggaggggttaaacttttggccgtgtgcctttgcgtggccacggcgaccgtcatgatggtccaagcggaggacccttacttccaccacgtgtggaacgtgacgtacggaaccgcatctcctctcggcgttccacaacaagtcatcctcatcaacggtcaattccctggtcctaacatcaactcgacttctaacaacaacgtcatcgttaatgtcttcaacaacctcgacgagcctttcctcatcacctggtacgcatatctaatatattccacgaccattcttaaaattttatacgagcaaccatatatggtttgatatgaaattatgtccaacggtaccaatattttctaattggggttttatttggaaaatttataaatagggccggaatccagcacaggaagaactgctggcaagatggaacagctggaacaatgtgtccg

SEQ ID NO: 150698 - DNA, 474 bp, Arabidopsis thaliana landsberg
ttggatgagctaaagagtgatgctgctgaagctatggaatcacagaaaaagaagtgagttttgttttgttttctttttttggtttctcaatttatcaatcattgatcttactcatgtcataacgcgatggaacttgcggattattcagagaggaattccaggatgaggaaatgccggacgtgaagtctctagacatccgtaacttcatctaaggtttgatccttagaaacatttgatttgttgtaagaaaaggcaaagatctctcacttgattgtctttgaaagagaagatcgttcccttgctgctgttttggtttggcgttcaataaggtctctcacctggatttgagtctaactctctctgtggttattacgcttgagattcttagacacaaacgttgtttcatgtttttttgataatggtgataactggaatttgagataattaataaagtttatgttaatcgaatcaaaa

SEQ ID NO: 150699 - DNA, 397 bp, Arabidopsis thaliana landsberg
gcaagacatttgtaccttgacacgaacgacttggctcttgggtcgtctaagggggagatggcttccgagaccagaagatgggtggtaatgagaagacgagcaggaaggagaagatgagagaagacgcaatctcttgtcggaattcagattcgagtttggaggtaagcaaggttgcagaggattaagagcggtggcaaaggagctgaaggacgaggagacacgaatggcttgaaccgacatcgtcgttaatcgcacaactccagccatctaaatgcacccagagagagagatagagactgagattgttcttggttttgaatcttctccgagagatcctctaaggagaagaagatcagaaactgtctggttcagattccagtgatatttctctcatcat

SEQ ID NO: 150700 - DNA, 242 bp, Arabidopsis thaliana landsberg
gtttctccttctctctgcagaaaccgtaattaaaaacccccacaacttcttcaacataacgtcttcttcttccatctttcgttgcattcacgtttttaaaggttctctgaatcactccattaaaaatagctttgaacaagttttctcaatagtcaacaaaaacaatggccgttgaagctcaccatctaaatcctctgttctcttccaacaggtacagaaaatttcttattataatctcctct

SEQ ID NO: 150701 - DNA, 670 bp, Arabidopsis thaliana landsberg; identical to SEQ ID NO: 14062

SEQ ID NO: 150702 - DNA, 832 bp, Arabidopsis thaliana landsberg
gtccccattgaataccgtcaggaccaacagctggtgtctcatgatgtgaaaagcagtttgtacaactataagtacacttactctgttaagatctgtcctgtttgccgtgaggatcttgtttgcttgccttctaaagttgctagcggcttggggaaccttggtccacttgtggtttgcacaaaagtctctgataatatcactctacttgatccgagaactctaaggtgtgccttcttggatgcgagacagtactggaggtctgggttccgatctgcgctcaccagtagacaacttgtcaagtactttgtgtttgatgttgagccacctgttggtgaagcgactgttggtgggcaaaagtacgctctttcctatgtccagattgcccgtgaatcagacattggtaagatgttttatgtccaaactcatcttggacacattctgaaacctggggatcaagctttgggttatgacatctacggagctaatgtgaacgacaatgaaatggagaaataccgtctgagtgtgaagaatgggcttcctgaagcaattctgatcaagaaatgttacgaggagcagagagagaggaagcagaagaaatcccgtaactggaaactcaagtcgcttccaatggaaatggatgattcaagaggcagggttgatccagagaagacagacaaagaatacgaagagtttttgagggatcttgaagaaaaccctgagctaaggttcaacatatctttgtacagggacaaggattatcaagcttctgagactgcttcaatgacagatggagaaggtgcaccatctgttccaattgaagagttgcttgctg

SEQ ID NO: 150703 - DNA, 340 bp, Arabidopsis thaliana landsberg
gtcacgaagtcatcgactactttgccatcgacgagttacaatacaaaccaaagcagagaagaatccacaatgtgggagtgtgcagaatgcaccttattgaacccggtaagtcttccttaagagtgtttaaacttgaagcttcttgttgtctctatactgttttttcattatcggtcttgttttctcctaccagttattggctccaatatgtgagctatgcactgccgcaaagccaaaggaaaggcagatgaagcacaaagtctggtcttgcaaattctgcacgcttgaaaatgaggtgaagttagagaaatgtgaggcttgtggtcagtgaaggtactcg

SEQ ID NO: 150704 - DNA, 324 bp, Arabidopsis thaliana landsberg
aaaaaaactctttctgttgcaaaattaaccattcaaatcaattactctccaaagtgtttttttgttttgtttacacatatgtaaagagacgaccgtagttatcaaaagcattttggtcacaacaaagtaagcttaacaatcaatcagcaagtgaaatcaaatgattacaagtgaataaagagacaaagagacctcgtttcaagccttgtgacgcaattattaaacagtagcagcaagaactttcaccaattcacattctttaggcactgtaagcacatgatcaaaccattcaacttcccaaaaatttcgcaacttttgcttctt

SEQ ID NO: 150705 - DNA, 289 bp, Arabidopsis thaliana landsberg
aaacattggaacgtatgtagtatgtatatatacagggttcaatatccactcatctcaagctgctctgcttgttccagctaggtagagatctttctgaattaatgctgagatcgttcaatagagtattattattattgcatgatttcaaagggcctatgttaaatccccttaaccctggagaccgttgctggtatgcacttggtctagtgttactgccattgttggcaatccttactttgcttggtgcttcactcatcattgatgtcgtcaggcatagcttgttcttata

SEQ ID NO: 150706 - DNA, 441 bp, Arabidopsis thaliana landsberg
ttcaaacaaaagagtcaagaggatttagggcaaatcatgtgtgttctacatttataataagatcatatctatatatgaactattgaagatgatgaacatatatgtggccaacaaagctaaattgtaatcatcctcttttcaaaacccacaaatttgatgatgacttagccttccatgggaagacatctacactgcctaaagtgaagcatccatcttcatgttagtagatttctccttgacatgccacttgctctgtttttctacgtattgctgttttacatgggatgatgatgatgatcaaagtcttcttgagcatcactgggaatcaaagtcgggtttcgaagggtattcaagtccctgcagctccggcattcgccttagatcttcttctgtgtatcctgggattaaccagtatctcttatccattccaaatacctaaac

SEQ ID NO: 150707 - DNA, 321 bp, Arabidopsis thaliana landsberg
agtttcgccaaattggttgtatatatgataaattttatcgaacaaaacaagttttacaaaaataatcaacaaactttatacatggatcatgcaactgagaagaagaaacttccaagtgaaaaaaaaaaaaatccaacttacaaagctctttgcaagtaaatgaaaactttggcttccttcaaagccaagacctgaaagcaaagcagcgagctttacgttttctctgcaaggtcgagttcttacctttgtttaacatgccctgcttttgtcctgtatgctcttctctcttctcttcttcactgaaatcgcttgatgactctt

SEQ ID NO: 150708 - DNA, 325 bp, Arabidopsis thaliana landsberg
taaagtagacaatgaatgattagggatagcgaatgaagaaggtggaagatgatgttaacttcggattggcgcgaaataagataaaaaagcttgttcttcagagaagaaagtgtttatgattggacaaagaaagaaagaagcaaagcctatccacttctcatcttctctattaccaacgaaccttccccttctctgtcggttcctccttttctattatttttaattccagataataaaaagaaaatctttttttgcttaaagagctcaaaccgaaacccatttcaagatttcatcctccggagtgtttcaacgaagcttgggtatt

SEQ ID NO: 150709 - DNA, 316 bp, Arabidopsis thaliana landsberg
tatgcagacaccaatcttgtggtctcatggcattgatgacaagactgtactattcgaagctggtcaagcagctcttccttttcttcaacaagcgggtgtgacttgtgaattcaaggtataacaataagaactcaaatcaaacactcatatatttgctcatataacagagcagtcaacctgatcacatggaaagatcttagaaaccgattcttggaaatgtatatctaaagagagttcgtttatctgcaggcttatccgggtcttggacactcaatcagtaatgaggagctgcagtatctggagtcatggttaaaac

SEQ ID NO: 150710 - DNA, 1000 bp, Arabidopsis thaliana landsberg
  unsure (1)..(1000): unsure at all n locations
ctcggagatcagggatcgctagttcagacaccttctcttcttcttcgttctccttcgaggttagtttcgataatattttcctttgttgttttttaactttgatttatgcgtgatagatgttactgattcagaaatttcgttccgtgttcatgtttctctgaattcttagggtttagcgttgtctatgcttattcttttgcgccgctccgttttgggctcgaacagctttctcttgtttatctgtgttcgattcagcgaattgatggtttccattgttgcttcgtttcttgttcacttttcagtgaacttcaagaatttaccgtcgttccattgatttagctagaattggatatagaaannnnnnnnnnnnnnnnnnnnnnnnnnnnnnnnnnnnnnnnnctgataggtgtttgttgaaatgcctctgagaaacaaaaattgtgttttctttactttgttaaccaatgttatttgcaggtcaaaatcttcttaatcgaggaagagcaagatcttctttaagcagtcatggccaagcatcatcctgatttgatcatgtgccggaaacaacctggcattgctattgggcgactgtgcgagaagtgtgatggaaaatgcgtcatatgtgattcctatgtccgcccgtgtactctggttaggatttgcgatgaatgcaactatggttcgttccaagggcggtgtgtcatatgcggaggagttggaatctcggatgcttactactgcaaagagtgtacacaacaggagaaagatagagatggttgtcctaagatagtcaatcttggcagtgccaaaactgatctgttctatgaacgtaagaaatatggattcaaaaaacgatagtagtttgttgttacttgagctattgatcttttatttattgatgctaggaaagtgtctgtacttgtcttgtttgtgttaaggaaattttatccggtgaagtaatttaagacatgggttcaaacaaaggattatggtttgttga

SEQ ID NO: 150711 - DNA, 429 bp, Arabidopsis thaliana landsberg
tgatgaagtaaattttcataacagtactgatgaaaagatagtcattggatacactagcttactttcttcagtactactgtttgggttagttacataactaaggcaaaattctcttctggctgctgatgatgattccttcccgcttctgatttgggccttttctgtataagtccttgagctatggcacaacaaaactggattctggagcagtcccccttgatgttcttttacctcgacaaaagccgaacaaacaaagatggatgaaagctatgactgtcttcttcatcatcctcatcattatcatcatcagtactttacaagtccagcaccttgagcctttccaataactgactctatggttccatcaaagagatcaaagcttttcgcaacagcaaaacccgaaaacataccatccactgcagcacttac

SEQ ID NO: 150712 - DNA, 218 bp, Arabidopsis thaliana landsberg
gtggttaccaaatcaaataggacgattgctttagaacttatgcgtaaagaaggtgttgctgcacagactcagccacaacataatggaaagcttattgttcatgctgaggagtctttagcttctaagaccaatacagagattgtatttagggggttgaatttggaatcaaaggatactttctctaaaagtgtaagctatactctttgaccagtttatct

SEQ ID NO: 150713 - DNA, 186 bp, Arabidopsis thaliana landsberg
ccagttttgttttttaatcatatcaaagcaaactgtgtgatggataagtacaaagtcgccggaaaatttggtctcccggacatcacggtggcagagatggaatctttagctagcttttgtgaagctgtcttgccttcagtgcagccaccgccggaagagctttccggtgaaggtgataaccatcgg

SEQ ID NO: 150714 - DNA, 234 bp, Arabidopsis thaliana landsberg
caaatggaacaaagggtcattgttcatgagcaacaacagtaacaacaagggtccaggttcttcttcttctggtgctgtggtgcttgagaagcacaaaaccctcaaatccgttggaaatttgagtattgattctactgtttcgatgcctgcaacaattgggaggagggcttttaacagatttgcgtgatttgtttttcttctttttttctgtgaaaaaatctgacctttttttcc

SEQ ID NO: 150715 - DNA, 182 bp, Arabidopsis thaliana landsberg
ttttagttgtaagatgtgattgccaaaatcttggttaaaacagttccgtttcacatcaaggtgctttttttcagagtctaagaacatcttaaggaaccggatcattggacatggttctacacaaaagaaactagaacattcttgagtctctaacctctgctaaatccgaccaaagacttaca

SEQ ID NO: 150716 - DNA, 528 bp, Arabidopsis thaliana landsberg
ccttggttccatggccatgcccctaacgcttcgattactttaattccaatatttccgatcttttcgtcttcgagtttctattgagcgtcgtcaaaccctaattttgacttccgggtggataatcccaaatccgtaacttttctaactctttctctcagtttattaattcaagcttctgggtttgtttcacaggttccaattgagtggttttttagcttcgatcctagctaaaacttaaacctttttcttttctcaggtttcatagctcgatttcactgataaatttccgagctttcggtgttttgattcgtatgaggatttgaattgactaggaaagataaagatgtctatggagagatctttagaagcttgggaagaggttcaacgacatggacaagacttagctgatcgacttgctcaaggatttacgggtttgattcatataaacccaccttcgtaacagtggcagccgaatcaccatcatcttcacaaggcgaaactgttcgatctcgagttcccaactcaaca

SEQ ID NO: 150717 - DNA, 296 bp, Arabidopsis thaliana landsberg
tggatcaagaaaaaaaaaacacagctttctagttctatgcaataatactctggagcaagtttcgagttcttaaatcgacattgctacattacttaatagtggcttaaactgaactagagtatccttctcttaaagaccaaaacccagaattagaccaatcacaagagctaaaatcttacacctaaagtgagctacaagatttcagacaaaacatcagcatttccactcaacataaaactacggacaagagagtataaggaatatcaactatttgcgactaaccgtagtgaaaacgg

SEQ ID NO: 150718 - DNA, 470 bp, Arabidopsis thaliana landsberg
taacaaatacatgtatgataatcaaacttcaaacagagaaagtaccaacttaggaaaaaccataatatatactaacattagatactaattcatagatccttcatgacattgtatgataatcctcattggatttttatttacattaaattcttaaagcaaataaaaaacaaacaaagaaaccaaaactctactgaagctgattgaaaggagaaagcttccatgctgccgagcgcacgaccttccactccaatcccataagaactgagcaaaactcaagtaaccatcggaactggttttgctctaggtaaacccagaggccaagaaccgattttgctcaggggacccgaaaaaaaactaaaccccactaaaccggctggctgctccgagaactgacatctttaggtactgcaatatatccagctgctgctactactactatcacgcaaactatacagggaaatgtttattca

SEQ ID NO: 150719 - DNA, 770 bp, Arabidopsis thaliana landsberg
agaagaaaaggagagagcatccatatcaaataaagctaaaaacttgtaatagttataacaaaaagggatcactctgtataataataaaagctcaaaaacacaccaaaaggaccaggcaatttcattcccatcaacaacaaaaaaaaagataaatgaaaacgaagagtaatatataccaaactatataactcgattcaatttcatttcttgtttttttgttttgttgattaggaaatcgattaagctacagaagaacattcccttgcaaagtgaccttccttaccacacttgtagcacgcattatcattacctcctccaccgcttcctctctggtcacaatcacgagccaagtgaccagaaccaccacactggtaacaaccacgagaagactgtctcttagtcgcacactctcttgcaatgtgaccaactccaccacatgaataacaagttccacttccaccaccaccgcttctgacgtttccggcagcaaccttctgagtacaatccctagcaaagtgaccaacatcaccacaagtgtagcaaccatcgtttccacctttgaccgctccacgttggtctccgtttccaactgatttctgagtacaatccctagccaagtgaccaacatcaccgcaagtgtagcaaccatcgtttccacctttggtggctccacgttggtcaccgtttccagctgaagtacaatccctagcgaagtgaccagtatcaccacaattgtaacaaccttctcctcctctagatctacgttcacc

SEQ ID NO: 150720 - DNA, 191 bp, Arabidopsis thaliana landsberg
ttaaactgcaagaaacaaatgtcccagtagcatgaccacttcagcacttctcaaacatattataatgttttaacatggataaagctatttcagatactaatccagtcgaaatagagtagttttgtcttagcaaaatcaccaaactttatctcttgataccaatacagagtgactgcacaagtctgagaaca

SEQ ID NO: 150721 - DNA, 103 bp, Arabidopsis thaliana landsberg
tttatagagagaaaagaagcgcagagagaagctttgagttacttctacgagttatcattctccagtcaatatttggttttttggaccacccacatccataata

SEQ ID NO: 150722 - DNA, 698 bp, Arabidopsis thaliana landsberg
atacagttcgcccagacgcctgtggtggataaaaataattctgctgggcaaaactcgaatctacacttgaaatgaatgccaaagttattgtatgtatcatgagggagacagatatggagcgagtaatctctatccttatccaagaaaaggtatttctagtttgcatggtccaatcatttatcccgaaaatttctacaataaagttagctaggtcgataatatacttccctagccacaattctgctatttacatttactgaaaaaaatcaaattttttttgttgaaatatacaaggaatccctcatgggtaaaaaaagtaaagtaaatacgactttgatttggttatgatgtataaggtacgaaagattaaaattggatcagtgaatctttttttagtcgtttattgcatgataaatcactacaagtgacggagatacacgatttaaataacgaaaaatccaatatttaaaaattgtatcaagaattactggaaaggtagaaactagaccagataaaatttgctcataatgagcaaacccaaaatctttgtaaatataaccaatcattagttcccaaccgtaggcgaatggatgcgatacataatcagttaataaagaatcgaaaaagctttaattgtatcacttaaattatataggaattcttgaagcccaagaattcagaataaaaatcttttcctt

SEQ ID NO: 150723 - DNA, 144 bp, Arabidopsis thaliana landsberg
cacgtttgcgtttagtaaccgaaagaaccaaactgataaatactacttctcctatgagaatagtttttggtaaaactaacataataaaatggtttttggtaaaatcgctgtagagactcctaaatacacggtgactaaatccgg

SEQ ID NO: 150724 - DNA, 494 bp, Arabidopsis thaliana landsberg
gattcttgatctcttgttttccgacagcttcaaggtgtggtcggaaggcatcgaagtcgaatcttttttcatcgtcgtcggctaagccgtcagagaagaactcaaaccggatgaaacctagaccgaccggtttgagcacaccgtcttgaatcttgttggcttgacgcatcttcttgccccatggctgctctgtggtgacaaaggtgacgagtaagcctttagaggctatgagctttccgagacgaagtagagggtttacgtgaccttggcctgggaaagatacgagcatcacatgagtatgacgagacgggtccatggatttctagtttctttaagaactagaaagtggttttgttttctttacactatcaaatgtatgtgaacacctaaaacaaaatatcaaaagaaagtagcaaaacgagtggcaaaatcatacacttctcttcttctttggcttttactcttcgtcgaatcttggacgatctctattctga

SEQ ID NO: 150725 - DNA, 220 bp, Arabidopsis thaliana landsberg
ctttttgcactgctttgggttttctaacgatgatggcgtgaaagaaagagagagagagaacaagcagtgttcaagaagagagagagagaggaacaaaagtgtctcttttttcttctctgcattgctcatttatccttgcgtctttgacgcttttgtaaaagctaaaaaagaaaaaagatgccaacgacgacgaagactagagagagatagcttaagacca

SEQ ID NO: 150726 - DNA, 220 bp, Arabidopsis thaliana landsberg
aaacctttcttggtgaaaggcgagagcagagttaggatcgagaccagactgagagagataagtctccacatcttggatgaatttggcggcagggatccctcttctctcagtcaaatcactaccgcttccactcggagaagacgacgacatcttcgaatcggaatctcagttcccgatttggggatttagggttttaaaagcttcgacttggttttgtatg

SEQ ID NO: 150727 - DNA, 76 bp, Arabidopsis thaliana landsberg
tagtttctcatcaactacatgcagtatgtctccactgtcccaacagtctagtacacaatcagtcaaaaccatctcg

SEQ ID NO: 150728 - DNA, 213 bp, Arabidopsis thaliana landsberg
ggtgatggtgttgaggcaatggctgatgttggtgtaagtgttctcaccggaattaatgggaatccgcttggggttttagcgaggcaacttggtttgcctcttcataaggttagagatatttgtccattgtatcttcccaatggagaacttgctgatgctggtgttgattctaagattgaggcatcgtttaataagatgttggatagaggttgt

SEQ ID NO: 150729 - DNA, 59 bp, Arabidopsis thaliana landsberg
acaaatggctctgtttttttctctgttttaatatcacacaaaacattcaataggttttg

SEQ ID NO: 150730 - DNA, 352 bp, Arabidopsis thaliana landsberg
cctatttataaggaaccaaagaaattgagttttctatgtatacatagagaaagctgtgtgcaatgaaaaatgcaagcacggtttggggaggggttttttacctttttttttcattttaacaaggagattatctactccatccgactagttccgggttcgagtcccgggcaacccactacggatcgtattcaatcgtattcatatgatttggaaaaaatattcctagagcaattctatttctatgtatgtggattcgcttctaatttatttcatcgattacaaaaaattttttatgaatctaaactaaaaggatcttatccattttacattggttgacatggctatataagtc

SEQ ID NO: 150731 - DNA, 380 bp, Arabidopsis thaliana landsberg
acaactgatgaaggaaaccaaaaacaaaaacaagagaataggttgattagttagccgccagcttgacctctttatcatatatatcgactctctactcaaatacagtgcaattagggaaaattgtttggcttctttttgttatatgattcttactattatgtttttaatcaagatgcagattatatatatagacaagtattccatacctttaatgaattcttccttatgcaaattcaagtgaaaaatttatacttgatcttcaattccaaacacaagaacatgagagagtattgaaaggaaacaaaaatagaaggctggcaacaattgcagttgcatgcaagacttatcacttgttaggtcaaattaaagcagaccagtga

SEQ ID NO: 150732 - DNA, 182 bp, Arabidopsis thaliana landsberg
  unsure (1)..(182): unsure at all n locations
aaaaaaactctttattatactcatttcaaaatcgtttcagttacaaatccctcatgtcactcaaaaataagtactctctcaggaagcttaactagataattctcccttcatagatcaagtggcttcaaactaattgaactccatacttnaggtttatagtaagcacaactataggagcatgt

SEQ ID NO: 150733 - DNA, 347 bp, Arabidopsis thaliana landsberg
tatgaataagcaaagagcagagacttatcggttatcagatttacatttacattcatcactccaatccaatcactgacttaacacacgatgatccatggtacaaacgacagacgaaaagtaaagagttgaagcttgaaggtttttggtcattcaaatgatatctggacaaagcgtgtgaaataaaaactagctaataagcgaagtagcagccaaggatgacttccctttttttgtaggaacgtacacatcaccagattccaccggctcagatatggacagagaaatggtgtgtgttcctacctccatgcatgtcatttgattgaccatgaacatacattgttgggttt

SEQ ID NO: 150734 - DNA, 259 bp, Arabidopsis thaliana landsberg
tggtagaatctacagatctgattataacttagtcgaatacttacagtgttgactcgtaacattacgatccgaaacagagatactgagatcacacgaagaagacgattggactttaatcttaaagattttaagaacggttactttaccagtgactttaacaaaagtattaagcggaatgacgccagccatgacgtcagataaaagctgcgtttcagagagtaaccgatccgccattagcgtcaacgttatattcaagggg

SEQ ID NO: 150735 - DNA, 235 bp, Arabidopsis thaliana landsberg
acagatacattccctctgagaaccaagaaaacaaaataataataaaaaaccctaattccccgctccacttctctctctcacgctctctctgtgattttagtatggaagcaacggcggaggaatcagttagtactcttgttacgacgatggttgatgagacgtatgagttattagcgcctcgatggtttgatttcgttaatggagagactgaagatgagtctcgccgagaagaact

SEQ ID NO: 150736 - DNA, 289 bp, Arabidopsis thaliana landsberg
ataaaacaacactttttattgcctgggtgcttggaagttttataagtgtctcccatatcccaaattattatcatcgaaaagataaaaatgatgaagagaaagttgattgatttaaaaactttaaaaaaagatgttcagagtttgtggatggttttcatgtctatagcttcaaccaaagttcctttctcaacatgatcccaccacttcatcaagaaattgtccaccaccaatctgaaccatggtgacagtttcaaaccttcctcacctgcatctgctttcttcaccagct

SEQ ID NO: 150737 - DNA, 191 bp, Arabidopsis thaliana landsberg
aggaggattagaagaaacttggagtccagaggtcgcatccacattttcttcatcactttgcaaagaattggttagggctagtgagttctcttcctgtttaggaagggagaacgtccttttaacagctaacctagacttttcgcgcgatccccagccatttgccatgacactcatgtttctccatttatcct

SEQ ID NO: 150738 - DNA, 373 bp, Arabidopsis thaliana landsberg
tcgagttttaattcatgccagaatttcttgtataaactaacaactcttcttatctcccacgtaatagacccccagggtgctatgattataccattccaaagaaacccataatgcactttggtgggttgtgtagatttatatatggtattaagttaatgatatgttttatgaaaaaaaagagagttaatgatatgttaattaagtgggttttgtttatatagttgttgtgtacatttatctcaaatattcaaacatacatatatgatgttttgtacaaaccttttttaaacgcatttatttaaagagcactaaaacatttgttaatacaacatttggcaaaccctgtagaatctcttacgggaattacaacttt

SEQ ID NO: 150739 - DNA, 169 bp, Arabidopsis thaliana landsberg
tctttagaattatggaacatgtcagagaacaagacgatgacattaccagctcacgaagggctaattacatctttggctgtttcaactgcaactggattggttgcatcagctagtcatgataagctagtgaaactgtggaagtgaaaactatgagagaggaaaagagacg

SEQ ID NO: 150740 - DNA, 798 bp, Arabidopsis thaliana landsberg
ttttattgaatagggtgtggttaaaaacataatacgggcgattgcttccaccaatgcgattatatctgcagcttgtgcacttgtaaccatgaagattgtgtctgcatgcagcaaaacgcttgtaaattatttgacgaatggtttatttctttctgtctaccttacttgctagtgttcggagtacagctagactactaaaagttaaatatatgaatttacaaataattcaatgttgcaatttggttggttttcattttcgcaaggtataacggtggagagggtctttacactgaagtgacaaagttcgagagggacaccgaatgtcttgtatgtggtccgggcattctgattgagctggacacctcagtcactttatcaaaggtccttcctctcgcattatcatctcattgtctttttttataccacgattatcttgatgttcatgctgacgtattgcttcattcatactaaattatcttctctactactatctccattgatacatttacttttatccctgtatcgacacttggctgttattttctttagtctcctcgcttttccaggcttggttttagctaaatctcaatttactcgtgctttgtttgtccatgtatattctgcgtctcaattctttaccattttttcatgttttgtttttctttctcctagttcattgagatgcttgaagatcacccgaagcttctattgtcaaaagcaagtgttaaacagggggaaaacactctctacatgcaggcacctccggttctagaagagtttcacagaccaaagctaagc

SEQ ID NO: 150741 - DNA, 260 bp, Arabidopsis thaliana landsberg
aaaacatcgaaagtcaggtactacataataactagctagacctagacttcatttgattccagcaaaacatctagagtcaggtacagcatgatgattgatgacagctagtaataaaaaatatcattgccagatgtgtcaacatagaaattgtgtactagaaagagaagttgattgtatcacacatggttgaagcatgtaatgatacagagattgtgccataagtttgcacataaaacgccaacactggacaccaaaagcac

SEQ ID NO: 150742 - DNA, 419 bp, Arabidopsis thaliana landsberg
ctaaaaccaaaaacaaatactaagatagtaggaaatgatcaataagacgagactcaaagagtaataatctcactcttaaaactcgtctttgcagatgcaagataagtaagaaaacaattaggttcaaatatttgagtactaaattatttgagaaagagcaatgaaattattgaaaataagttacggtataataactatgtctatgaattcttcattatgcccagaaccataatcatatagcttagctttgttcctttagtttaaagtgatctgttgagaaacataaggaatgcatattttgttgagttaggatataacttcattgtttaactttttctattatatgcttttcttgttaaggagaacctttaacaatgtttttgatgtcactgtaagcatagcagcatacagatcagttt

SEQ ID NO: 150743 - DNA, 326 bp, Arabidopsis thaliana landsberg
ccagagtgtcatcataacgtcttttgttacctgaatccttataagggagggatctcggggactgtacacgggcccttaatctctgaaggtctcataagtttctcccgtgttcggggaattgaagctgtgctccattcaattcgtcgatcatagccctgagagtcatccctagtcgtatgatgatttgagtagcgagcatttgcaggtgggttccagttctgagatcgagaattgtcaatacgacgccaagcatgtttagaattagcatttacaacttgtttgccttctgtttttctcctgcggtagtcagaggttgttgggtcttc

SEQ ID NO: 150744 - DNA, 412 bp, Arabidopsis thaliana landsberg
gcgagaaagagcataaggaaacgtgatgtgccggcgatgaacttttatctaactgcggctgtgtctgattacgggggatgtgtggacgggttcattgaaacacaacaggttaatgcgatccaaaatgcagtggttgacttgagaaaaattagcagcaattgcttggcgttgtctacattgattagatgatcgatttaagagaacaattgatttaatttttctcaaaacaaaaactaattaattgaagaaataaaaaatctcaagcaattaaaatttgggtttctttttgttgtttttgttttgagagagatgtttgttgttgatccatcattcgtatgtaacgccactgggtgtaactaattatatttgaatttcgtgtaattaataatcgctagtagattttttcatattc

SEQ ID NO: 150745 - DNA, 488 bp, Arabidopsis thaliana landsberg
  unsure (1)..(488): unsure at all n locations
actctgagtacacgacgttgcgtaagagttcgccgattctccgaaaacccgttgaccactgtcatggcttcacgttctgcttctaggcttcgttctctcgcatctgcctgttctggatgtgctgaagacggtggtggaacctctaatggctccctatcagcctctgctactgcaactgaagatgatggtaacttggatttgaatatttttgtgtatagagttacttgtcactggaattgaaatctgagaaatcgtttttgattgtttgtttgtgtgttgaactatgtagaatnnnnnnnnnnnnnnnnnnnncgtctgcctccacctgagatcagagatattgtagatgctccaccagtcccggctttatcattttcaccacatagggataagatattgtttctcaagcggagagcattgcctccgctcgcagatttagctagaccagaggagaagcttgctggtgttcgaattgatggatactgcaa

SEQ ID NO: 150746 - DNA, 229 bp, Arabidopsis thaliana landsberg
  unsure (1)..(229): unsure at all n locations
atttgggcaaccaacctaatcttacctcataaactgataatcttaatcgtatacaaattaattacaatagagctatacgatctaatgatctatatttttatcaccgatcgtctagatccggtatttgatatttatgccaatggagttaatttgtaaaagaaaaaaaaaacanattctatatattataattcagcagntaaanttctcatacaagttgaagatttacttt

SEQ ID NO: 150747 - DNA, 338 bp, Arabidopsis thaliana landsberg
tgacgaacttgttcgtgttgttaagcctggtggatttgttctcattactgtttgggctgctgaacaggatgattcatcgttgcttacgaaatggacacctttgtctgctaagtatgttgaggaatgggttggtccaggtagtccgatgaatagtcctcgtgtgaggaacaatccgttctttagtcttgagagtatcccagagactgaggtgagtacaaaggagcaaaaggttgagaacagtcagttcatcggtcttgaaagcattccagagagcgaggagagtacgagagagcagaaaggtgagagtattattccagaaaccaaagctagtatagtag

SEQ ID NO: 150748 - DNA, 458 bp, Arabidopsis thaliana landsberg
tttttggcgggaaaatcacgggtttacgtttttggcgggaaaatcacgggtttattttttttggcgggaaaatcacgggttttcgtttttggcgggacaatcacgggtttacgtttttgcggaaaaatcacgggtttatgttttttggcgggaaaattaccagtttatgtttgttggtggaaaaattacgagtttactttttctcaatttatcgcttgtatatttaagaaatttggaaaaatattaattttattagattggtttagttgtgttggttaaacttaaattggcattggtttagagattttagttggtttaattcaattttacaaaacttgatgggttaattgggtaaaccattgaaaccattaaccattacaatccaactcattttactcatcaaaccaattgactcatcaactcatttgactcatcaactcatttgagtcaaaattctg

SEQ ID NO: 150749 - DNA, 519 bp, Arabidopsis thaliana landsberg
  unsure (1)..(519): unsure at all n locations
cttcaactacagattcacgcttattcgcactttggaattccaacttttnggttctctccaatgaccaatacgcttattttattgcatgaccataacgaggtattcacatgatgatattatctattgccatctttgagtctatatatttaatcacagtactgatataaacacttaattgtggcctcagttcctaaaggatactgtattcatgaaaggaatagaagtatatgaatcggttatcagcgctctaagttcctttgagggagaatctgctcaagtgatttgaagcatgtatatatgcaaacaattgtgacacactgcttatggtcaaggctcacattgctatgaccaagaaaagtagtagctgtttcatctgtaagttatttttatcaacacttactcttgctttaacacccttaagtggttggtaatcatcctttgtatatatatcagacatttaataaacctgcataattctctaactctgaagagaaaatgtcattggtgcttggagcattt

SEQ ID NO: 150750 - DNA, 418 bp, Arabidopsis thaliana landsberg
taaaaaagatgacagaattatattaaagaaacatatggtaaaaaagtttgtacaacaacaaatctgattgtatcctatggtttgatgcacagaacaatcgaatagaatacagagtaacgaaacaaattccaaccaaaagttggtaaaatcaaaagagagaagaaagaatgtttttttttttgtcaaaggagatgagagaatttaccagctgagactgagactataataatatgtaataacagagatcatcaatcatcatcagcgagagtagtgtccatacaaatcataaggtgcccaaagagtatcaagtggacaaggccgtctcgaatctaaccgaaaccacggtttaccactaccggaccaatgaagcaagctaaccggaccgggatgtaaatctctacagcttcctctcacgtta

SEQ ID NO: 150751 - DNA, 381 bp, Arabidopsis thaliana landsberg
cttcaggacattgttcatactgggggtcacaatcttcttaggcctatcaattcctcaatatttcaacgagcacgcagccatcaaaggctatggtccagttcataccggggcaagatggttcaacgacatggtcaatgtgcccttctagtccaaggcctttgtgggaggatgtgtggcttacttgttggacacgacgcttcacaagaaagatggttcgatcaggaaagaccgaggtaaacactggtgggacagattctggactttcaagaacgacccgagaacagaagagttctatgctcttcctttcaacctcaacaaatatttcccttctgtctgaaaaaaaaatccttccaaactttatggaatgctgttttgctagtt

SEQ ID NO: 150752 - DNA, 428 bp, Arabidopsis thaliana landsberg
aacacagaacatgagctttactcattttattttattttgaactgatgagctttgctcatttttacaccatttgattaactcacttatgaagaaaggctaacgtcataggaaacttaatcctcggattccaactctttcttcaccttctaaaatgatgcaaataatcttaaaccaaaaaagtaaaaaaacaaatttacaaaactaacaagattattaatcaagcagagagagacgggaaacaactcccagatcggagaagcgaccgtcgtgactctacgccgtcgatccccggcaaagctccactcgagcttgtcctcgtggtggttctccgtggagagccatcaagactccgccgtagaatcctaccaatgacggatatcggatcttcctcttcatcgggactccaagaacggaaacggtggcaaaac

SEQ ID NO: 150753 - DNA, 287 bp, Arabidopsis thaliana landsberg
  unsure (1)..(287): unsure at all n locations
aactgaacagtcctctttgtcttgatggtgccaacagcagcattaacatctttgggaacaacatctcctcggtacatcaaacaacaggccatgtactttccgtgtctcgggtcacactttgccatcatgctagctggctcaaaaacggcattggtgatctcagggactgatagctgctcgtggtaagccttggcggctgagatgactggtgcataagatgacagcatgaaatggatacggngatatgggacaagattggtctggaactcagtgatatccacgttgat

SEQ ID NO: 150754 - DNA, 86 bp, Arabidopsis thaliana landsberg
tcctattgctacgtctgagaatcaatctcctatggaggagaaagaagaagcgtctgagcaacaaaccggatccgaatccgaatcga

SEQ ID NO: 150755 - DNA, 376 bp, Arabidopsis thaliana landsberg
gagcagtctttgaaagttcaacgaatttgtagttggtttttttttttctttttttttttgttgacagatattctaaaaactggatattttatccacacgttatcgttctatgagtttggtatcagtggtttgtaatcagttcctaccttgcccatgtctccaaaaacaatgattattagatgtagagaaagatggtaaagtttgttatttctcattaaaggataaaaatgatttacagtttatatactaaataagattacaaatattaaactatattgtatatgtatatgaactatacactatactctaatacccttcactcaattcgaattattcaagaaggaagaaaaatacttgaaaaaacatatcgagacat

SEQ ID NO: 150756 - DNA, 126 bp, Arabidopsis thaliana landsberg
tctctctgtttcttctcttgagtggagcgaatatccaaaagattttctagtttctttcatccttcacgagcttatactttttcttctccattcgtttgtttttaacgatcaaaaacaacggcgaag

SEQ ID NO: 150757 - DNA, 317 bp, Arabidopsis thaliana landsberg
ctctcaagttaacttttattttattgtttaaaccaccaaatacccttaatagcccatgggcaaaccactaaataaccttgtagcccatatccaaacaactgtcttttcctttcacattcgccggagttaatgtgtattggtaaccccaattcataacaaaacaaagacgggcgctaaaccctaaaactaattaaggctcatcgctatatcaacatcttattctttggtttaaccacttaattgcacaaccaccaaaaaaacgatccaaaactagttttactgagagctattcttgagatgaatgacgaccacactta

SEQ ID NO: 150758 - DNA, 374 bp, Arabidopsis thaliana landsberg
gaaatttttgactcaaatgagttgatgggtcaaatgatttgatgagtcaattggtttgataaataaaatgagttgggttgtaatggttaatggtttcaatggtttacccaattaacccatcaaattttgtaaaattgaattaaaccaactaaaatctctaaaccaatgccaatttaagtttaactaacacatctaaaccaatttaataaaattaatatttttccaaatttcttaaacatacaagcgatgaaattgagaaaaagtaaactcgtaaattttccaccaaaaaacataaacccgtgattttccaccaaaaaatataaacttgtgatttttccgccaaaaacgtaaacccgtgattttcccgccaaaaa

SEQ ID NO: 150759 - DNA, 221 bp, Arabidopsis thaliana landsberg
gtttctcagacgaccattcccaagacagaacaaaacaccagataatgctttgaaggcaccagaatgtggaggttgaaaaattgaagaacaatctaaagaagtagctgatcggaacataaaagtgcacatgggttttgtcttgaagccaaaggctcttctgtctttttattcctttatgaggaaattgagataacctaattcgaaaatcaaatagatttgtg

SEQ ID NO: 150760 - DNA, 914 bp, Arabidopsis thaliana landsberg
cagctgcaaaccaagacagtgttaagaagaaatccatctctcgctcttctcgtgctgttatttatgtatccctcaaaccctagctccttttttgagaatcgagtggctcggagtttgaatgtgcgttaggtttttttcattatgttcaattgtgaattgggaaccagatttgtatttcgttctgtgtttaatgcatttttgggaaattgcttcctctctgatttctggaaatatgttttactctgtgtttcttcattaaagttacaatgtgtgcttgatactggacttttattgtctctatgactctatgccaagtagcattatttttggtgtgtctcattttatgactgtgatatggtagcttgcatgttctatacggttgatacacacaagcttgatttctctgtgtgcacttcttgtagttgcgtatgaagaaaaacagtgctatctatctagattctagagtaatttgtatacaatagagtactaccaattgatactgagccttaatgggagcatctacttgtcctctctgtgtgtgtgttctggaaatctaagccaaacattgtcctgttattgtcattagtttacttttgggattcttccttgttaaagccgaattgtacatatcattgaatccatgttacttatatggcttattgctgcagtgtcttttattatgataatcacttgatacgttgtaatatctatctataagatgtagtaagtgaatgatcaagcaaattaaaggactgtgtggttagtttaagtgtcttattaatatatatctatctacaagaagatctgtctcagtctgattaatgggaagcctttctctgtgccctaaagttatgtgcttattttgttttctcaatgtggtattctttcagtttccagtgggtcgtagtcatcgt

SEQ ID NO: 150761 - DNA, 244 bp, Arabidopsis thaliana landsberg
taaaaactgcgttgaaaaatgtaaaagcgaaagatcgtctttttagagtttttatttttattttcctcttacatctgatttattggatatttttgacaagaattgatacattaaaagtaccttttttttttacgtacattcttagagagtaaatacataaccgatcattaaaaaaaagagatgaggaagtgaatttcccacatgttttaaaccttcagaatttatatttatggggtttgcaaat

SEQ ID NO: 150762 - DNA, 260 bp, Arabidopsis thaliana landsberg
ctcactatacaaatctcggaggctccctcctgcaagtggaacacacactcttcatcttgtgaggttattatacgttgcagtagtagccgtaagtttactaaagcttcttaggtagattatatgtcttcttgagaaacctcgtggcagattcgtcgttacggtaacacaaaacacgtaagagtgtgtttggctccatgccattccactggcctgatgttggaggcaacggaagcctcgacttagctgaagaaccatatgct

SEQ ID NO: 150763 - DNA, 91 bp, Arabidopsis thaliana landsberg
aattgaaagcatatgaacattcaattcaattcaaaaaacacagaagatagattctttcttcaccatagatctaatctaaattactcttaaa

SEQ ID NO: 150764 - DNA, 160 bp, Arabidopsis thaliana landsberg
cttaaacgaaaattttgagaagaatgcatatatgcttttgcaaaaacaaatttctaaactttaaacaaatgcataaccacgagagagaaagagggagaaatcatatgaattgaatcttgcattttgatgaaactctggggagagccattacattagctac

SEQ ID NO: 150765 - DNA, 426 bp, Arabidopsis thaliana landsberg
ttttcgaataggcattagctgatccttacttcaagggtctttctaagattgaaagagaactttcaagtcagcaaatctcgaaaatggagtttgaatttgagaggcgaaggttgacaaaggacgacattagagaactaatatacagagaaatactggagtaccatcctcagttgctcaaggactatatgagcggatctgaggggtctaattttgtatatcctaggtttgaatttcttcctaccttttattattatttaccaaatgaaacatttcttgtttctttctcccgttgaatctatgtccaatcgcgtacctctgcctggctttttattcatgtttttactttttcacttgcagcgccattggacatcttagacgggagttggcttacttagaggaaaatagcactagccctgggccggtcat

SEQ ID NO: 150766 - DNA, 416 bp, Arabidopsis thaliana landsberg
agagagaggacagtcgcatcctgcggccgcctaaacagaagatcacagattcggatgagcttgccgagtacagactccgacgtcggaaggagtttgaggacaagatccgcggcgcaaaaacgaactcacaagtttgggtgaggtatgctgattgggaagagtctcagaaggatcacgatcgtgctcggagcgtgtgggaacgagctttggaagacgagggttgcaggaaccatacgctctggctcaagtacgcagagttcgagatgaggaacaaagacgtcaaccatgcgaggaacgtttgggatcgagccgtgaagattcttcctcacgtggaccagttttggtataagtatattcacatggaggagatacttggtaatcgacggagctagaaagatggatgaagatggaagaat

SEQ ID NO: 150767 - DNA, 435 bp, Arabidopsis thaliana landsberg
gtctgaagagagagtaagacatctgatggggaagagaaaagagcgtcgttacgccgccatgaatagcaccggccgtcgtgtcaagcttgatctctttgcggaaccctctggtatgcttcttcttctatacttgtctaatggatttctgctcttttgttcgattaattctattagattgatggatttgtggattcgatctcgtttctcaataaagctagtttatgaatgacttaggctacctgacaaagagtctgataattttaatttagattttttttttgtaggaattgtcgaattttgcgtttctcggcctttttttagtatatcttttgatatttttgtaggagatttgggtggctcacatgtgcgtgatggagttgagcgggaacaaacagagcttaatgagctacccaattcaccttcttcttcaggtgg

SEQ ID NO: 150768 - DNA, 442 bp, Arabidopsis thaliana landsberg
  unsure (1)..(442): unsure at all n locations
actttttccttggatttnaattctcagccatcgccgccgttttcggcggtgtaaaaaatgaagacccgtagaaacccggtgtttnaagcagtgtcgacgtcgttgtttcatggagaagatttttccgatttgtttctttgttcgtcttctccttcgttctcttctctgctgtgttcatcttcttaggtattaatcacaaccgtttttatttatttattattacttaatactaattaatatttgcataaatcaggaaaaattcgaccggtggtgcggtcttcggtcaacgcagttcttcgtggttctgtaccggtggttaaggtgatcacgatccatgaagcagttgagtttcccgaccaaacattgattttcctaaaataccctccatcttctcggttttttaccaaagaggacctcttttgcgttttctccgacgtaaacg

SEQ ID NO: 150769 - DNA, 351 bp, Arabidopsis thaliana landsberg
tggacagatcaatcaatttccttctctggtgggctttcctgacgcaaccctcctcctttggtttttgtcgatctctaagctcagacagagattcgaatgacctaattgtatcccgtcttatcgagactttacacagattcttctgggattttatcttacacagtcgttatctacttgttgcgtccaattgatttctctgaatcagaaaccctaatttcgtgggtcttgtgcagtctctaaagtttgcacactctctcagaatcgagccaaggtttcgtctagaaattagggtttcttagttttttcatggtggaggatattgtttaggccgatttgagggctttccatcag

SEQ ID NO: 150770 - DNA, 614 bp, Arabidopsis thaliana landsberg; identical to SEQ ID NO: 39250

SEQ ID NO: 150771 - DNA, 271 bp, Arabidopsis thaliana landsberg
ctctgtctttaccaaaggagttcacacatacttggacatcgagtcttgtggtggagtgaatggtactgagctttaccctgatgtcaaatacatgaccgtgagctttgttttttgatactcttctctagaattataaaccaaacagcaaagggatcactctcatttttcagagtttaccttttacacttccaaaatttctctgtttttgagggctgaatcaatctatctcatgtagcactatctttaccctattgatctgagtttcgacctt

SEQ ID NO: 150772 - DNA, 220 bp, Arabidopsis thaliana landsberg
gctcctctttgtggaacgaatggtaataaaatatagacgttacaaagcttctttagatccaacggctcttattctcctaaattcaaattcgtctacactcgttctcaatctctctctaaatctctcactctctcttggtctctctctcgctctctttgattcagaattttggattcaacgttctttgggttctctaggcacaaatccgccatggaaagag

SEQ ID NO: 150773 - DNA, 368 bp, Arabidopsis thaliana landsberg
aacacaacaacgaaaacatcatatgatattttaaatttaagatataattaaagaacaatttaagcatcatatgatatttttagaaaagtgtgccaaattatttaaccgatagcaatagttgaactagaagtccaagttcagcctcataaaaaaaagttgaactagaagtccattgtccccaaaaagttaaaaagttgaaccgatagcatcaaataattttaagtttaagatgtagttaataatcgtatgcaatgccatagaactcatgattcatatctatggcattgcatacttatttatttctatctcatgtaattttacacaaccgttaatttataatctctgattcattttgtaaaaagtattga

SEQ ID NO: 150774 - DNA, 571 bp, Arabidopsis thaliana landsberg
gaaaaatctgtaattgatttacctaattgtaaacctgatattgcaccttaagacacgcattgaaacagacagataaatattaagcgtactagaaaaggtaatttactcttttttttagcaatacatacaaattgacgtttcaaccaataatttctcaaagttcataatcataaatcatttgtcaaaccaagtaaaaataaatcagagaaaaaaaacggtatttgttagtcaacgaaaaatgaaccttccatatgataatttctttttcgttctcatagaaattttctatgtaaagcagagagaaagacgaggaaaattgggtaacataaaaactctttgatgacaaagacagtattttaattcggattttacctaataaatccatagcgaagaacggtagctcatgttcctattttatggtgtgcaccatcaatgatgatataattgtctctcgctctatacataaatcttagatcctttaacgcctccagaatcgaccttgtccctggtgtccttgctttcgcctgcataggagatatgacactcttagtgggacactaccaacagattt

SEQ ID NO: 150775 - DNA, 182 bp, Arabidopsis thaliana landsberg
gcaaaattagacatgtaaaacagagcaaaggtgaggtttaccaaaaaaacaaaaaacagagcaaagtctctgtcatgtcccaaaaaagaaagaaaggctttgatgtcgttaagcggctgaagagccatgagattgagattgatctttttcaacgagcacctcttacaagttgctcaagaacc

SEQ ID NO: 150776 - DNA, 306 bp, Arabidopsis thaliana landsberg
gttgtggatagtgagaatgaagtagacatagtggtgcagtcgcgccatctccgcgatgttatagtacttgtcattcgcggctttgctcagcggttcaacagcacttcactcaattctctacttaagatcgatacatgaaaccttaaagagcgaacacgtccattgcaactttatttcagtgtgccattcaaaatctcattcgctttgttgatggaattgtctctctgtttgttttggtgctttcatctttccaatatgctgcgctgtataccaaatgggttttaaaatcaaatttcaatcaggttt

SEQ ID NO: 150777 - DNA, 328 bp, Arabidopsis thaliana landsberg
tgggtctactagggggttttcttttttcacattgaacaaagagacgattcgtgtctactacataaccatttaaagagcaaacatacacatctgtggctgctccctaataataaacaatagagataagtgagagagaaagagaacataatcggttcttgaagaattgaagttaaagcttagtcccacgcactagccactccaggaccatacccttggttaggaacggttccatatcctccaggaccatagtaagcaccaccacctctaccataaggtgcataaccaccacccggaacatttccatatccaccacctggtacgggtccgt

SEQ ID NO: 150778 - DNA, 739 bp, Arabidopsis thaliana landsberg
tcagaattaactttgattaccaaatttatcacaaatttgaatcatcctctacactacgtataacccacaaattgatgcttttgacaagacaaacaaacatggcgcagcaagttttgcgttatcgttcaaacattagataggattgtataatttacattcaataagaatattaaagaggtattgagaatttcgcaccaaagtatcattctcaggcttctttgtgagttgagcatcatgatgatgacgatgatgatgaattgatgatgatctctctttcaaagtattggattcacataagctgacaggacagcttaaagagatcatgatattcacagcttcaggtcaatacgctccgaccattcaaatatgccagagtggacctggtcatgtcctatatcagacccgttacctccggcggcaaccctcatgatatcttcgatcaaagcaaagtttcccatgatatcaacatgggcaccactctgcgtcccgcgcccttccaacaggttagccggcggagagtgattgtattctcttatgtaagtcttgattccggaagggttgaatcttgtcttgccacgccacgcttttgcacacatgtacccggcacttaggacaggtactgtttcatccccatccacattgtaaactcctgctttcagacagctatcttcgtcctcctcgtgagcagaagtgaatatctgaaaggggatgcaactgtcgggagactggttaagcttgt

SEQ ID NO: 150779 - DNA, 292 bp, Arabidopsis thaliana landsberg
  unsure (1)..(292): unsure at all n locations
ctgtctcaaaggactttgttatgagtttttttcttgttttgtagaattgttctagtttgtaatacaaaacttaatcagtatatactatttatatatggatatagagaaattttaattaggaaagacctcactcgagagaatatacagctagaaatttcggtcgatttccaaatatcttattttcgattcatttcggatatatctagtttataaccatattctctaaattcgaaactggaagtactcgaattcacttgttgcanatattaaacatattccctaaaatcaaaac

SEQ ID NO: 150780 - DNA, 92 bp, Arabidopsis thaliana landsberg
acaaaccaaaaaagagagtccaccaactctacacgcaattcaaccaattatcttgctgtcgccattcgccaatatccatcgccatgttcttc

SEQ ID NO: 150781 - DNA, 225 bp, Arabidopsis thaliana landsberg
taattgtttatcaaaaaaaaaaaaaaaacatacaaaaaaaaaaaaaagatttgtgttacgtacttaattgaaacattacaatggcaaagaattcttatgcactgtctgggttaattgtggccctagtcatcgcattggtatgcaacattgatgacgctgcagcgagagacgtgaagctagtgaagctccgcgatgtaaaacccgaaactttgaacaagttgaaag

SEQ ID NO: 150782 - DNA, 227 bp, Arabidopsis thaliana landsberg
gaaaactcattaattcattcgtcggattcgaagaagaaatcacttccagaaactttcttcgtatcgaagtattgcttgtgttcttcggagaaacgagatcgggatccgaatacgagtacaatggaggtttcgcaagatggatcggaaagagataaaactcctcctccttcctcttcttcttcttcttcctctcccattcctgtcgtcaccaatttctggaaaggttt

SEQ ID NO: 150783 - DNA, 824 bp, Arabidopsis thaliana landsberg
ctctctctttctctctaatctgtaatggtacttcttcgttcgatgacgtcgcttcttctggtgttcctcttcctctacggcgtttctccggttatctccgacggctccgatcaccgttacaaggtcggtgatgatgttcctctttacgctaacaaagtcggaccgtttcataatcccaggtctgtccgcttatctattcagatctgagctttcgattttcagttatttcacgttttttttttctgattttgatttcaattgcatggtgatctcttcgcttttcgtgtttctgattcaaatttgaatttgattaattggaatgacaaattcgtaggtctaattagtgattgtggttggtggttagtgtagatttaagcttcttatgtagatcatctttgatccatggtcaaattgtttaaacattaagcatgaattgatcaaatgattggatatttaagtgaaaacaatccaattttcgatgaattacgaactctgttgttttagtttgagctaactatttgtttatttatgtgttgcagtgaaacatatcgatactttgatcttccgttctgttcatcaggtatgtatggatggtgaaatttcttagtttcttaggcgaatatttttgtaagtttatatagctgagggatatttttttacagctcctgttaaggagaagaaggaggctctaggggaagttcttaatggagatcggttagtcagtgcaccttacaaacttgagtttttgggtgagaagaactctgaagttgcgtgtaggaagaggttgagtagagaagacgttgctaagtttcgtgatgtgattg

SEQ ID NO: 150784 - DNA, 313 bp, Arabidopsis thaliana landsberg
catcgatgggcttgatctttcccaattatcctggctggtttgatataaatcgtggcagttggataccttgaacgcataatgggagcttaatcaccgtgtttaaacattgtgattaggccaataagtcttgttggatagattttgacgcgtgaccccaaaagttagacacgtatcggatatagtagatggacatgttgataatggcaatcatgatcatggtgaatggggcatgaccatgggaaacacatctttgcaagacaatccatttaaaattgccatgtcgtttgcaccacaaacccaactgctcattatt

SEQ ID NO: 150785 - DNA, 302 bp, Arabidopsis thaliana landsberg
tttgggcaaatcaagcagtcttttattatatcatcaaagtcgaaaacactgtcatcataaactcaacacagtaaaactagtagcaacacaatgatttttggttcgtaatttcaacaagaatcagtctaagaccaaacaacagtaacagtactttttttcgcaagagagatagacagagatcggtagagatattcaatgacaagcatcaaagcaagcctttggcttcttctatctttcttggatagtgacggacgacaagagtcaattccaagatcaagaaccggacaaggaactgaagaatc

SEQ ID NO: 150786 - DNA, 532 bp, Arabidopsis thaliana landsberg
agactgaaaacacttcagcccaaaccacctcccatgtcttatctcagccaggtacgtacacaactatggatcaacaacaacaccaacctctggctcaacaacctttcttacaccaaggcgttcagtatatccctcacccatcacaatacataccaatttactctcatcagcaacaaaactaccctgtttacgtgatgtccgtcccacaatctcagcagtatatcccagcaggaactcccccgctctacccgaactcaaaacccggcacaaactcgagacctgaagctgcccagaacgtttaccgagctgctccccctcaggttattcagcttcagcaacagcatcagtacatgggttacgctggagctcctcaacatagcacaaacgcaaacgccaattacggtactggagctcctcaacatagcacaaacgcaaacgccaactacggtggaccctttgaatacacaaactctccaaacgagacagtgtattaccacacacaagctcctgctgcaaacactgccattccatt

SEQ ID NO: 150787 - DNA, 180 bp, Arabidopsis thaliana landsberg
atcaaccccaagtttccatattttttatacatgaaaaagtttcattcattgtctatttttaccaacattgcattatgaatctcgaagttagcatgaaaaagtggtcggactgttctgtttatagtttcccgacgaagacaaatggagttaccaacagcacagccaaggttcatgtcttca

SEQ ID NO: 150788 - DNA, 221 bp, Arabidopsis thaliana landsberg
ggattcccttatctcaaaatcttatagaagaataaggatttccatattcacaaaaacgtctttacaaacaaatttgacttatcttccaaacgtttcctactaacagactatcaagtattataaacctaatgtcatacctgagattgtgtgtgtgagcagataatgatgatgatgaagccagagagccttggattatcttcattggtctccttaagatcaaa

SEQ ID NO: 150789 - DNA, 146 bp, Arabidopsis thaliana landsberg
ctcaccgactgggctagagtcatccttgaaattagaaatttgcataatgcgtcctttttgcgaaaaattcaatagctcctctctaaatgtcggatcaccatccctcagaagccggtgtataactagcagtgcttttaatgcaacct

SEQ ID NO: 150790 - DNA, 213 bp, Arabidopsis thaliana landsberg
ttttttctaaatcaaatatcaaataaaatcggaaaaaaacattaattattacagataaatctatgtataaaaaatgagaaggaagtaaaaataatcaggtacgggagagagcacggacagcttcgtcagagtaaggatgaataaaagcactgttcatttgccaaactgtaaacgacgccgtaaccgtcgcatcaagagcattattgaacaaga

SEQ ID NO: 150791 - DNA, 721 bp, Arabidopsis thaliana landsberg
agcagagtagagctcgagtacaagagatttctattagaatgtggggagggtgaatcttagactctggtctccttaaggctcctacaagtagttcttgagcaaatcatggctactccagagtctctaaggactttttgtttggtgattactgggacactgcatgcatttaccatataagactttgtaattgtgaatataaagggtggttaaatgcgatttgatttggatacatcacattgtatggagcaaattgggattattaggtaaaagcttgattgataatgaaatgaatataaagtattggctctacggaagtgaaaaaatgaacagaattacaaaaagagaaccaaaaccgtgcgcagcagagtttctcaaagcaaaggggtaaaatatccattcaatagaaacggttctggaaactctgcaattttgggagaggctcaattaaagccgtacatgtcaaaactcttgtcgtcaggtggtcttgtgttgttgccaccttcaggtactctaaagctgtccattggaggtggccctgcggcagctggtgccgttggtggcacccaatgcggggtggtaggaacagagaagttagatccagaagcctcttgatgtaagacaacaacgttaggatttgcttgtggtgagtttcctgtggttcttcggtttgaggaatttgcagaagctagagacgatggatacgattgttgttgctgattct

SEQ ID NO: 150792 - DNA, 391 bp, Arabidopsis thaliana landsberg
acattaactatcaccagctatcatgcgcccacctctccaccgtgctctccatcatcatcattccatatataaatcattcacttgtagaatcttcttctctttcacactaaaattcatcgatgacggatcctcccagacccgacccgtttcctgttacccgactcgattccgacgccggtgctctcttcgtcctccaatcaaaaggttaaacccatatatttatgatatagattaatcaatctccaattttggaattttaactgatttgagaattaattctcaggcgagtggtggcacgccggatttcatctaacgacggcgattgttggtccgacgatattgacattaccatatgcgtttagaggattaggatggtggttaggggttgttt

SEQ ID NO: 150793 - DNA, 55 bp, Arabidopsis thaliana landsberg
gaagtctccaaatattgctgcatttatgttaccactgcttcttatacttttcacg

SEQ ID NO: 150794 - DNA, 189 bp, Arabidopsis thaliana landsberg
aaaattatgtactgtactatgtgtagaaaactatttatttatagatgataatgtttgctagcttgaatgactcgcaaatttggtagaatttgtgaggaatctgggtctgttaaattattacaagtccctacaataacatttggttgtgtacttgtgttagtgtaatatatatatatctcattgaaccct

SEQ ID NO: 150795 - DNA, 232 bp, Arabidopsis thaliana landsberg
tgtcttggaccacatcgttaatcaatgttgtttgatgtttactttttttttttactcagttttgaaaattcgataagtattctagctctagaattccatatctaggttttttgttttctcctagatagtctgaagaatcaattgtaatggtctgtggaattacacggaaacagttttgttgtaataatggagcatcagttttctttggttgaatgaaaaatcataatttttt

SEQ ID NO: 150796 - DNA, 122 bp, Arabidopsis thaliana landsberg
ttcctaagaaaatcaatctattttctttaaagagatagattttatgcacatcattgtctaataacaaaaatacaaatatggtaaactcgatttttttcgaatctattatttaataaaatcca

SEQ ID NO: 150797 - DNA, 386 bp, Arabidopsis thaliana landsberg
accaacacttgaaataaccaataagtggcaaaacacttcgttagtgtacagatccatagtacaatttttaaaaggaaacactgattcgagtttttaccacataaagatgctaataactcaacgaagaagatcctgaaaagttttcatgaagaagaccgcatgttttcaaggtctgagagcggctttgtgaaccatggtttccttgtgaatttggtggcaactcttttccacaagatctagaagcttctccaaattccctgcccacgagtttagaatctcgttgctgtcctttgcgatctggaagcacacaattccagatggtctgtctatttttgcaatcagtgcttttgacactaccatctccgatagatgcttctccgcctcct

SEQ ID NO: 150798 - DNA, 215 bp, Arabidopsis thaliana landsberg
tgtagtagagagagagagagagagagaggtagacaatgggagttatgaagaagtgggcgtcgctgaagaagaagaagctgctacaagaggaggaacaagtgacggctaaagaaacacagacatggcagcgattaaggaatactgtttcaacgtcgtattcgtcttcgtcttcgtcggcgaagtggaagcgagttgagataataatgctgacagag

SEQ ID NO: 150799 - DNA, 1222 bp, Arabidopsis thaliana landsberg
  unsure (1)..(1222): unsure at all n locations
tgcgacttaaacttttgaaattgaaaggaaaagtacacagcaatgttgttattgatacagagacagttacagttgaaagaaacaaacttttgtatgtaatgaaagtagatagataacagcattactacgacgaagctttcttttgcttatacctagcagcagagaagaagtaaaccgccatgttcacaaggctaagaccagccaagagccagaagaagtaatcgagatgacctgaattgagattatccgaaatccaaccttcttgcccatttcttgttgtaaaataagtcacgagcgtgaggatcaacgagctcaagtagttaccaagtgcattggtcaaaagagctaaggcactgcacaagcttctcattgcatctggagattggtcgtagaagaactcgagctgaccgatgaagtagaatacttcggctgcaccgagaatgaagtactgtggaatctgccacaagacggatatgggaactggggctcctgactcgactaatccaagatcgttggccatatggagacggatgatttcgacgatagctgcagctgccatacagagaacagagacaaacagaccaattcccattctttgtatctcagtgaatcctttgtctactcctgtgaactttcttgctaagggaacgatgaaccggtcgtagagcggcacccagatgatgacgcttgctgtgtcgaatgtcccgagtgctgcaggaggaagctggaatgatccaattttgcagttcatggctcggccttgttgaacaaacattgtggacatttgtgcgtatacagctgagaaaatgataccagaagcccagattgggaacattcggatcagaatcttgagttcttcgacttgcgtaaccgtgcatagtctccacgagttggaataatctccggatttcgattcttcttctgagataacagcggctttgtcaagatacctgcatcataccagaataacttgttaaaccaagtaaagctatacattactggaaagcaatgaagcggatattnnnnnnnnnnnnnnnnnnnnnnnnnnnnntctacttccagcaatagcagagttcttgtcttgagtttcatacagaagtgtggcgtcttcagggactttgacaggtgatttccggaaagaagcaaccacgactcccaaaatccccgttatagggcttcgtgcaggaaaatgggtcaaataaagaggtgtgccaaaggagat

SEQ ID NO: 150800 - DNA, 559 bp, Arabidopsis thaliana landsberg
tcgttggttttaacctctgaaacgatgaacagaagaaagtgcaaaaagaagaagaagatatgagttctcgaattttatcctccgattcggtaatcttcttacgtttctctgtacttactggagataaaaaaaatcgaaaattctcatcttttaagtcaattttgttactttctttcgaaagtttggtgattgttttgatgtgataacgcaggacgacgttgatgaagaaaacccgaaaactcacgagaatggtccaattggaggaaagactcaaaatttagggcaaagcaagggaggtgacagtgataatgttgtaaagactaatacttgtttcgtgtgtgatgggaaagacaattgggttttggtatgttacggagaggaatgtactatagctattcatcagagttgtgcatctgatgaacctgatttcgatgaatttggaaatttctattgtccttattgttggtataagcgtgtagttgtcaagtgtttggagttagggaagaagcttatgctgactgacaagtctaggaagggatgtagagagagtttaggagga

SEQ ID NO: 150801 - DNA, 396 bp, Arabidopsis thaliana landsberg
gttctactgatttttctctatgcctctttttttattaggaaattgtaaacctgctgctgtgtggagaagcggttcctaatgtatttgatggacggatggatcttggaggcggcatgtttctgaaaggcatatctaagaatgtagatgtgggcttcctcacgttgctcgagtctctcaacttctgcaaagtcggtcagaatctcaaatgtcccaaatggccaatatgggttattggcagtgagtctcattacaccgtcttgtttgcacttgacccatccgtccaagaagaaaacgaacttgagctgagagagtctcagataagaagagctttcgatgcaagagaccaaagcggaggaggaggtttcataactgtggaggcctttcaccaagttgctc

SEQ ID NO: 150802 - DNA, 570 bp, Arabidopsis thaliana landsberg
agagatatgaagttccttgataaaccaccaacattctttccattttccagcagactccaaggaagtttattgagttttgctcccacttcacgacgtcttacatcaaacttgtttcaaagtagaggtaattcataagttcttttcattttttcttttcatttttttttgtccatttgtgatcactctgtgctttggtatttcaaaaatgagtagaactaactaccagagacagtagctttattacgtctgttgaaatgttgagtcgtttaggaagagagggtaaggaagatatgcaagtatgtgtgcaattatttcaatgtataaaccgaagacaaattcttgatagaaatcaaatcatttttcatgtaactttaattatctcgtcttctacgctcataaattttatgtgcctcgctctcttccagagttatgtcttcaaagataagaggacttatattgtttaaggaaccctcagaatttacatctcaaaatgtaagatggagattgtagtaacgtagataagaaaagtaaacctgtatagatttgttcttacaatctagaaacatgtcg

SEQ ID NO: 150803 - DNA, 397 bp, Arabidopsis thaliana landsberg
  unsure (1)..(397): unsure at all n locations
gctcaagggctttataacaatatggttttcagttagaataataatcgtcacctccttacaacgacattgcttcattctagctaaagcacacantcttacgttgtcctgtaaaaatgcttcaaaccagaacattccaacaaanatagagtctcgtctcttcttacggntagtacacagtaattgtttctattaattcaatggagttatgttcaacatatccactataccacatttggattcaaacccttatagtagaatatggtttttttttttttccaagtgcattcaacttgtccaaataataataatgtaaaaaaacaatttttaaattttttaaaatatatggatagtaaaaaaagagatctgagaatttacctttttttatggtagctgaaaa

SEQ ID NO: 150804 - DNA, 164 bp, Arabidopsis thaliana landsberg
tcttaccgagtaattgtttgccttgtctgaatacaacaactgttccttctattgacaagagaaggtctcttagctctagccctcccagttccaggaaaaaatcatctcttagactttcttataaatggagagaaggtcatgcttcaggagccttgtgtaagtgt

SEQ ID NO: 150805 - DNA, 450 bp, Arabidopsis thaliana landsberg
  unsure (1)..(450): unsure at all n locations
ggtttctgctgtcgagtcgaatccaatcgaaatcgaatcgaaattgagtcgagtcatcatctcctccgccattatcgtcttctctctctctctctccgccacctctcttcaattctgacgcttctcagatcctccgatccggcggcgttacttttgctgatacacttctctccatttcttctttttgttcgccgagaagctaaggtaagacgaataaatagctaaaagcaagctctgacgacgatttcgttttcagattcgtttatcatttgcttccgattcctcatgatctgttgtatagtgttcttattttgattgaatttccatcaaatgctggttataaatcgatccatggacatgaattttgttacaggagaattcttcctgaaaacgcgttgatggatctgangtatagctaccgattaaaaatgggtgattctctctaaaaac

SEQ ID NO: 150806 - DNA, 539 bp, Arabidopsis thaliana landsberg
gaaaaacaaattaataaaaaaaaaagatcagaaattagtttgtgcagaaatcgaattggagaaaccgagtaactatggtagccacagatgagttcatcgtttttgaccagatctgattgttttcgtctttgccgttgaaataatcctccgctccttcttctcatcgatttctccgatcgcgattttggtttctcgctctcctctctcgctgtggattttgactccgagagaaggtttgattttcggtggatttcatctgacagacatgtcagacgctctttctgcgattccggccgcagttcatcgcaatctctccgataaactctatgagaagcgcaaaaatgctgcgcttgaggtttcaattgtctcatctcctctctctttctttcttttgcctcttagggtttttctagtatctgaaattatagtgtgttttttatgccttttgatgaagcttgagaatattgtgaagaatctaactttttcgggtgaacatgacatgatctcgaaagtaattgagatgtcggttaaagaatttg

SEQ ID NO: 150807 - DNA, 264 bp, Arabidopsis thaliana landsberg
cgatcactcttcggaacacctgaatgatttttactctcttgagagactgaatgattctccccattttcacccatggtcaatcaaatagaaaatctaccagcttcttctacggaacttatcacgtgtgagacagtgagagtcaattcacatcagcttcaatattctttctcgcaaactcaactcttcaagatcaaacaggaagctaacttaaactgatgcacttagaatctgtcacatataacacaaatctataagaaccaaagc

SEQ ID NO: 150808 - DNA, 553 bp, Arabidopsis thaliana landsberg
gattcagagatcatcgtcgtcgtcgttcagaaaccttcaaaaatggctggaaaactcatgcacgctcttcagtacaactcttacggtggtggcgccgccggattagaggttttcatctctcttttctatatattcctctaaactactgtgttattgcgatttgattctctgtatttatcgataccgtctcgattttatttgtattcttctctctgccgatgcgttgattttttgataaacttagaagattttgttgcctcagatgttgaaaaatccaatgttttcatcaatttgatttggattgtaaaggctactagattacatgataaaacacaatcatgattgtaaatgattttcttcatttctgatgcttacgtagtcactagcggtttctatatggatctcgttgctctgggaatctatggaaaatttgagtacagagaacacgccttttaagctagataatgtgattgagattatgtacgaaatgagagaatgatgaaaagagacgatggtggtgagagtagctcacaaaagaggaattattagtgat

SEQ ID NO: 150809 - DNA, 262 bp, Arabidopsis thaliana landsberg
ttaaaaataccactaaaataaaaatatatcattttcagtcattttatacactatgcattgagatgcagatgcacattgttaaaaaaaaaatcaaacgaacacatctgcattcacatgattcatctagatgcactatcaacttcataaacaaacatcatctaaatggtgtatttgaattgatcttctggatggatcacccaaatgcattacctaactgatcacacgaacaataccatattgaaaggaaatattttggaaatcg

SEQ ID NO: 150810 - DNA, 683 bp, Arabidopsis thaliana landsberg
ggcaaacattccggcgatatataaagtcagcaatggccgttctctcctctgtatcttctctcatacccttctcttgtacgttattcttctccccaacccagtttcgttatattgttcaagtcgattcttgtctctgttctactctaaatcgtcgaatccaatttccgattggggttttccggacaattagtaaaatttagatccaagtgtgaaacttttgaaagcttgattagtaaagatgatattctagatgaagattgaaacttttggtgttattgtctcaatgtgtttcagatggggcaacgagactgactagtaaagcttcattagcctcaagaacttccggattcaatctctcttctcgttggaactcaacgagaaactcccctaggttgtatctttcgagagcagtgacaaacaacagtggcaccacagagatttctgataataaaacagctccaaggacttactcatggcctgataacaaggttcgtaattctctagaacgatgtatgagatagaaaaagttcaattgctgatcccgtaacttaatcatgtatatgctctctctttacagaggccaagggtgtgtattctaggtggtggctttggaggattgtacacagctttgagattagaatctcttgtttggcctgaagacaaaaagcctcaggtgatgtttc

SEQ ID NO: 150811 - DNA, 302 bp, Arabidopsis thaliana landsberg
tatggacgatgttgggacagggtttaatgttccaagctatgactccgtaagcaaaagatttcgctgaagagtgaagaagtaaataagatctttttacatcataagatagagttgggacctgtagaataaagatagccttttttttggagatccaaccaaattttttgtttcatctatctctcaagtttctgacctaagataagtccatgaaaatggtgacaaattacgcccatgtctccaatttcgttgttgcgtatttcttctcttcggttagtgaataatgattgatacgtttaccaact

SEQ ID NO: 150812 - DNA, 193 bp, Arabidopsis thaliana landsberg
ctccggtgatcgtctttcctttacctcgccgaccttctccgtcttctcaattacgatctatcatcaccagaatccgttttctctcttttaactccgatacaaaacttccgataatcccaaataaacgttacgaatttcagactcttttttccagtttctgtttgaattcgatttcgaaggattagattctccg

SEQ ID NO: 150813 - DNA, 427 bp, Arabidopsis thaliana landsberg
gaacaaaaaagagctttagacagacgctcctccccttttgtaatatttttgatattacgtgtgctctacgcgaatctatcaatatctaaatcctctctttctctctctctctcctccttcttcttcttcttcctgtcgctgccttgtggttgagtgagcaaaaaaactcaaaaccctccatggaaatgggagagagaatcaattcgagttgttgttaggggttttgcgatattttaggcttctgtcggtgatctcgaccaaaaaaaataaacaaaggagctagtagggttctgttttctctatcactcggaaggaagctggtttatgtcaaaactttgttcttcggaaaatgcgaaaatcgttcaaggattcactcaaggctcttgaagctgatatccagttcgccaacactctgaaatctctctct

SEQ ID NO: 150814 - DNA, 352 bp, Arabidopsis thaliana landsberg
gagcaactaattgacattgttcaaaggcacttcatgtctcaggtacgtcaacatctctgagcattcactgtgttatggatttgtcttaattttgtcctgataatcaataaaatggtgtaaataactgtgaaatgaatacagcaaatggatgagcttcaggttattgtggggtttgtccaagctgcaaagagaatgaagaaggcttgcaagtttcaatccaaagaatccagaaacactgatcttaactgcatcagctaaagaaaagccttgactctcaccaaatcctgtatgtacggtacatcaactaaattaaccatttgtggcttgttaagtttagttcttctagtatgtt

SEQ ID NO: 150815 - DNA, 390 bp, Arabidopsis thaliana landsberg
gaacatccttgcagaacacgggaaagtgctcgacgagtttttcatatcaacagcaggtagagaacccatctcatacactctctgtgctttacagttttaaacgtgaaatcatttggtttcatcaatttcaaatgcaggcaagtttcaaacagaaattggaaaaagctgggctgctgagatcaacgctaggagaaaaagccaattgacaaacaggcagagatagtaaaatccagttgcatcataccttcaatcttcctcaactatcaacagtagaatctcggaaactaagcagactcctcatgaaccaaaaggtacaagcttaaaatgaaattttcagttttgtagttcaacgaacacaaagtccttgtttttttaacttccccttttggt

SEQ ID NO: 150816 - DNA, 239 bp, Arabidopsis thaliana landsberg
tcgaacatggtgaggagcaagtacatgaactatgactattgtactgatcgctctaagtaccaaactcctcctagagaatgttattgaagtaacatatatacgttaattatcatatacgtataggggatttttattaaatctactttttctaattaagaaacaaaaaaattactgcttacgagttacaagagaagagagttaagttatagtgaaaatataattgtgtatgctcaaaatgt

SEQ ID NO: 150817 - DNA, 363 bp, Arabidopsis thaliana landsberg
acctttcggcgtaatttcgtcttcccctttgcttaacattttctttctttctttttgaccaaatattaaaaaggtatgcatttttattttatttttaattaaattcataatttgcatttgtaatagaaaaaaaaagaagagaataaatccaaaagagtgaagcaaaaacattaaagcggaaagaaagtggtaaaacaataatagaaacaggagaagcagaagtactacttcttcttcttctgctctcttctcagaccttgttttgtactttcttcttcttcttcttcttcttcttgtttgcgaactccgatatcttcttcactacctttgactccatttctttttcttcttcaggtgaattct

SEQ ID NO: 150818 - DNA, 427 bp, Arabidopsis thaliana landsberg
atttatcttttatttttagaccaagctcaggctatcatctctccgttaattagggttttcttctctatctcgatttcaataccattgttgatccgctgagctagggttgttcgatcccgataattgtgtcgcttagctctgatctctgttcatcgaatttggttaatttgttctgattggttaagatacattggaaagcgatgccaccgaaggttgtgaagaggggaggcgccgtgagaagaggtgggaggcttacgagatcggcgctcaaggcgcagaatcctcacgtggaatcttcccatgacgaatctgttaatatcggtgagctctcaggctccgatgcactggaagcaaaggaggtgactccggaggttgataaaactgttgaggaagagaatccattagatgtgccgaagtcatcggattc

SEQ ID NO: 150819 - DNA, 251 bp, Arabidopsis thaliana landsberg
cgatatcaaaaactcttgcttctgattctcttcattcatggcttcagagaagtagtttcaagaagagaaagatcaccgatgatgtagacggagtaggagtaggaggaggactagaatcccttcccgaagatatcatcgccgacatattctctcgcctaccaatctcctccatagctcggctatgttcgttgcagacttggagatctgttttgactcaacacggacgctctcttctcttcttcttcccgaca

SEQ ID NO: 150820 - DNA, 864 bp, Arabidopsis thaliana landsberg
tctgttccagtttctctaaacttcctcgcccactcttctcttccgcaccgcttttgaaaaacggcgacgcattgtctccattcaatcgccggaaaattagaagagaagatggcggcgccggaagctccggttaagtacgtcggaatatgtaaggattccgccgctttcaagcttatgaaatcgatggtgagtgaattttcctgtaatgatgttaatgtgtgtagagattttataaaggagaagacctaattttttggattggtgatttttttagggttgggaagaaggagaaggacttggtaaagataagcaaggtatcaaaggttatgtgagagttacgaacaaacaagatacatctggttagtttcttcttcttcttctccttaatggaaactagtgatttgaatttttctcggtggaatttagattggaggaaactttaatagagctacttttcacttacactaaaaaacaacaacattattttcggtttttaggaggaaatgtctgtttacatagtttagtttatgtaatttggtgaatgtgaagttgtggaatcaagatagagctactttaagccttttgtatatttgtgtggtgtatatgcatctatagtttatgttataggtctgaattttttttaaatgttggagcaggtgttggtcttgataagccaaatccatgggcatttgatacaactcagttcgataacattctcaagaaattgaaagtggtaatggctgtgttcatctttcgttttaactatgctctttgaaatatttgaaataatttcaatctttttgtgtatgtgtgtgtgttatttgcagcaagctgctcctaccaagactagcaagaatgatgatg

SEQ ID NO: 150821 - DNA, 201 bp, Arabidopsis thaliana landsberg
ttcaatcagcagggtgcattcagatgggtactcataattactggagtatgtggctttgtgatattttcggcattcgtctggttcttcaagtacagaagactcatgcctctataagaagagagacatgaatgtgctccccagaaagtagacatcaacttatattgttatgttgcttacagatattaatgatttgtttccttt

SEQ ID NO: 150822 - DNA, 761 bp, Arabidopsis thaliana landsberg
attccttgctatcactatccacaaactcgcaagttactctctcattcctcatcgtaccctctttactcaggttactatgtctcagtctcgcttctttttttgttttactcgagttttcttgagtattgatcagcgaaaaaacatattttgaatgttttatgttttgtgtttcttctctaactagtgactactgctagatttcaaagaacttataaacaaattattatttatttttttttttttccggttgggtatttttttcttcttaacaatagctttaagctaggcttctttttctcttaataacgtcaaaactgattagtttgttaggaaattgcagaggcaaattaaagtaatgatagtgtaaaccatgaatttgtcaaaatccagaaattttttctgatgatttcctcttgttaagtatgtaaaaataataattatgtcaaagactcaaaagaagacaaagatctgaaaaagtatttcctgaatcatggaacctgagaaataatattcaacaaaaaaagtaattaattatctagggttataacgttttttgcttcacagttgtgataagtaaaaaaaaaacatggtttgcgctgcttcctcttattctgtttttcatatgaggagaccattcggttctttgtttcttagtgtgtttctatgaaaacgtttccatctttcaggtattttctgaagttaaaagatagaaataatgtttgaaaggtgggagcgaagggtgggtacaagggtggagcatt

SEQ ID NO: 150823 - DNA, 306 bp, Arabidopsis thaliana landsberg
ctattacagttttgccaaaatgtgtataccaactaaaataaaacgatttagtaaaaattcatatatacgtgtgtaggtgcatgccctacgaaatagtaatttagaaaatgaagtatattggttattaagatccatcattaatagtcaacgtgtaaaaaacgaaaatctctactagttcagagattcatacatattaacattttccaaatatgtatagttggttttatcaattgattaaacaaaactaaaacaaataatatgaaatatattattggtttccactttccagctgtagtacactgtaag

SEQ ID NO: 150824 - DNA, 311 bp, Arabidopsis thaliana landsberg
ttaaagggaggatcattgacacataggccgcacttgtctctcttcgtctgcaaataaaccacattagtcttttcagattttttgtacacttccttcatcccccacccatctctctctctctctctctcatccttcctctttcttctttgcttgcccttttctttttattttattcttccaaaatcaaatagttccttctttgatctcattgggataactaaaagtttcaagaagagaaacatatcattgaagagagaacccacacaaaaaaaaatgtctgtagatttctcatctgagcgtgtttgctatgt

SEQ ID NO: 150825 - DNA, 425 bp, Arabidopsis thaliana landsberg
ctgcgttaggaaatcagaccgatcggtccagattttaatcgatcggtcaaccatttttgaccgtctgttgaaagccaaaatggatcatcaccctctactggaccgattggtctacacagtcttctccctgcttcagattttctcgccctttctctactccaaaaagctcaaaaccatccagtcccgtcacaattacctaaaacaggcaaaatacagaaggcacaacccaaaagacgcaaaacacggactacgacatgttaaatgactcaaaacgaagagacctaagacattaaaaacgcaacatatcaactcctccctacttagctctttgattattcttaaggaaaacaaaaatcttgatctggaggagagatttgaaaacaaaagaactcacattttctttggaatcatgcttttatcaattg

SEQ ID NO: 150826 - DNA, 302 bp, Arabidopsis thaliana landsberg
cttcgccaacatgtccttaaattatctctttttaatgaattgatcgataaagttctcacctttatgcctcctcctactttttccacttaatcatcccacttcctcttcagatgtaagcaatgttgtctagagtcctcctctgattcagatttcgttgctgaatcttttgtaaaactctgttctttgtatgtcgagaagccaaattcagggaatttagggttttacaaaaaaataaaaaagagtttctttttttggatgatggaatcgaattactcaggtgtgggtcacggctacgatgtgag

SEQ ID NO: 150827 - DNA, 343 bp, Arabidopsis thaliana landsberg
aggtttgaaacagtatgactctgtctttaagattcagtttcagatagtaataataaaattacataaacaaagacaaaaaggtaacaacatcaaatggtctataatggcaaaaagatgacactattattcccaagtttacgaatcacaaccaaaaaggaaccaaacacttaatcacttggtaagccaaggatatacgtcaggcgatgaaggaagcctcgctgttaaaacctcaacaccagtctccgttaccaatagggtatgctcaaactgagcgctgcgttttccatctgcggtaactgcagtccatccatcaggccatgttcgatccctccacccccctatc

SEQ ID NO: 150828 - DNA, 127 bp, Arabidopsis thaliana landsberg
gctttgaattaaaaaatagaagcaatagtttttgggggacaagcccggccgacgaatcggcggcgagacgttctttgtcaccgattgacatattcaaaaacgacgaagctaggtgaggacggagaga

SEQ ID NO: 150829 - DNA, 378 bp, Arabidopsis thaliana landsberg
aggacaaacgatctgaaactagagaactgcatttacacattgttttgcacttcacatcagagtcttttaatgataaaaaccgccattctctccactctttatgtacatcaaaacaaaacagtggagactgaatggtttacctaaacgaaccaaatcttctttggttctcaagagtttatgtctgcgtctgggacggagactgagatgatggagactgagcctgagcctgagcctgagtctgagacggagactgagtctgagtctgggatggagactgagactgagactgagactgagactgagactgagactgagactgagactgagactgagactgagactgagactgcgtctgagatggagactgagcctgagcct

SEQ ID NO: 150830 - DNA, 225 bp, Arabidopsis thaliana landsberg
agttcatccagtttcagctcacagttaatgtcgcagctcttgtcatcaatgtggtggctgccatatccgcgggtgaagttcctctaactgcagtacaggttcgaaatagtagttttatactctctctttctcatctgcacaaaagtattcacttcagaacttggtaaaaagtcttatcccttacctatgtagctcctttgggtcaatcttataatggatactctt

SEQ ID NO: 150831 - DNA, 415 bp, Arabidopsis thaliana landsberg
tataataaaattgtcttttttattagattatgaacttacatacataatttacaacaaaatctttccttgataagggttatcatatatgctttacaatttagatattcgagggctgatatcagatgcccaagtatagtactaaaaacatctaatcccacaaaaagaacaccaaaacaaataattatataatctgtacaataaaaccaaaactccaaaaaataatgaaattccgaaaataaccttttaatatttgtagtctttgacgtgaaggctctcggacgcaccttcacctaactgagcatcacccttgtagccaccaagggttgcttcagagttagccttggctctagccaagaacgccttttgagccttgtccacattctcctctttacctccccaagccttgagtgtactc

SEQ ID NO: 150832 - DNA, 302 bp, Arabidopsis thaliana landsberg
tttatctaagaactagaacagtttcaccttcatatttcacatagggccaaaaggccataaacatagagagagagaggttctacctctttagttctacatacttatatatagataactttagggtaagctaaaaactaaaaagtcttttatatataaggcgttatatgcgttatattcgcttgcttatctaaaggtcaatgcttttaatgagcttcatgttggcgagtctctcgagaaagacattgaaaacgtcttcacgactaagcatgctgactcggacatgcttccgtcgcccttaaccg

SEQ ID NO: 150833 - DNA, 340 bp, Arabidopsis thaliana landsberg
tgtgagtgagcaaagcactcgatcatcgccttcttttgtactatattgtattgtcttcttcacgagtcttgttccgattcccgagacagaacatttttttttttttttgactcctcaagtttatcagaagccaaaggatcggaaagactctctttgcatcatctctacccttatggcagctgcaccaccgatcgagccggcggtgacgaccgacgttccctggcttcaaattctccccgaccgacatcgaacttatatcttattacttgaagaggaagatggatggtttggagagatctgttgagattatacctgagggtgagatttacaacttcgagcc

SEQ ID NO: 150834 - DNA, 99 bp, Arabidopsis thaliana landsberg
taggatcaaagtaacgaagattattactaaattcatttattcaattgtggaaaatgcaaaaaggattacaaaactaaacatctagaagaaaactaagat

SEQ ID NO: 150835 - DNA, 190 bp, Arabidopsis thaliana landsberg
ccccggaacggctcctgattgggcctccgatgttaatgaggtttgttggtttgatcagctgcgaagattgagaaccacttgtcaataagctttctccaatctcgatagttgttttcgtttaagatctttctcaatgttgttcaatgtgacttcttttaaacattcaatataaaaaccagagaatttcacc

SEQ ID NO: 150836 - DNA, 325 bp, Arabidopsis thaliana landsberg
gtgtttgggaaatgcattcaatttttttttttctatgtgcaagtatatgttttacaggagtatctacatattacatcgtatgttcatcccactcttttggtctttatatacaatgaccttgatttattgaacataacacatctaaaagaatttgactctctttttcttttgtttttcaaaacaaagtgatatatattttcaagaatattataagagctctctacctctacatggagcaaccagactctcttcttcagtacgcttatttttccagtgaacatgacaaaacttcaaggccaagaacgtgagtcctttggctttaaca

SEQ ID NO: 150837 - DNA, 564 bp, Arabidopsis thaliana landsberg
cttccaagtgcaaaacagaatatctcggatccgatcccagaaccttttggatttctctctttcaggaaatgctttggctgttcgtaactttcttctctccctccagaatctcctcttttctcttttgtaaggttgtctcttgtaatgttttccttcttcggttttggctatacaacaacttgcttaggaaaagttttaacatttgtgaagtgcttgggaaatttgctgttctaggggatgcatatattataaaattgttatgagcagcaaaaaaaaaaacaaaaaaaatttctgaagatgtgcagattagtgaacattgttgtatcgagttttaatattatgacatattttgtttcagtttcttgagctgcaacttcaatggaatggtgttgtacagaaacaacaacaaatctctattttttttcattactctgttgcttcttttgttttggtcatgaaatgataaatgtaagagcatgcttgattgcttcttgttgttgttgttgtataattgatacggccgataaatgaatatcctaatgtggtgagctatttttgtttgtt

SEQ ID NO: 150838 - DNA, 363 bp, Arabidopsis thaliana landsberg
tctacttggaccaagtgtgttcttaattacaatctcaatttccttgcaagcttcatttcctacaaaataaatggcagtaactaatatgaaaaatattagacgactcatttgttcaaacttgaaatatttgttgtggtaacaaggacatcatcatgtagtatttatagtttctttgtgtgaaagatgttttttctttacttagcaaataatttgttaaaagtgtaagctaaatttagaggcaaacatgaatgaacaaattaaaaatttggtcaaaagagagtttagtgtcgaaatttatggtttaccaataagattaaaccaaatgaaagcaacaaacttattacaatgacatcgaaactacac

SEQ ID NO: 150839 - DNA, 140 bp, Arabidopsis thaliana landsberg
catgttctcaaggctaaaccgttagttaccctatgaatttactgtaagcttacaattcattggttattttagaatcttttttgtatttagcgtgtagacataaaaacagaactgacatgttttaaactgaaaccgaacta

SEQ ID NO: 150840 - DNA, 262 bp, Arabidopsis thaliana landsberg
gatgggagttcaggagggaaaaagaatggggctgggcagtttttctcagcgacgctgcttctttggcttgtctccgtcgtgtttgagattgctttcaatctccggacggagcttctctgggtgatttgcggtggatgcttctttcaattgatgaattgggttgttcgttcatggatttctcgtgaccctatatttgttaatacctctgtctcgcttttgcactcaatcatcacctccgcatcaggtccctttctctcttctc

SEQ ID NO: 150841 - DNA, 107 bp, Arabidopsis thaliana landsberg
tttctatcgtcttttgcttccaacttatttgtagagcacatttattgattcttttcgttttggactgtggctttgattttaaatatgtaaattacgggcccgtttga

SEQ ID NO: 150842 - DNA, 214 bp, Arabidopsis thaliana landsberg
tgcagtttaaagaaagtgtatccaagtttgcgcaagatattatcgctcctcatgcagaaagaattgataaaactaattcatttccaaaggtttgttgttaactcctttctctcacggtttttgttgcttatatatctaaacaaaatctaatctttagtacttgtttaactaggatgtaaacttatggaagctaatgggtgagataaatctccat

SEQ ID NO: 150843 - DNA, 120 bp, Arabidopsis thaliana landsberg
tctggaactttcgagcttctgttttgcggtgctctcaaagcttatatcggatctcgaatcttgaatcggactcagaacctcggattttcgaaaatcgacgaacatgtcttctcctggcga

SEQ ID NO: 150844 - DNA, 445 bp, Arabidopsis thaliana landsberg
gtgcaaatttgtcatattgagttaactatataatagtataaagttacagttcattataaatgaaaaagtacaaaaaacaatctgatttccattacaaaacaacaaaacccagataggcttatggtacacttgggaactctcactgcacattccccaaaactgtgacaattgtccatcatatctcttgaaaagaacaaaacccgtttttagatgcgttataatctctgattctccttgcatatagtgtgacaagtttcccatatatgtagaattgtatgatcgacttcaggcttgagaacagtttctatagtttcaggtaaataacatcttgagttcctctatacgtgcacttcgtacttcttgatcggttaaagccccagagatcattctctgcttcctcgcctgaaccgcctccattctctcttcaaccgttccctaggattca

SEQ ID NO: 150845 - DNA, 335 bp, Arabidopsis thaliana landsberg
aacctctctctctcacactctacactctgaaaacagcgcttatcttgctttctcctgccaaaaagtcccaaaaaacatcaatttctccagagaaacctctcaggttctacatgtgaatgtttggtaaagacagaaagaaagaaaagaggagagacatctgtgacttctttcataaacggtgtcgatctcatttctccttttattcccactagcaatctttgaaacggacccttcagtttttattttttttgcttgctggtctcaatagaaaaggtggaaaattttctaaaaagaaaccgggctttttttgagattttagcattcggggcttcttt

SEQ ID NO: 150846 - DNA, 117 bp, Arabidopsis thaliana landsberg
cctcactttacatcgacggccacttctccggcgcgacgagtactgaggtttgtctcaatctctgttttttattttattttatcaaaagtctaaattatggacaattatgtactctaa

SEQ ID NO: 150847 - DNA, 382 bp, Arabidopsis thaliana landsberg
tcgtcgtcttccccaaattagggttttctgggaattaggttgattaaattatgcgaggcggtggtaggagaaggtcaaacggtggtggtagttctggcaaaaacaaggctaaatctccaggacagagcacgagaaccaatcataattccgcggcggggtcttcctccggtggtcgtcaccgacgtcagaataatactactttgtttgttgaaggaggtattctctccgactaccgaaaagatcctaacttttcgacgccatctcgtggaggaagctcttcgggaaagggattgagatctagaagcatagagcgtgtaaaagcttctgcttccacgagtggtccaaggaaatgcagtggtaatacttatgtgtatcaatatcc

SEQ ID NO: 150848 - DNA, 535 bp, Arabidopsis thaliana landsberg
agcgattcttcggatcgaaaaacgagaaagttgactggtattcgtctgcaaaaagcttcaatggaatatggtaagaagaagacaacaagaagtggctactcggggcatggtaagtctactaatccattggcaatggatgatcttatgtttgtgaaggatccaagaagtctttcggggaagaagaataagaagaaagaggtggctaagtttccccagtcttggccttcacgggcaccaaagagcaagaattcccgtagttttcctggtgagaacaagaaacaccgtaaagaatacattgctttgaagcgccgtgagagaatgctgcagcgtggtgttgatcttgctgatattaattctcagttagagaatatttgatctggagaacgtggacatgcactgtttccaacgtatgcataatcgagattgctctcaggtaagacgattagcagatgtctaccgcttatcaagtagctgtaatggttttggaaagagaagctttgtgacggtgactcgaacatatcagacatgtatgcca

SEQ ID NO: 150849 - DNA, 308 bp, Arabidopsis thaliana landsberg
accatggcggctcaacttcaaccttataacatcatcgagacctgtcacatctctcccccaaagggcaccgttgcatccaccactcttcctctcaccttcttcgatgccccctggctctctctcccactcgccgattctctcttcttcttctcttaccaaaactcaactgaatctttcctccaagactttgtacccaacctcaaacattccctctccatcactctccaacatttcttcccttacgccggtaaactgattatcccgcctcgtcccgaccctccatatttacactacaacgctggcgaaga

SEQ ID NO: 150850 - DNA, 539 bp, Arabidopsis thaliana landsberg
cctcttagaatctccaatggcacaatcagaggattctggttcagatcattatacaccattccatggaaaacataagctgttgaatcctccgagcacgaagcaaataacggatatgatcgatgaactgccacatttgtaatgtctttaggatgattcttgagagtcttgtatggtttcgaagatagatccatgtcaaaccaacacatcttcccttctttgcttcctactatcagattatcaccaccaggatgaatcgccattgatgagatttctctcaatcctgtctcaagctttttggtggcctcgcctggcttcaaaagattgtaaacacgcacgtcctttcttgtcgcaacgaagaagtaagaaaggctgggatgaaaaagtgtacagactggaagtccacgaatcttaaatgggagcctttgtgttttctgttttgacagttggtgcaataccactccccgtgtttccccggatgccatcactgttgagagatagtctcctttacgatgccagtcaatagacgatatgctctgaaa

SEQ ID NO: 150851 - DNA, 230 bp, Arabidopsis thaliana landsberg
atcctcagaaatatacaaactcctcagaaaattctttcgtttggtttgcttcgttctacaattttgtattgatgagaatgttatattgagtcattaaccgtttgataaatcgtatttggctctgtaagtagtatttattggtattgaaacgatggatcatgtaatcggtggcaagttcaagttaggtaggaagattggtagtggatcatttggtgaactttatattggta

SEQ ID NO: 150852 - DNA, 997 bp, Arabidopsis thaliana landsberg
aatgtgtgtcttctgggtacacctgaaaacacaaatccaagtaaaagtaacgctttcttagaattcaaatgttcttagatataaaagtacatcttgttagtttgagaaatacaaaccttttccttgataccagttaatcggttgaacatgacagcacggtgtcctccatcgacattgtagagactattagtaagggcatagacaccgagcccaccaataacgctgaccttaagaagggcagagagagcaggagctccaggaatgttgggaactttgttgaaactcatttcctgatagcaaaacagaattcaaaccgcaatgagatacccaggagaaacagttcacagctaagaactttatatgtagcaaactaaaacgccgcagggataaattcgtttgtcagcagattaaaaacatcattatacgaagatccaaaggacttaacaccgcataagaaatcacacacatagaacaatcaatgcacaagcctccatttcagaagaaacaaaaaatccaagagagcaaacaaagaagtagtgttactaagagaatcaattgacatggcaaaaaactggagagaaaaacgaattcgaaaagatcgcatagaaaagcgtcagaaattgaaagcatcggtagcagatcccaaggctaaaatcgatcaagcctttgaacattatcaactagatacagtacccatagatcgtcgaatatatatgacgagcaagtcaacaagctttcaacaagaaaagatccacgagatttcaccaaatgatcattccaactctaaatcacacaaggattagcaaattgaccgacgatcaggcactgtgtgactatcgacaaccaaacagagcatacaacgaaacacagtgaaaactgggaggaaaaagcagatagataaacctgagctcagctcttaatcgacggcgatggtaggatttatgaaagatcacgatcggagctgccggcgaagcttagggttttagaaatgagaaat

SEQ ID NO: 150853 - DNA, 517 bp, Arabidopsis thaliana landsberg
atgacgagttccatattacaccaagagctatggccacacaccagctgagaacgctgatcagctcattgattctgtcgaaacttttatcttcgattgtgatggtcagtatcaacaaaaccacaaaatgaaatctgataatcacttagtttagattatgtgtagatagtggcagttgatataatgatggagtttcttgattagatctttggtttttttcttcactattatgcgttgtggtgttgatttgcattgactacaaatgagaggttacaacagtatatgttacaagttttggaataagaagattgctgtggtctctttttggccattgtagacgccttaaatagcaaaaatactctgttttctataggtctcatggattagtttaggttgtcaaaatagccaaaatgtgctgaattttctctttgctttcttctttattcttgtgtgtttgaaggtgtgatttggaaaggagataaattgatagagggagttcctgaaactcttgatatgcttg

SEQ ID NO: 150854 - DNA, 233 bp, Arabidopsis thaliana landsberg
tatcaaggaaactatattatagcaacttcttaaagaatgagttggtagaaatttcagattttctactacacacaattgtcacaaacaatcaatcatgcaaaagaatcatcactactaaaacacaaaataatcctatcttacccttgccgatcagcgtgctgtggtttgagagcagagtgagtcgggtgtcctcttctgccaagtctctttgttggctcggcatgcttctttta

SEQ ID NO: 150855 - DNA, 524 bp, Arabidopsis thaliana landsberg
attacttggaaacaaaacatctgacgatctccagactcagctgaagtttcgagctgaatctcttcttctctacacgcgatttctctggtacagttcttaaacgtctgctttgctttgacattcatcgtttctctcccaatttgcttcttggttttggggatgcgcgttttgatgccgacttttttcttcagttttgaaatttcgtaagacattagaccccaattattcataattttttcagaaatcagacatgcatgtttcatacaacatagagagtgtgttaagtagaggagtcaacattttttccggatctatctaatcaagctgaatcatagacttactattcagaatgtttcatactcactttgtcttagatccaagtatgtaaggtttcaagtgttttttgtttcctgtggagataatgatggctaaattcatttacttacaatgtagttagattatgcagctcgtagatgtaccacaataacgaaaaggcggtgatgaacaacaaattgagtgatttt

SEQ ID NO: 150856 - DNA, 77 bp, Arabidopsis thaliana landsberg
tagaaaaaaaggattaatcattaagagagaacaaagatgtttgttaaaggaatttcagaaataacatgacatacaag

SEQ ID NO: 150857 - DNA, 738 bp, Arabidopsis thaliana landsberg
agaaacaatactaaaaaaggttgaggtttcttgtataaagaaagacaaatataaaagaagaatattggaaggtaactaatcaccaaacccaaagtcaataaccattaacaaaaaccttttgcttcatctcaaagaaccacaaagagcgaaataagaaaacaaaaagagagtctcaacaatggatggtttaataccaatggcccttaaggccgtgaagaagaacctaactcgtcgtcgttacgaacgtctctcctattccgcaacaactcgtgagtcttacgacttcgcttccgatattgaaatgaacgtcgacggtcgtcaccatcgccgtggctggtccgttggagatttctcatcgttatcaagccgggaaaccaaaagaaacggtggtgtagctccggagaagagtcttactccgccgcgggagggtcaacttgtaagattcaagagccatagattgttttcttgcatctcaggtcaataattttatcatttcaagaaaattctcaaatacagaaaaaaaaaaaaaaaatttttttaggaaatttgcatttttatttcgtgttgtgtttgattttatgtacaacgaatcatgtagatatcgttattttgtgatcttttgatgtatacgtaaagtttgtagttggggtttgttgttaaaatgtatatttgtaaggtcataaacgagaaaatgaaaacttgtatggaccaaactagaaataatgttaataactctcc

SEQ ID NO: 150858 - DNA, 516 bp, Arabidopsis thaliana landsberg
tgatgttgatgatgatcgtcatgattttgatgctgatgggaagctcatgttatctgcttgttgtaagcatttcactgcctatgatttggaaaaatgggggaatttcactagatacgacttcaatgctgtggtaagactaagaactcttttcttcactatgtgtagcttgtgtatcaacttcaattggattttaattgagaactctcaggtttagtggatcaggtttgacctaaaatagaattaaatctatagactttattgaatgcacctttctttggtgttcatgaaacagaatttaactagttatattgcttctggcttttgcattatctccatggttctgtgtcgaacactgagtctagcttactctgtattagtaggtcacagaacaggacatggaagacacatatcagcccccatttgagacttgtataagagatggtaaagctagctgcttgatgtgttcatataatgcagttaatggggtccctgcttgtgcgcaaggagacttattac

SEQ ID NO: 150859 - DNA, 295 bp, Arabidopsis thaliana landsberg
ccaaaatcctttttctttgttttggtaaaataagtaaacccaaaatcttcccaaatcaatcaaagcgagaaagagctatggatgcaagcaataacgataacgatttcaattctacgacgaactggaaactcgccgacggcacactcacagacgccatctcatttgaatcctccttcactgcaaaccccgaatctgacgacggaatcatctctgccgccgtcgatcatgtaaccaaatcccggttacttcttctccctccggttcccaacggcgagccttgtgaaattacaagtac

SEQ ID NO: 150860 - DNA, 212 bp, Arabidopsis thaliana landsberg
cttgccacctttatctgttgaaaaatcttctccaccgcagacccaaaaaaataatattgttttctttatcctttttgtttgcttcttataagagattgttgttgtaagctcaccaaacattcagatttgagctttcttcttatatatctgcgtaggggaccagagaatcaaatcacttttcaagtgaataatacttttgatttctccatttg

SEQ ID NO: 150861 - DNA, 386 bp, Arabidopsis thaliana landsberg
ttcagagatcattagaattctctactctcttactttcatgttatcaaactttgcacttgtattttgaatcttgtatcttgtattttcaatccaatcaataaagtaagtttaatcatctaatttttcttactcttttcaatccaatcaataaattaagtttaatgatctaagttttcttactactctactacttacagaatttttatgattttatctttgaattatttataagttttcttactactctactactcaaatagtaggtctggtggagagggtcttggataatatggttttttagattgttgaaagtttcttttaatttgatttatttatatattttcttcatcagtttctgtccgaatattttcatcaatattatttat

SEQ ID NO: 150862 - DNA, 265 bp, Arabidopsis thaliana landsberg
tcatccttcaatggaatgtcacagctcgcttgggaagtagagaaaagctattgccctgcagatttcaacaaggtcaaactacttaagcaagttgtgggatcatctcattctcacaagggaggaggacaataacaatactaatgacttttttttgcttgtccccattattctttatttacaagttgatgccaaaattgtgcattggctctcgtggaatagtatatgtttacttgaagtaatgtttgtcatctttttatatatagaa

SEQ ID NO: 150863 - DNA, 413 bp, Arabidopsis thaliana landsberg
ggatataacaaactctttcattccaaacggaaaaatcaacaagtctcaagtgtcacaacaaacatagaatcgccgttacagaatgaagcagtttatctaaccacaggtgactctcttggaaagaacaaaggtcatttccacagacactagctaaaactgaaaaccattgagtatgcataccactatctacccctttaacgacggcgatcttcccttcttaatgaatccctatctttttcctcccggtcgttacgatctcttctagattctgccttccttttctcccaatcttgtgttctggatcccttgtcctcccttatataatcaatttcatcattgtgccttctagaatgcgcattatcataccgtcctgatctcttttgttccttcatatcataagcatctcttgacct

SEQ ID NO: 150864 - DNA, 456 bp, Arabidopsis thaliana landsberg
tatctctcagcttgagcttctctctcaacgaaagaactcaagctttccaacactataaatctataatacagcttttattctcaatttttgtttgtcttaccatcattaccaaaccatgcaagccgcaacgtcgtgtgatctcaagttccgatcaacagatccgacgtctaggaacaaatgtttctcccacgcgattccaaagcgcgtggctgttacgtgcggttataggtcggagtcgtttagcttccctaacggtgtctccgtgagtcgatctgattggcaaagctcatgtgccattttatctagtaaagttgcttctgttgaaaatcccggtggtttagccgacaaaatcgccgccgttaatggtcacacaaacggatcagtcaatcttggtctcgtcgccgttgagtcaactaacggaaagttagctcctgctcagccgttgactattactga

SEQ ID NO: 150865 - DNA, 364 bp, Arabidopsis thaliana landsberg; identical to SEQ ID NO: 42021

SEQ ID NO: 150866 - DNA, 335 bp, Arabidopsis thaliana landsberg
ctctttcaaaagaacaaaagttacaaaatgtttaaaaaacattacatcacacaagaagtcagcacttttgtttaccagtcaccaactcaacaagcaataaccaacagagataaacagagaagctttgaagttctaatcactattgtaaccaccatcatcgttatccttatcttcgtggtccttcaccactcgttctatgaactgtcttcgaactccagccatcacagcttccctcgaggagtcatcgtctcctcctttgccatcgttaagaactggctctgattgacacagaagtaaggctacacctgaaaaaccaaatcagttgcaagtatgtc

SEQ ID NO: 150867 - DNA, 401 bp, Arabidopsis thaliana landsberg
atatctttacacattcacatggcgccaatggctatggatcatctctgtttcgtactaccgacagaatccggcgagttaaagccaccggtgatggtcgaggagaccacagaagaagaagaggagaagaagagtcgtgattgtggacgtcaagttgtgagtttaatcggagatttattccggcgattacacggctctaagttggtgaagagcttgaatctctgtagtatcaacgagagtaaagattcgatttcaatggagatcaataaatcattcactgacatggaaggtgttcagctttccagcaaagtcggttgcgagaatccaagaatctttggatactctgagctttatatcggaactaatggtttcagcgacgaactgatcctcggaagcggcggttt

SEQ ID NO: 150868 - DNA, 414 bp, Arabidopsis thaliana landsberg
ggcataatggttgcctcatcagagacctccgctttgacaatagagtgggcgatggcgagtttgttgaaccacccaaaagttttggaaaaagtaaaattagagattgacgagataatcggacaagaccgtttgatcgaagaatcagacatagcaaaccttccttacctccaaaacgtagtatcagagacacttcggctacatccagcagcgccggttcttgtgccaagatcaacagcagaagacatcaagatcggaggatacgatgtgccacgtgacacgatggtaatggtgaacgcatgggctatacacagagatccagatctttggaccgaaccggaaaggtttaaccctgagaggttcaacggtggagaaggagaaaaagatgatgttcgtatgctgatagcgtttggaagc

SEQ ID NO: 150869 - DNA, 130 bp, Arabidopsis thaliana landsberg
ctgcaatcctgagagccttcattgcttggtaaacagcaagatctgcgttttctgcaagaatttgtgctcgtcttctttgggctatggcagtttccatggttttatcagccaaaactttggcttcttccat

SEQ ID NO: 150870 - DNA, 233 bp, Arabidopsis thaliana landsberg
aatggatccaagattcatcaacaccattccttccttgaggttcttatctccaattcatgtatcattaatgcaacacattcacacacacacacacataaatattctgtatatagagttaatgcttcttaatttgatttagttatttacctatagatccatatatatccatgcagctgtttatataacaatatatgcatgtatgtcgcgatgcaggtatgatgatagtaagtgta

SEQ ID NO: 150871 - DNA, 379 bp, Arabidopsis thaliana landsberg
aaaataaactacctagctactttttgaaatcccaaaaaattattacacattttgttcttttgtcatatgcgtgtaaatgaatgatatcataggatcttcaacaatcaatgttcatcatttaaaccttccatcgccgcaacatctcgatcatgatctcgttccacgtgtcgacaggaccaggtagacaccaatgcaaacaatcattaggaattctctccggtacaccgttcttgaacgggtccgcgtacatgtacggaccaggatgtccgtctggtctcagtaccgacatagccgtcacgtccaacacctctaacctcacctcagccgcagccgccgtatattcctcaatttctattttgcgcatgtccaagtccagacc

SEQ ID NO: 150872 - DNA, 234 bp, Arabidopsis thaliana landsberg
gattactctgtaccatagaaggttattctaccactaaattctagtggggtctggttttttgattaatatgttagatgaataattgaataatggaattttgaaatagtcaaatgatcgaataagggatgtctgagttttgtaaaatagacataaaacgttcaagaactggttgtagttagtttataatgcttcgttttatctagttataatattagttcattcattgcggtaatc

SEQ ID NO: 150873 - DNA, 136 bp, Arabidopsis thaliana landsberg
cggaagcacgtcggcagtggtatgtgacagctccacaatctgccacaacacgttcctttatgactgttgcgccacatacgctatttcgggagagttaagcatgcagaccctggtagcttgggagggtcaggactag

SEQ ID NO: 150874 - DNA, 214 bp, Arabidopsis thaliana landsberg
gaattagaatatatagttgatcagatgagaaaggatcagttttgcttttgatctcccatgtctataaacaagatagtctcactgaagacgagccaaaaaaaaaagacattcatctatattgacaactgaagtagccttggcccaaaccagggcttgggacccggttaaaaggtaaaacaatcatccgatgaacagaccaaaaaatttaacactt

SEQ ID NO: 150875 - DNA, 275 bp, Arabidopsis thaliana landsberg
agtcttcaaatttctcatggatcatcgattatattcttgtctaataagctaaatcaagcaaatccatatcggctagtgatgttcttatacattcctaaactgtacatggcttctatacactagcaagcaccctgactattcatttaccatcgatgttctcatgaagctccacaatctgtgctctcctctcagcagctttcctccttatgaagaatccccatctcatagcagctctcaccttcagccatccaacaaccgcttttcctgatcgccca

SEQ ID NO: 150876 - DNA, 200 bp, Arabidopsis thaliana landsberg
gacggtgttcgtcgatggcttgttcagcgaccttcttcttcttcttcttcttcttccaacaataataataataatcacgagcaacccattctcaattcgtcttctttctcttcttcctctaaccccaatcattccgctaactctggagagcttattattgaagaagatctcgatttctctggtctaacgcttattaacgt

SEQ ID NO: 150877 - DNA, 218 bp, Arabidopsis thaliana landsberg
tatgctcgcaactaatccatattagatctaaatgtcacattacctctggaaactaagaaccatgccaataaaagtccatctaagccatataatcatatatccaagggaacattcattggctgcttaagaatgtggtcggcagaagaaattatttttgctcaacataagatttaacagtctccatccatctaatatactcagcattatctttggcttcc

SEQ ID NO: 150878 - DNA, 441 bp, Arabidopsis thaliana landsberg
tcaataatcactctaccgataatctttacaggaacaatctccattcttaaagtggtgcaagcatcttgtgtcctccaacaatatgtcacagccgtatctcttagagacgtactttgcagtatcatggcagtctcggcacatcctaagatttttcaagatccttatcgtcgtcttagatgcaccggatgacgaaatgagaccaaacgccatggcaaatttttcactgtggattccacaagtttcttcccttccttcttcctcaatccaaagttctccattatattggtcacttctattatccagcctactcattttttccaccaagggatacagcacatcagtacataatttcgactgatcacctgtcgtgaatgtgtgaattaaatttctgacttcaatccagctctgcccgagaggtttcttcaacaggttatctctcct

SEQ ID NO: 150879 - DNA, 177 bp, Arabidopsis thaliana landsberg
ctctctctctctctctctctctctcttcttcttctccgttcgtgctctggactcgctcgaaatcgatccgatgataatttatgcagctcgaaacttaatttagaatcatacctttttctggatttggctgacgaatccgttttcaattgcacgagttgcttcgccaggtgaatctat

SEQ ID NO: 150880 - DNA, 369 bp, Arabidopsis thaliana landsberg
ggctgctgttctctatggggctgttgggactgattgctttaggaagtttcacctgtcgcttgctaaagcagccaaggaggtatctctttttacctgagaaatttgtccttcattgttgaaaaaacgtattttgctattggggtagaaatggaaggctttacctcgagcacgaagcatgagtttgagaaatcctcttgtatggggctcaattgtttttctttcactgtcttgataaagcaagtgcatgttctattgtccaggatttcatttcttagtgtctttctgcttttgttgtgtgcattctaatgaagccttggtttcctccagggaaaagttacatatgttgttagaccagtattacctttgggt

SEQ ID NO: 150881 - DNA, 889 bp, Arabidopsis thaliana landsberg
atcaccacctctgtcatctctttcatcggaaccgtcgtaatctcccttgtcgtctccctcattctcaaccacactatcatcgtcccccgaacttctgttttcaccaccaacattttcactctcgacatcactccccagatattcgtactcgagatcatctgggtcactctcatacactaacccttcatcgaaagacattgaataaagaccccagcacacccaaattagaatcgagaacccaaaacccccaaaattcggccaaccctacaaataatacttcaagttttaaatatcgtttttaagattgtcactttacaaacataatttatctttactccttagttatttttgatattttattaacagatggacttttcaaataaacaaaaaatttatgaagttttttctattttggaaaattttctactccctccgtcctactaagataatatttttaaaaaatttcacattctttaaaaaatattgtataatgacaattttaacctcttaataaactttaaaaataataataaatatttatctaattatttaataaaggtaaaacaggtaaatagttttaaaatttgcattgaaaatataaaacttctatctttatagaattattttatagtttttagatataaattgtaaaattgcaaaaatagatgattttgtggatttttttttgcagaaaaatcttcttttaatatctctgtttttctactcatctaatttcttaaaaaatgtagtattaatcactacaattttccatttgttcttttgtaaggaaaaacaaaaaaacaaaaaaacaaaaaaaaatcgaatttttaaaaaattattacctaaagtcgaaagtgtctagatgatcagtggttgttcaacaaattga

SEQ ID NO: 150882 - DNA, 314 bp, Arabidopsis thaliana landsberg
  unsure (1)..(314): unsure at all n locations
atttttatctcactcttcttcctcttcacctgtaatctctccaaaatcagaaaaatgacttcttcagtactaaccccaagcttaaagcttttagctatgacgaattcttcctcttcgacccttttttgtattccttctatcttcaacatctcgtcctctgaatctcaccgcttcaatttttccttatcttcacgacccgttaatctcacactctctctcaaatccaaaactcttcgtaactcatctnctgttggtactttcgtttccaaacttcgaatnggttgaggaagagaggtgaggatggagcatcggag

SEQ ID NO: 150883 - DNA, 225 bp, Arabidopsis thaliana landsberg
  unsure (1)..(225): unsure at all n locations
cgattgagaaaaacccatctgacgaatcgaaatttctatcggagtttcgtcancaatcatgccctcatcatcaacgttgctctctgtacataaaagactcagttctagattcacctctgccattacaacagagtgttcatgtaagaaaaattgatcctttgtatttggtaatcgatctaaaaggaactgtatcgttagattgtcatctagagattggggaagtga

SEQ ID NO: 150884 - DNA, 408 bp, Arabidopsis thaliana landsberg
aaatattaccatgaaaatgttcatatattaacatgagctaaattctaattaactacatgtccaaccataaggaatttaaaaacataagggatttgaaatcaataaaatgaagatgggttctctatgccttgcaaaacaccaaaatgagtatgaggaaaatcaaaggagcagcgattattctcctcatctctcctcgattggttcattgccatgaaagatgcaaagaaacccgccgattcttcgaaacccttaaaagtcttattcccttccgcgcgtgacatctcctctacctcctctttgttactctctccgacgaccgatttcttaaggaaccgcttaaaccatttgaccgaatcttttggataacgtttgagaccattgacaaaatcaacatagtatagaccaaat

SEQ ID NO: 150885 - DNA, 401 bp, Arabidopsis thaliana landsberg
gaaaaaagaatgattcttatagattaaataatacttggggtgattatataaatcacacacaaacaacacaattctgagtaaaaaaaaagagagtaaaactttctatgaaggagggaagaaacggttgaggttgaaagggagagtgtagaattcctcattcctgctatctcctttgaaagttctgaacttagcccaccaaggcaatcctctgtctctcgcggtctctttatagtccagagtgttgtcaagaacactgccaccatcagtgcgaccattggtgaagataagaagattgtgttcaagaaatcattgaaccaaccagcattggtgtgagctgggcagtgtaatgctttcatgctgaaacatctgaagtattcggggatcgataatcataagaagag

SEQ ID NO: 150886 - DNA, 446 bp, Arabidopsis thaliana landsberg
  unsure (1)..(446): unsure at all n locations
tccaaaaaaaaatgtactaaattgattgaaggtatcctcaaatataaagaggcacggttttgtatatnttctccgacgagaagaatagtctctcttctactctaatgcgggaaacaaaagtaagttcatatgtggtttgatcaaaacagagacttgtcacgtgtgatattagctaatcgctctggtaaagcatgaatcctaatacaattgagagtaaaagtacgaaaatcccgaccaaaatcgggacatttgatgcagtacttgcgttactcgttctcttggtttcgtcttcaccatccgttgtcctttccacattccctcctaggcagaagctggaagcagatgtcgcaggagatatcacgtcccacattgattccgcgatcaataaagacgtttcggtttccacttctgaaatctttgattcgtctatagaagaatgttccatg

SEQ ID NO: 150887 - DNA, 572 bp, Arabidopsis thaliana landsberg
gtgcacttgcagccaacaaagaactcaactttacttacacaccaaagcctgtaccagttgagaaaaagcaagccactcctgattcaaacccaagtctccctgttcctcttccttcgatgagctccaatgacgaaaaaacattggtctccgcagggagatgagactgaataaacatttccctgtatagtttgcgtgatagtagtagtagcagcagctggatatattgcagtacctaaagatgtcagttctcggagcagccagccggtttagtggggtttagttttttttcgggtcccctgagcaaaatcggttcttggcctctgggtttacctagagcaaaaccagttccgatggttacttgagttttgctcagttcttatgggattggagtggaaggtcgtgcgctcggcagcatggaagctttctcctttcaatcagcttcagtagagttttggtttctttgtttgttttttatttgctttaagaatttaatgtaaataaaaatccaatgaggattatcatacaatgtcatgaaggatctatgaattagtatctaatgttagtatatatta

SEQ ID NO: 150888 - DNA, 184 bp, Arabidopsis thaliana landsberg
ttaacgaaccttgacggagttttctctggacaaagcggtggttgtcgtcggagtcagccttgctgcgtaggttagcgtagagcaaagaaggagagccatgatgaaaatggttgtgaacttacccatactgatttgcaaaatagagaaagataatgggagcctgagaagagagatagagaattat

SEQ ID NO: 150889 - DNA, 157 bp, Arabidopsis thaliana landsberg
acgggttcttggaaaaacattggcaccgtgccttgtcttcctatgagttgtagtcttaggccatacagaagaactggacatatttttgtcggaggaaaagtttactggctcgtttctttagatgcgccaggtaagattctctcagtagatttggaag

SEQ ID NO: 150890 - DNA, 300 bp, Arabidopsis thaliana landsberg
ttgacaagtcatcctcatcgtcatcatacttatctaaaaaatccaaaaacctaacaacaacaacaacaacaacaacagcaaaaaaaaaaaagagaactcaaccatattggtagtgtcatgattccctacatggtgataacgacaataacattgatatttaataaaaatcatgtggataccataaggttttaggtttttttttcatgataatgatatggtatggtgctaaaaagggttttgtgtgaatgtgatattgatcatccagccatgctccatgccatgccaaaactatggtggtga

SEQ ID NO: 150891 - DNA, 206 bp, Arabidopsis thaliana landsberg
gaaaaaaggagagagtactgatccaacgagaacgagtgacatattttaatttcagatttcattttccttacttttgttatcaatacaaaagaatcaatcaaatgtaacactcgtgataaaactcaaatgtgaaaacaacatgaagcataacacttcatgatgacaatatataatacattgtcgtatactgtcttaagcaatattaa

SEQ ID NO: 150892 - DNA, 219 bp, Arabidopsis thaliana landsberg
gacatctatcgatgttttgggttctcaggatctcatggtgtttggaggtggcggcgatttcgagtttagcgaaaatgagcacttctctatcttcagttcatgttcgaatctatcttgagtttaccactactataggactaagaccatgagttttaatcattaattaggccatgtagagtggaaaacatataatacatattttgcccttttctctaatga

SEQ ID NO: 150893 - DNA, 314 bp, Arabidopsis thaliana landsberg
gggaacttctggaaagattcctcagtcatctctccacagtggaaaaagtgggaaacaagagaacggagagattgtaaacaacaatcatctttatttttggtttcccttactatcaggtataacactataatttatcgagaagattactttaagttgaagattctattcatgtgtttcaccttcctctgtctaatgtgcaggtttatcagagcttagtttcgatccaagaccagaaatcaggacaagcgcactacagattatgtttgataccttacgcaaccatggccatttattttctctgccgttatgggaaa

SEQ ID NO: 150894 - DNA, 98 bp, Arabidopsis thaliana landsberg
ttttttttttttttttttttttttttttttttatttttttttttttattttttttttttttttttttttttttttttttttttttttttttttttttt

SEQ ID NO: 150895 - DNA, 254 bp, Arabidopsis thaliana landsberg
ttaaacgacgcagtttagctaagtagcaagtatcaaataagataagaatatgcagaatcttaacttgtgcgatacaaagagaacctttgagccaacaagctttacagttcaaatatagatatcaaattctttgtattcgatttaaacatgattattaagacaatccaacgaaaactagtaaccaagaagagaccctgagttcagccttgtgccactgtttcaagcatctgcaatcatacaacaaatattttctt

SEQ ID NO: 150896 - DNA, 373 bp, Arabidopsis thaliana landsberg
cttaagtgaaaggaatgccttaaaattcatacgggatttatttgtctatgtattgttccattcgatcttttaggtcctgcgtcacctcgatggttatgccacaatattcttaaagcttatatgcgatgtatagacttctgcaaccatgacatatttgtttactttatataaaaataaaataatataaaactataaaaaaccaaatttattttcttttagaaagataagggaatgcgtaattcgacaaaacaaggtcttcttttcacgaggtacgcctatcaatttgaatttctgaatcgaccatagaccaatcgccttttttttttatttgggagtattgaatacacccacaattctgagcttcatgttactc

SEQ ID NO: 150897 - DNA, 129 bp, Arabidopsis thaliana landsberg
ctcacttacaccgccttcttccggttccactactactaaaccaccgattaattctagtaaaccgggtttcactcgctctttcggtgtttatttcccacgcgcttccgctcaagttcacgccactgctgc

SEQ ID NO: 150898 - DNA, 433 bp, Arabidopsis thaliana landsberg
ttcgaaactcaatttgtgaaatttgggggtttaaggatgaagagtttagtgtctactggttggaaaggtcccgtcaagttcaggatgtaagtttcgtcgcttcctctactttgtttgttttgaaatcgaaatcgagttcatgtgtttttgttttttctgatgaatcgatttgtaatcggagctataggcccactgctgaaaacttggtacctattcgattggacattcaattcgaaggtcagcgttacaaagatgctttcacttggaacccttcaggtttctctcttaaaaaccctacctttttttttgttttccatcttctcgcatcttattacagtagcagtgtatgtgattcactaaaacttgtttttggttttggatacagacccggataatgaagtcgttatctttccaaaagaacagttaaagacgt

SEQ ID NO: 150899 - DNA, 576 bp, Arabidopsis thaliana landsberg
cacaaaaatggcgtcgacgaagccattgattgtcgcagcgaagacgctccgaaaccggatccacttccgatctggatccacatctactggtccaagccggtgggcgacaccgggtcacgaagaacgacccaaaggatatttcatgaaccggactccgccgcctccaggacagtcgcgcaagtgggaagattgggagcttccatgttacatcacaagcttcctcacgattgtaatcctcggagtgggtctcaatgccaaacctgatctttcaatcgagacctgggctcaccagaaagctcttgagcgcctcgagatggagaagcttgcatctgccggagattcatctggttaagcatcaccgttggatctccggttgcttgatttggtatgtccttattctccgggagttgaggagtttttttaccgtttaatgatgatgataacgaagactggagagttagggtttcgtttggcccttgaactttgtttcaattctcctttgttttgtcgataatgatgatgttcatgaaataagtgttcttttaactgtttagacgcaattgccttcactctcta

SEQ ID NO: 150900 - DNA, 452 bp, Arabidopsis thaliana landsberg
  unsure (1)..(452): unsure at all n locations
cggcaatgctgagtttacttttacaaacagattctgcaaactttaaattaagtttctaatctcttctgaaaccaaacaaggtttttatttgttacctccaagcacaagaagtgataagaggttgattcttccatcctaaatacaatgctccatctctttcttcaagtgtatacttctctgaataactctcaagcaatcctttgattgttgcgttcacataagagctcaaaggatacggtttaaaacccgccatgtgaaaccgagacctccatttccctagtggctcatgcctctcttctctttcgacaccttcgcaagctataagattcacaacctctctagccaaacaatgctgctcaacattgatcctttccttgtgatctctagcgagtttcacatctattgattcgaaaactgccaagtaatggttcattgtctcgacaaaccggnga

SEQ ID NO: 150901 - DNA, 81 bp, Arabidopsis thaliana landsberg
aaaatccaaatctttaggtattacaatgatagtaattgttgaaactcccctattatctttgattgacttaaaagggagtcc

SEQ ID NO: 150902 - DNA, 394 bp, Arabidopsis thaliana landsberg
gacactatgagaagaatctcgcttattattggtagatgtggcaaatgggtcaagaagaggatgcctcatagtgaccataccaagaatgataaggaccatcatgtggctgattaaagtgtttagcagttggattttgccctcgaactaaagcatcccaatcccacataatggaagcagcactgcacaatacaccaagcgtcgtttcttcgtagcacgcgagcaaaatgttgtaattcctcatcctcaatctatgtagcacattagcgaaatcgctatcactagagataaggaagagatgagcaggagggggattctgtgaaacccaacacattatttctgttatcaaagatctatccgtactgttcttcccacctagtgcaaatcgcataaaaat

SEQ ID NO: 150903 - DNA, 1462 bp, Arabidopsis thaliana landsberg
actctggtgaaaccattagccgccatttcaacaatgttttgaatgcagttattgcaatctctaaggatttttttcaacccaattcaaattctgatactttggagaatgatgattcgtatttcaaagactgtgttggtgttgttgatagcttccacattccggttatggttggggtcgatgagcaaggtccgtttcgaaacggcaatggactgcttactcagaatgttcttgcagcttcgtcgttcgatcttagattcaattatgtgttaggtggtggggaaggttcagcttctgatcaacaagttctcaatgcagctttgactcggcgtaacaagttacaagtccctcaaggaaaatactacattgttgacaataagtatccgaatcttgctggctttatcgcgccgtatcacggtgtttcaaccaattcaagagaagaagcaaaggaaatgttcaatgagcgacacaagttgttgcatcgagctatccaccggacttttggggctttgaaagaacggtttccgattctactatcagctcctccgtatcctctacaaacgcaagtgaaactggtgattgcggcttgtgcattgcacaactatgtccgcttggagaaaccagatgatttagtgtttaggatgtttgaagaagacactctggcggaagcaggagaagatagagaagtggctttagaagaggaacaagtagagatagtggggcaggaacatgggtttagaccagaagaagttgaagatagtttaaggttaagagatgagattgcatctgagctttggaaccattatgtccaaaatatgtcaaccttctaaactttttagtttttttttaacaggtttcgtgtgtttagtctgttagaaatgatataagtcaaataccactatttatgtttgttgtatcaaatcaaatcaaatatatatatccaaaacaccaaatgtataacacaccgatatcagggaagttgaagaccaaaaggagagtaaaatatcaaaaacagagctattgaatcaggagatgttaactgctttttgctttttcgtaatccattttcgcttagcgttctctatagcatcctctttcagtttcagcagatcttggaaggactggttaaactgtgactcgatcaggtttagttctgtcttgagatcttctgggtaatcattgtctgaaatggaaagattgtaaatggttgacatcattgagcaagaatccagatacgagctcatcgattctgcatctcgaccagcttccatggaagcatttccgttgtttgtggagtagggaaagtaatagtctgctgatatgtctgacttcattgattgtccagtagcttcttcgtctttcgagttcacagtttgctgatttgctgcttcatgatcctcatggattagacgtggagagttttggttatcatgcgaacaggtccggtcagagtgaactagttgca

SEQ ID NO: 150904 - DNA, 603 bp, Arabidopsis thaliana landsberg; identical to SEQ ID NO: 66782

SEQ ID NO: 150905 - DNA, 195 bp, Arabidopsis thaliana landsberg
tatatacgttgacggcatcaagtctaaaactgtaatgaaatattaaactatctactttaatgtattatctatctctatatatcaccgttgatcatctataaataattgatggtaatatcatggtatgaaactgtaataaagatcactggtgtagtaattaataaattgaataaatactatgttagatatctatta

SEQ ID NO: 150906 - DNA, 122 bp, Arabidopsis thaliana landsberg
aattaaacacaatactttttgtttacatcatttgaaaggagcacatgtttttagatgtgtaaaccaaatcttaaaaccacatacactttattattgcatagaacttcaaaactttgacacaa

SEQ ID NO: 150907 - DNA, 944 bp, Arabidopsis thaliana landsberg
cggcttgtgacctctctatcttactagttataaactaaagccagtcaggtgcctctttagctcttccccaccactccgattcatctttatcctctctctcgtaagtctcctccaatgtgtgttccgattccgatttctcttttctccttgatccttattctgattcagtctcactttttgcagatctcgtccgttgttgcataagtgctatggatctcgcgtcgattcttggtggtaagatcgataaatccgatgttctcaccgccgtcaaaaagtaatttcttctcccttcatcattgattgtagtttccatctccgattcacttgcaattcgcttatttcgtctcatgcatattgatctccttggtatttaaaaaagaacaactcctaagattaagatttgattgttgttttgtgtagcatctccatatctttggaatcaacgtatattttgagcctactatttccatacgtttacgctttttaccaattccacgaataccatgatggcattggatttcgcctctgttttaatgtttgttttggtttttaatgcttcatggaactgagctttcaattcagcagaaaaaagaaaaatgatgagtgagagatggtccctagtttcgtttttggctctataaaagatccatttgacgtgtatttcactactgtcacgttcttgagggcccgaccaccaatcttattgtcattgacttcatctatctatctatatagaacaattggtttgttttttttggccaaagtttttcagagttctatgaattaaaaaaaaaaaaaaaatgttatttggtggacttttttttttgtcctggacattattaatttttagtgatttggtgattcaggtatgagcaatatcatgtcttccatggaggaaacgaggaagagagaaaagccaattatactgacatggtaaattcaaa

SEQ ID NO: 150908 - DNA, 125 bp, Arabidopsis thaliana landsberg
ttcataatcttttcattgatcatcgaccaaccaaaaacaaaaaaaactcaaaaaatccaaaaaaatcagatctttgaaagcttttcttttgtacactcgaaaatggatccgtcctgtgcaaactc

SEQ ID NO: 150909 - DNA, 351 bp, Arabidopsis thaliana landsberg
gtgaaactcagttgactgtcatcttatgtctagcacctgagcacaacgatcatttgagtgacatgcctcctgatgtgcagagactcgttgatccctatgagttgagtccttttattaccgaagtaggtttatttttctcttttctcaccactatttgcttcaaggctttttgattcatttagcttccaaggcagagatttctttctgctcattcatttatattttcagtgcaatctcatatttctgctataactatgataggtatgcaaatatgctgcggtatccaaagaagagtgggaagaacaaagtaagatatggcctacttcatttcatccaccaacctagtaagct

SEQ ID NO: 150910 - DNA, 531 bp, Arabidopsis thaliana landsberg; identical to SEQ ID NO: 9313
  unsure (1)..(531): unsure at all n locations

SEQ ID NO: 150911 - DNA, 111 bp, Arabidopsis thaliana landsberg
atatcaaaacaagttcttataaataacacaatgattcgctacaaaccaaaaccagaaaccaacacaaattcttaagaaaccaagttgcagagaagtgaattacgatacaaa

SEQ ID NO: 150912 - DNA, 391 bp, Arabidopsis thaliana landsberg; identical to SEQ ID NO: 60123

SEQ ID NO: 150913 - DNA, 234 bp, Arabidopsis thaliana landsberg
ctcgagaaagaaaagcatgcttgtggggttattcatgagcttttgagcttaacgactgagaaaagaacgctggtggatcacttgactcatttccgtgaggaattcagattctcacaacaactgaggggaatgcttattaggcaccctgatctcttctacgtgtctttgaaaggtgaaagagactcggtgttcttaagagaagcttacaggaactctgcctctagagtctagagt

SEQ ID NO: 150914 - DNA, 165 bp, Arabidopsis thaliana landsberg
aggaaacgcatcaggtatatagatgaggctacgaaagaaaagaatgatcaaatctattttattcttaaatttggatatatctaaggtttcttcggcaatatatggagcttacgaaaacgaaagagtgagctacgaggaactaaatcaatgaagataagaggaatg

SEQ ID NO: 150915 - DNA, 262 bp, Arabidopsis thaliana landsberg
gagaagcactgaaccatcccttcttcacaagaagccgggaacagagtatacccacccttcaacccaaaccctcatccatttttatacaaccaaaagaactaaaaaagaaaagaaaaaagaaacagcagataatgtttggatacatctgcagtttctgtgtatccttcagtttcctgtgtttttgtagcattttattatatatatgattatcatgtatagaaatgaaagaaagagagaaaggtttgtgcctaattttttctta

SEQ ID NO: 150916 - DNA, 150 bp, Arabidopsis thaliana landsberg
ctatacttcactgaataataagaatgcacgagtatgtgtgtgttcttgtttttgttagagttggttatcaataatgatgcgataaagcagcatatctttttttgataatatacacctcttattcaatttggtattacagaccaatggtca

SEQ ID NO: 150917 - DNA, 199 bp, Arabidopsis thaliana landsberg
aactgaccttagaatccagcttcaatggagaaaattctggacctttgatatataagttagattctgatgatgtgattgttcttgagctttgataatacttacatcagaatctgacggtggtgtaagatggggtttaggtaaattttgcaatttgtcggcttctgtatattacatgcttgatccgttctgtccaatttat

SEQ ID NO: 150918 - DNA, 128 bp, Arabidopsis thaliana landsberg
gattttgtttgttgcttttggcttaacttatttaatatttaaagaaaaaaaaaagtattttttgttcacatgttatgtattatcattgattcatcattgagtcccatgttagtatatttaccggtttc

SEQ ID NO: 150919 - DNA, 187 bp, Arabidopsis thaliana landsberg
ctaagaacattaatttactttccaaaacatgagttcattggcaaagaatatcaatttggtacaacaatacttccaatcacacttttcatttctttgcttagttttatttctaatcgctaaaaaaaagtttaccctagcaaataacctgtacacagcgtatccaaaaacactaaagacgatgatgccc

SEQ ID NO: 150920 - DNA, 111 bp, Arabidopsis thaliana landsberg
ttatgtacgtgacatgtcaataaagggaaatacttattttttctatcgaggtgagaaaataggggaaggactagctggttgcttactttcttttgattttacaagagagag

SEQ ID NO: 150921 - DNA, 125 bp, Arabidopsis thaliana landsberg
tataaaaatgaatttgtattcaaatatggatcgtcaaatgttccaaaaatttcactatcttacaaagtaaattaaaacaaaccaccaatttaaatttatattaaataattataccggcagtaagt

SEQ ID NO: 150922 - DNA, 162 bp, Arabidopsis thaliana landsberg
gtatgtctgattattggatcgagtcgtagacctacgaaaatcttggcacgaagtcctaacaaataaaataatattattagtacatagtttaatataattaacattcgtaatgtcaaaacaataatagatatcatagtaaaaataaatatcgaagtaaaagat

SEQ ID NO: 150923 - DNA, 534 bp, Arabidopsis thaliana landsberg
aaaacggttgagcttcggttgaatattttatcagagccaagagatgccagagcaaaaggcattgaagccattgagactttcaggcaatacattaaggtataaatagttataatcaattatattgattggttatggctgtagctttagacttggtaattataattgtggaacaaataaaaatggttactaggaaggaaaactgaaagggtgggaattaggcacgtgtggggattgttgggtgactgaaggttgcttggtggactcaaatgatcatccatctgccattgatgctcacatgtacaggtaaattaatatgctcacaaatactttatattatatgatagtacatgctccaatgcgaattaacagtcaataattcagggtaagagtgagtgatgaagagagtgggcaagagtatggttgggtgcatatgaggcagagtattcatagccctaacatcgcacttaatatgcaatcaatgcttcctggtggatgtctctccatgacaagagtcttcagagaccagtaaatttc

SEQ ID NO: 150924 - DNA, 502 bp, Arabidopsis thaliana landsberg; identical to SEQ ID NO: 3082

SEQ ID NO: 150925 - DNA, 221 bp, Arabidopsis thaliana landsberg
tatttaaaagggattataaagtttttcaattgggccccctttcatgcgtattctttattgtccattatgggcctcattgtctctagactctctaccttacagggtttgctcgccgacgtttcatacatagtcctcttgtttctaaggatgccgattaacacttttcatttttatcaacaaactggcttgcaaggggtttgaacctgagtgatgacctacca

SEQ ID NO: 150926 - DNA, 169 bp, Arabidopsis thaliana landsberg
cctttccgttctctctgttttttctttttggttctatctccaagacacagattactacttatattagctaatgtttttgacttgggattttgtcattgggccattcaccactaggctcaatattagtggaaaggtattgatataaaatttcgctcggttcatacaaaag

SEQ ID NO: 150927 - DNA, 514 bp, Arabidopsis thaliana landsberg
tctacaagtcttgtctatataataaacaccagagaccattaaacacacgaaaattaaaaaaggttaaggaaacgaaaatatgatgatgaagtcgttgatctgtctctctctcatcctcctcccacttgtctccgtcgtggaaggtctcggtggtggtggtggtcttggtagccggaagccgatcaagaatgtatctgatccggatgttgttgcggtcgccaagtatgccatcgaggaacataacaaggagtcgaaggagaagttggttttcgtcaaggttgtggagggaacgacgcaagtggtctccggtacaaagtacgatctgaaaattgcggcgagggatggtggtggtaagatcaagaactatgaggctgttgttgttgaaaagctttggcttcattctaagagccttgagtctttcaaggcgttatagatctttaattggatttttgtagatcgatctctctctcgggtatatctatctagcttttgatgatttgagactctgacgttt

SEQ ID NO: 150928 - DNA, 280 bp, Arabidopsis thaliana landsberg
atagtctgctcattcttttcaataaaagttgtattgatcttataaataagaggtttacattacatttgggggaatcatctgaagaaggatggctacaattcttgcttacctaccaaagcctcaatgtgtgtacccttacttacaaaacagataaaaacaagaccaatcttcgataaagagaatagtcacataactgaacattcctatgagggacccaaaaaaactaagaacaatctgaggaaaaagagcagagtcttgaaaccttcaattcaagtgattg

SEQ ID NO: 150929 - DNA, 293 bp, Arabidopsis thaliana landsberg
tttgcttattttttgaataatattataaagagaatcagcaaagattcctaaatacaaaaggtgaaaagagagaaagactgctcggccggagcactgatcaatacttgactgtgtttcttattgttctctaaatctatatctctaaatttgagttcttctagttgtacatgcactgcaggaaagaaaagatcgaagctttctattttcattcaccggctagctaaaaagctttttaatctcagattggtgctcggtggacttactttcagctctccatcatattacagtccatc

SEQ ID NO: 150930 - DNA, 454 bp, Arabidopsis thaliana landsberg
aattcttgcaacaaatctatcaaaccttaggaagagccatgggtgaagaagctatagttctgtatcctgcaccaccaataggtcacttagtgtccatggttgagttaggtaaaaccatcctctccaaaaacccatctctctccatccacattatcttagttccaccgccttatcagccggaatcaacagccacttacatctcctccgtttcctcctccttcccctcaataaccttccaccatcttcccgctgtcacaccgtactcctcctccttcacctctcgccaccaccacgaatctctcctcctagagatcctctgttttagcaacccaagtgtccaccgaacacttttctcactctctcgaaacttcaacgtccgagcaatgatcatcgatttcttctgcaccgccgctttagacatcaccgctgacttcaccttcccttgttactactt

SEQ ID NO: 150931 - DNA, 166 bp, Arabidopsis thaliana landsberg
tcgtgggaaagtggttctcgtgcagattactaatcctgctcgtagttcaggtaaggatgttcaagatgtagagaaacagataaatttgattgcttgatgagatcaattctaaatttgggagacctggtggttataagcctattgtgtttatcaatggacctgttag

SEQ ID NO: 150932 - DNA, 485 bp, Arabidopsis thaliana landsberg
actgaatctggttttatttatatccacatcattgagatttaaaagtaatccgacaagaaggaaaaggcaaacataaacatatatattccttttttcaaattaaaaatacgttaagtttgaaactgattcatcgtcctaattagcaaggatgttttgctaaacgtcagaagcaaaatatgattaaatatggactttggttcgtgagtttattaagtttcaggaaactaagatcttggaggtgtgaaacgcgaacacttgttcttccttccgctgcttttactgaggccacagacacaagtctcgagcagctgatagtcctcttcccagaacaagagtgatgctttctcaggttgctctattagtttcttagctgccaagaaacccgctatggtccaagtctggtaaagccttgattgtttccccacaaaccttccgcttttcgtgtcataatactcaggccactcatcttcctttagccttttttc

SEQ ID NO: 150933 - DNA, 570 bp, Arabidopsis thaliana landsberg
acgtttgtttctttgctctgaggtatcttcgtttgatacaaggcgaaatcgatcttcttcttcttcttcttcttcttcatccccttgcgttttccatctccatcgtctgctgaaaccatttgatcgatctctcaggtgatccctgtttttctttttgtctttctctctgctagcaattcctgggctaaattggatgatgatattgtgttaaagaactcgaagatgatttgtcaaaattaaacttgattctgtagatccgtgagttgaatcagatattaacgtgtctctatgtttctatgtatcaatttggtttgataaggttacttagaatggcacaagaagccgatgggatcagattggagcaaagacatgggaaggctcgagtgagagttggaagagtttggcgtcatgctcatgatggatctcatcactttgttgaatggaatgttagcatcagtcttctctctcactgtctctcttcttaccgtcttgatgataactctgatattgtcgccacagataccattaaaaacactgtaagtcaaccaaaatatttgttggtcttagaac

SEQ ID NO: 150934 - DNA, 354 bp, Arabidopsis thaliana landsberg
  unsure (1)..(354): unsure at all n locations
gtttgatgtaacacctcttgtatttttcganttttaatatcactttccaaaagatatcaaaagtgaaatgtgttagtttcgaatttgatcttacgaatataaactacccattcttcgtaatatttatgacgcaaaagaggtgtgacgttagacaatgcgtaagcaatgttaaggtgtcgaaaaaacttgacctagattagattttgtcatggtgaaacgaagattgatgataatgatgttaatatgtggttgtcactagcgaatataattcatatctacttatcgtgtgatagatatcaaaagaattgtttatatcaatatggttgatatctttgcgtcatgttatgttgagat

SEQ ID NO: 150935 - DNA, 298 bp, Arabidopsis thaliana landsberg
catcatgagttcatacatcaccatcacggtacggacactgccatgattttcgacgtttcatcggacggtgatgattacttgatccaccacaacgttggcccagatttcagacagctgatttgatttgatccctttttatttttccaataatttaattagggattatcttcttagatcaaattttgctaatctaaattttgatgatgacaatttacttatttcttccttttaatcttatgttttggaatttgctagaaagcttttgttgcattcctcatgacatgaaatgaattttttt

SEQ ID NO: 150936 - DNA, 407 bp, Arabidopsis thaliana landsberg
agattaaacatctgaatttataattaaaatgtttaagaacaaaaactttgttcaactttctcttcacctatgttctcattacatagatcatggtcaatacatatgcaacaataaaacaagaagtggaaacaaacaatgatcagaaagaagaatccacaagtgcatgatcatgttaaatgaacaatcttctcttcctcaagacacattcctaactttctacaagagtataaaaattagacgtttagtggtattcatctgcacaattgggaacacaactgctgaatccgagacggtttatcgttagagagcttgtacatctctgtttttccattcgtgatacatgtcaagttcatctgctgcccaatttggctcgactgcaccaaattgcacaatcactctcagttttt

SEQ ID NO: 150937 - DNA, 429 bp, Arabidopsis thaliana landsberg
ccgtcgtatctgaaatcgtggtaattggtgatggagaaagacgataacagtgacaaggttagcaatttagcaggatcttcatcgatttctttttgcttaattttgattcctcaatcgaaggatgaaatgttcgatgataacttgatctgttagagcaaactctgatatactctggaaaccacaggtttgtctttcagtgaaggagaaatatacgtcagagcagcctgaggaaatggtgacaaatctgaaggcatctgtaagagaattgagtgtgaaagtgaaagaacaggtgctttgtttcttctttcctcagcaaataaagtctcttgcttctatcttatggtgttttatgatcaaaccgtgcaaaggtttttacttttgttgtcatttgtaacttagaatcagagaaaatgtgatgctaaggataag

SEQ ID NO: 150938 - DNA, 142 bp, Arabidopsis thaliana landsberg
  unsure (1)..(142): unsure at all n locations
taatatgatatttttttgcttaaggacaaaaaaaaacagcatcatcacaagcatcctaaagaaaatagaggagataaaacagagatataaaactaaagtacacangacttcttgacacaanccataggttctaaagagaaaa

SEQ ID NO: 150939 - DNA, 394 bp, Arabidopsis thaliana landsberg
ctgatagtttataaacatctcttcttgaataaggaagtaatcttgagacaacagtgtattgtattatgatcctaatatgttctggctattcaaagtttggatatttcactaagactgatttcctcaaacctcttacatggagtaactactacattttacaatatgcaacagtgatctggatctgtagacaagtttttttgggttcttacatagcgaacctaggagcagaaactggtgtcatcatgttgtaaacaaggttggtttgtttagagccagttagagaccatcttgtgtggtgttgctttagctgatggatcttctggagctttagccaatgaacgatactgaagcttcacactctctgcgttgaccagtgttttcaccacatacctgc

SEQ ID NO: 150940 - DNA, 194 bp, Arabidopsis thaliana landsberg
tttctagtgaaaactcaattattgagatatttattatgaagtgaaactagaaaactgaaataaataaagaaaataaaagttgcagaggaatgtatcgaggaaagggtctccaagaagcaacaacgagagaaaactccattttgacgcaaatggtaatgacaaggagatctcatttcctcagtccccacttagag

SEQ ID NO: 150941 - DNA, 219 bp, Arabidopsis thaliana landsberg
gatattaacggacacaaatgctcaaggagcaatgaaaagactaattggtaattaaaaataaaataaaaactaataagtaaattagagtgatacaaaacagcaaaaatgagagaaaagagtaaaacaatatgcgtagaattgagcgtcggtacatggtgacaagtggcatgggaacatacggcacaacacaatcggcctgcgtcgatatgagtagataga

SEQ ID NO: 150942 - DNA, 939 bp, Arabidopsis thaliana landsberg
ggggggtgaaggggctgtaaaaaacctgcttgcttttattcctattaatggaggttatgtcgctatgatctgaaattgggtggatagatgggggattggcaccaggcacgtatagctagaaagatgatcaagcaccaaaatgcttattaaccaccaggctggagtcggattgagatcgataacgaggtccatcagttctacttctcttgacaaatcacatccggagactgaggagatatacatgatacttgacagtctgatctctttctgacacttttggaaggtcctagtttctctatatgacttgacacagctgcactctgctttataacagcgagcttcgtgcgaaattgttggtttgcaatatgtatggcttcagagaaaagcaggcattttcttcattgatctacacaggttacatactttgtttctgatacacaaatgctggtacggtaattttgttgtactgtaagaagaggaactagtacgtgataagccagcaaacaacatgttgcttgattagaaagtaagtcttgccattcctttctaacatgctatcacgtggtttctttctgtgattccagcaaaaaacttttagtttacaggtccatggacaatcaaacattcgagaagaggaagtctcttacgccaagcattagtactatttaattatgatcttttagttttctaacactttcctcatgtatctttattgagaatgatcaataaacaaggcacgcaatatagagactttgttacagaatatattcgcgtgtagaacgagattacatagattctacagacattaaacacgggtcttgattcaaccatagttcttttgtgactaagcagaactgactttgccagtttgatcctcttcgaacgcaatatcaacaacccttggacctttgactttgtcttgggaaagcttactgatgg

SEQ ID NO: 150943 - DNA, 133 bp, Arabidopsis thaliana landsberg
aaaaatgattttgtactacgcaaatgaaagattcaaacacccatacaagtacacacacaaagggagccatgtatgatgatgatgatgatgatgataggtgatgacgatggttcgaaagggatttaggctttga

SEQ ID NO: 150944 - DNA, 360 bp, Arabidopsis thaliana landsberg
aagccatctctctccctctctatctctctcttacaaaattccatttcacggggaaaataataatacgacttttgaaatctctcgctaatatttcccaagaaaacctgatgaattaaaagttcatattttcttggtgttggttggtattagatgactatttcttggtattagtcaattctctgtttccatcttatatggatagtctagacacagagcaaagatccttctttggagaaaaagaagatgagagacgagagaggatcgtttcttcacgtattggtcgtagatagatcttaatcgataaccatctaggccttgatctaaccattcaatataaactttatttcctttttcttttcg

SEQ ID NO: 150945 - DNA, 99 bp, Arabidopsis thaliana landsberg
gtcgcccccaaaaaaccaaactctgcattacgtaaagttgccagagtacgattaacctcgggatttgaaatcacgtgcttatatacctggtattggcca

SEQ ID NO: 150946 - DNA, 57 bp, Arabidopsis thaliana landsberg
cttgtgaaaactagttgtgaaataaatggtgcgtgttatgacataagaggtattatg

SEQ ID NO: 150947 - DNA, 269 bp, Arabidopsis thaliana landsberg
taaatttaaataaaacgaaaactttagttacatattttcttgtatacaaacatatatgatatctcatataataattttacacataataatttatttcaatcattttatcccgcacattatacattatacagattcttatctagtctattatatataaatgaaaacaatttaataaacatataggatgatggtgatggtggttgtgatgatggtggtggttgtgatattgattaagctttaaggacgtggtcctccatatcaataaccat

SEQ ID NO: 150948 - DNA, 252 bp, Arabidopsis thaliana landsberg
gtcgagatcgcttctctccccgttgccgtccgtccccaccgctgagtgatagatcgaaacagagaaacacacacggcgaagaagatttcaccatattttgtctaagtggattctgttgagagagagagatggctatgtctcaggtggtgaacacgtacccgctttcgaactacagcttcggaactaaggaacccaagctggaaaaggacacctccgtcgccgaccggctcgctcgtatgaaaatcaagtacg

SEQ ID NO: 150949 - DNA, 496 bp, Arabidopsis thaliana landsberg
agcatataaaaccctatcccctaatctagcttccacatacttgagataagcacaccttcttatcaacctcctcaacaattcttccctcgaattaatcacttcgaacaaatgttcagctgtggctttatcgattgctctgcctcctcttctccagattctcacacataactttgcccctaaacttaccgtaattttcctgcaacattgcaatgaaaacgcttccccaagcaccagctcctacaccaacgatccttaacgggtcgtcatcagctttacccattactctacgaatctcatcaagcctttcttccaccaatctgctcggaactgaattcgtctccaccaaatgatccatcatcaacaaagccttatgatttctctttcagtgactcaatccactgaaaacacaagcaagctatggaacaaaatcggacttcttgtcggatttatcaatgcttaaaactggagacgactttttcaggaaagtttgtgtttt

SEQ ID NO: 150950 - DNA, 121 bp, Arabidopsis thaliana landsberg
ttccgaaattcttttttcttccaagaatgaagggaccatagaatcgtccaaaactgttgaaacttgaaagctttccaattttgctcatctggggttctcgattgatcggttaccagcaatg

SEQ ID NO: 150951 - DNA, 79 bp, Arabidopsis thaliana landsberg
tatatttgaaggcatgaactaatataaactatgatatgcagttctcatccgaaactatcatccgaggatagaacaaaac

SEQ ID NO: 150952 - DNA, 180 bp, Arabidopsis thaliana landsberg
acatgttcatgtttttgcattttgataccaaccatctgaagatataagagagttgcgcacaagtaatggttgttctcctttacgaggtgatcataactcctttgtgctgccggggaacagtaataaaggtaaagaaaaagcagattctggctctgttcctcatagagaaacaattgacct

SEQ ID NO: 150953 - DNA, 303 bp, Arabidopsis thaliana landsberg
tcgaaagtcaaaacatattatatgggtgaaatctcagttcaaaacagatattctacaggtgaaatctctcataagttaaagctacataagagtcccaaaaccccctttttttttaatatgtatctgtattaaaagcacaaagcggaagctatcaatagatcagttttttaacaatggaaactaatctctctctgtgctgcctcatttctctgctgaatgtatcaagtttcaaagccaagaaaatatctatctgtgtatgtcttcactcttcaccaaccctactcttgtggcggtgttagaact

SEQ ID NO: 150954 - DNA, 225 bp, Arabidopsis thaliana landsberg
taagaaacttaagtaaaaattacgaaatggtccaccaagtttcttcaaattacacatgcgtaccatgggaatgggaggtagcattagcataccccctcaacactaacaatcttctcgtattgcactaaaaacaaacatatcttaacccaatatcaaaaatttagtaagaaccaaagcaaaacctcaaatttttgcaagtcagatcagatgattcagagtttaact

SEQ ID NO: 150955 - DNA, 297 bp, Arabidopsis thaliana landsberg
ggaacttactgagctcggggcgggtaaagaaggatggctcgtgaacaatccaaaccttttgcgtgcacttgattctcactctttagccctagccaatcgatttctcatattgattgtgaattggggtgaacctgatgcgcctcgtgtcaagatcagacctgatctgtctccgattgaggctgagtcgactacggcgatcgagtggttagtgtttgatgatgtcagagtcgtcgttgcggggacttcctgtggatatctcttggcttactctgctaccggagatctgatccataagca

SEQ ID NO: 150956 - DNA, 215 bp, Arabidopsis thaliana landsberg
taaagaaatggacaattatatatgaataaaagttgatacaaggcctttctttagctacattccgatcaagggcaaaacaaaaaactacatactgtatatagagaaacgtggaagataggactttgccttgacaactaaacaattaccatttagagctgtgacaattcgatttctcagagagaaacactttaaggtagactgagaagtgcaatcag

SEQ ID NO: 150957 - DNA, 1324 bp, Arabidopsis thaliana landsberg
cacccaaaacaagatgagctcctctgactcttcttccgccgaatcccgtctagccacggctaagacggttctcaccaccgcggcttcggtggctgcaaccgcaatgctagctcgatctttagtccaagattatttgcctgacgaggtgcatcactacattgcctatggattccgttccatctttggttacttctcatcccaaatgacgttaatcatcgatgaatttgaaggttttgctcacaatgaagtctttgaagctgcagaggcctatctagccaccaagatctctccttctaacaaaagtatcaatgtgagtaaacatgagaaagaaaacaactacaatgtcaccgtggagcgtgacgaagaagttgttgacacctacaatggcgtcaaattccagtggatcctccattgtcgtcatgtcgagtccaagcacttccacaacccacgggatctaaactccacactgagatctgaggtccgatcattcgagctcaacttccacaagaaattcaaagacgtagctcttgaatcttacttgccattcatggtgaaaagagccacgttgatgaagcaagagaagaaaacactcaagatcttcactctctccccagaaaacatgtatgggaactactctgacgcgtggacctctgttactcttgaccatccttctaccttcaaaactctagcaatggattcagatgtcaagacaagtgtgatggaagatctagacaaattcgtaaagcgaagagacttctataaaagggttggtaaagcttggaagagaggttacttgctgtacggtccaccaggcacagggaagtcaagcttgatcgcagccatggccaatcatctcaactttgatatatacgacctagagttgaccgcggttaacaacaattctgagctccggcgattattgattgccactgctaatcgttcgattcttatcgtagaagatatcgattgttcactagaattgaaagataggactagcgatgaacctcctcgggaatctgacgatatagaagatccacggtataaaaaagtgacactctctggactgttgaatttcatagatggtctatggtcaagctgcggtgacgaaaggatcataatcttcacaaccaattacaaagagaaactcgacgcggccttgctgagaccaggacgtatggatatgcacatccacatgtcgtattgcacaccaagtactttcaaagctcttgctttgaactatcttgagatcaaagagcaccgccttttcagcaagatcgaggaaggtattgaggcgacagaggtcactcctagcagaggtagctga

SEQ ID NO: 150958 - DNA, 362 bp, Arabidopsis thaliana landsberg
ccaaacgtggaagaaggcgaagacatgcctcttccatagagaggagccaaagaggtgatagtaatgttggatttacaaacagggcaattgttctggtgctgatcaacggagacagaagataactgaacatgtaaccacttgtaaatgcaaggccagcagaaaaggtgcccgcagagagtgaccaccggatcatgggctgtgtctaaacagatgttgcagtcaaaacagccactttcattagcttgacctgctgttggagccgtggtgagattaggtttttgtttggctatgaagccattgtcatgtgctcgttgagcatcagacctgatgaagaagttcccttccatgagaggtaagaccct

SEQ ID NO: 150959 - DNA, 577 bp, Arabidopsis thaliana landsberg
aaaagaaacatacacttacatatttaaacaatgtcaaaatacttacaaaaaaaaaaaaaaaaaaacatacttacatacatcatacatttttttattaatttaagtaatttatttgttaatttcaacaaatttgcacaaaagttacatacaactcgaaacaaacagccgaaaactcttgaaagcttctctttgtttctctcacacgtaacgttttttgaagagattgtgtcgtttggttgggtctttaggtttcttgaattgctgaccggatttgtgacggcctgagttgtattccatgtagaccattccttttgaaccggacattacgctcatcgatcccatgcttcgtctcgccttttgcagagccattccgtctgtgtcttcttcgagttgctctaaaccgaccagatcgtctccagcattcatcacctttccaagaagagacaactgttcttcttgactatggtagctcaagcttgaacccgcgtccggaggtgggaggcttgttataaccttaaagctgtaaccttggtctatcaagaactgttgtcttttcgtcgaataatacatttcctgc

SEQ ID NO: 150960 - DNA, 259 bp, Arabidopsis thaliana landsberg
gtagctaatgagcaacatgaagagaatcatcatcagcatgaatcttcgaggaggaagagattgatgaagaagttgaagaaatgggttgaaggaaatgagaaaggaaaatcaaaagcagaggaaacttgtttcggaaggcactatttgacagtggaacctgaagaagaacgaacatttcattcaagaaggtcttgttctagtgtgtaatagcattgctttacaaaagaagcatgttcatgaattattcatcatttctcca

SEQ ID NO: 150961 - DNA, 375 bp, Arabidopsis thaliana landsberg
gttctagttatggaatctgaaattgaaaaataattgtcaaaaaatttcaacagactctgtcggagatattacaattgttccgctcaccaaaagcattaaagcccatacaaggaaaacaaaaacaaaaactcttaagccactctgattattttcctcactgcacacaaatttacacgaaaacaacaaaagatgaaagaaagcatcatttttcaaaatcgaagaggtttcttcagaatcaagcaaactgtgtttcccctttgatgttcaaaacttcacagtaacttaccaagaaagtaaccatggtgatctactataaaccaaatgatatctccatattattttccgataacccgaaacaatcagatccatgtaccg

SEQ ID NO: 150962 - DNA, 143 bp, Arabidopsis thaliana landsberg
ttagaacacaaacttgaaccatttaaactcttgtggctgagcatttagtgccaacaatagttttccaacagaccaaaagaaagatttaaacatttggacttattttaatgatttctctggtttggagaaaacgagaaatgggt

SEQ ID NO: 150963 - DNA, 438 bp, Arabidopsis thaliana landsberg
tttcagactttcagttttagttttattttcagtttcagtttgactttttgtttctattcaagttttgccaattacaacttttttttttttatctcttcttcgattgtaagaaaaggtatgatttgtctctctatacatttcatctttcttattttgacactttgatcgattctctattttttggaatctgattcatatgtttggggtttaatagtttcagctcaaagaaatctgggttaaagtgtgtttgaaattgtggatcgattcatagattctcgataccaataggtacttgtgaatttctaagtttttgggtttttatctttccccttgttgtatatgatgtgttagaattaataagctgcagattctatctttttggttggatatgcccatgtttgaagttatatatttataagttttgaattcataggatgt

SEQ ID NO: 150964 - DNA, 211 bp, Arabidopsis thaliana landsberg
catagtagagattaacagagcttcgttcagcgatgatgatgatgacgaaggagaagagcgtgagatctcatcttccaatttcttcgcgattgccatattcaaatcaaatcaattcgttccaaaatttcacagtccggtatactcgcatatatatatatatatatatatatatatatatatatgtatcgcaagttcacaacaaaagaagacg

SEQ ID NO: 150965 - DNA, 91 bp, Arabidopsis thaliana landsberg
tcttgccattggtagctatgatcaaatgttgcgggtcctgaatcaccttacttggaaaacactcgttgagttcttacacctatcaacggtt

SEQ ID NO: 150966 - DNA, 96 bp, Arabidopsis thaliana landsberg
ggtcaatatagcttattctggtgtttatcagtggtggtatacaatcggtttacgtactaatgaagatctttataccctggagccttctttttttct

SEQ ID NO: 150967 - DNA, 273 bp, Arabidopsis thaliana landsberg
agaaaaagtaaataaaaaagagatggttttgatcaaagagagagagatggagattccagttattgattttgcagagttggatggagagaagagaagcaagaccatgtcacttcttgatcatgcatgtgataagtggggattcttcatggtatgtataacatccttatgcacaaagcagtgctttctaagatatgtctactgtatatccttaaagagttagtgaattttcaggttgataatcattggaatgataaagaagtgatggagaaagtg

SEQ ID NO: 150968 - DNA, 480 bp, Arabidopsis thaliana landsberg
tgacaatggcgacgaagctgatttctccgccgttgtcttgtccgtgggttacttcaagagaggtgataatcaaagggcttccacggcggagaagagaatggatggtcacgaagagaaacagagtctctgctgtcacggccatgattgtggagccactttctgttgtttcttcttcagcaattcagattcatcaatggtgggaacaaaaccctaattcgttactgttaatgacggaggctactggtggttattcgttggctagctattatacgtctttgggtttgtttgttatctctgttcctggtctttggtctctaatcaaacgctctgttaaatcaaaggttcgaactttactaattacaaaaccctaaatttcacttccaattcccaatttcttcgattttgaaaaagcttgaatgcaatgttgaggatttgcacatcgctgagaaagacgtttgttgttaatgacgtaaagaagga

SEQ ID NO: 150969 - DNA, 383 bp, Arabidopsis thaliana landsberg
gtctatgaaaaaaacaatttaaagaacaactacaacagtcatctaacaaatacaacagagatgtagaaaatcttcctacaaatgttcccaaactaaacaaacagaccaaacccccgtaccaacaaaaccagacaataacaacaagtagaaaaagacgtaaatacccttaaaagccataaaatatttcacatgagggatttcaaagacctttcctttacgggcttccttcctttcttcatcgtcttcttcatcattatcatcttctcattctttttcttcctcccatgatcacttccttgatcttgttccattacgtcataatcctcatccacaagatcaaactcgtcgaaactcacactcccacctgcaaacgccgccgtttt

SEQ ID NO: 150970 - DNA, 220 bp, Arabidopsis thaliana landsberg
aatttctaaatatctctcctctcctctcgtttgattccaaaaaaaaaagctcatcgacgaacgaacgatggcggaaagtggcggtggcggtggctgttgtccgccgatggatctgatgcgttcagagacgatgcaacttgttcagctcattgttcccatggaatctgctcatctcaccgtctcttaccttggagatcttggcctcgtccaattcaaagac

SEQ ID NO: 150971 - DNA, 186 bp, Arabidopsis thaliana landsberg
ctctcaactaaaatctctttttaatagaaataaaagctaaatcccaggaatcccattttagtaccagtcgtggtataaatattaacacttactgattgccgagagacgaaagaggaaaatcccaacaataaagagcaaacgatcttacagctcataatatttcgttaattatcaaattgctaatag

SEQ ID NO: 150972 - DNA, 169 bp, Arabidopsis thaliana landsberg
cttcgttttcttcgaatccaaatttctgcgtctgcttttgattcacagagaatgagcaggaaagatgatggatatcaatctatttcgtgaagagaaaggtaacaatccggagattatccgagaatcgcaacgccggagatttgccagcgtgagatcgtcgatgagatca

SEQ ID NO: 150973 - DNA, 448 bp, Arabidopsis thaliana landsberg
tcctttgtacgctcttcttcttcttcttcttcttcttcttcttcttcttctcctctctgtactttcgcgaaaaccctaattttctagatctgtttctctataatcgcctctctcactttgtagatccttcagatctactctccagtttctctctcagaaacacccaaccatggctaccaaacttccccttcaaaacagcaatgccgccaatgttgcgaaagctccggctaaatctcgagctgccgccggcgggaagacgatcgaggaaatgtatcagaagaaatcacagcttgaacacattcttctccgtcctgatacatacatcggatctatcgagaaacacacccaaacactttgggtttatgagaaagatcagatggttcaacgtcctgttacctatgtacaaagattgtataagatctttgatgagattctcgtaaacgccgct

SEQ ID NO: 150974 - DNA, 406 bp, Arabidopsis thaliana landsberg
atatacgaacttacgacccaataaataagattaagttagagaaagagaaagagaaagaagttgaacatgtgcaaaaacgtaaaccgtagtagttaacaaaagaaaaaacgaggaacacaaaccacaaacccacagttacatgataacattatatcaagaacataagttataagaaacgaaaaagatacaataaagacgttacataacaaaaaagaagaaaataaagaactcttcgctcaagtaacggctccgaggaagatcttactggtagtacatgagctgctgcgcgttctggtaaccaccgtcatatattgcctggtttgaaccagtggctcccattgcagcttgtttaaaagcatgttgtccctgcgggtgatgcatcatcggattcattcctgccatcttg

SEQ ID NO: 150975 - DNA, 154 bp, Arabidopsis thaliana landsberg
agagagagaccttggagagatcaatgtgtttgtagagagaccaatcggaagaacactcatgatcttcgcagttgtgatcatgcgtacacgacatttttcccaattctcgtcggctaaacacaaaatctggatttttcgccaagaaatttcgaga

SEQ ID NO: 150976 - DNA, 925 bp, Arabidopsis thaliana landsberg
caacaattacacttattttgctatcgtttgagcatctcaaaaatttctccggggagatttgtttggtaatatatttcttctttgataaatctcttacctttgagcaaagttcttcgtgttgctccaattcaatatttatgtattatcaccagaaatcgttacttttctaaagttccacaatgtttattctaatctaaagacttttcactttttgtacgcttttagagatctcaaattgtttatttttgtcatggtgtgactctgggattgtttcattacgcgctttttattactcttcttcggcgatgaactcaaggaattctgatagacgtgattggtttttttctttctttctttctctttgttatctggagagaattgaagaaccctaatttgattcataagaaagactctattttttagattttgcgtttggttgattagagtaaccctaatttgttactcggatctaatcgtctactttgacttaagatgaatgatctgtaaatatttagatctaatatatcttgagaaagtttcaatttttttttaacggcgaatttgatttcttattcttcagtatatactcttgcacaaagaagatgctcaaggtccctgaacaccaagttgctggtcacattgctagtgatgggaagctaggtccactcgtagatgaccaaggccggttcttcaagccacttcagggagattctcgtggcgaacacgaggctaagttctatgagtctttcacatcgaacaagaaggttccagatcacatccatagatactttccggtgtatcacggcactcagctaggtgaagcatctgatggatctggcaagcttcctcatcttgttcttgatgatgttgtttcagggtacgcaaacccgtcggtaatggatgttaagattggatctaggacatg

SEQ ID NO: 150977 - DNA, 729 bp, Arabidopsis thaliana landsberg
gcttcatggccatatctcttatcctagattatttcttgcttttccttacagatcttttgacgacctaagttcttgctgtgaattgttaaacagccattagcctgggcttgattagccaaccctgttaaggcagggtttgaactaaaagtgagatagtgagatggatgtctcagcacttttaacgtctgctgggattaatatagcgttatgcgtagtgcttgtatctctttattccattctacgaaagcagccagccaattattgtgtttactttggtcgattgctttctgacggaagagttaaacgtcatgatcctcgttggtatgagaggttcgcgccctctccaagttggctcgtgaaagcttgggaaaccactgaggacgagatgttggctgctgctggtctggatgctgtggttttcatcaggatggtcatttgcaggttaatgatacttcacctataacatgcttactgtaattgaatagacaagcatggtgttttctactgtttctatgtttcagcacttgttttatttctatgtggtatttgtgagtttcgttcttcacaactctcacagttgggttatcgtgttttttttaaactctgcagcattcgtattttctcaattgtcgcagtcgtttgccttgcctttgtgttacctgttaactattatggacaaaagatggagcacaaggaagtccatttggagtcattgggagtattcacaat

SEQ ID NO: 150978 - DNA, 172 bp, Arabidopsis thaliana landsberg
cttcttcatagattgtttcattgtttgctctgtcttgttgcgttctaggttttgtttgttctgtctacctctgtaattctctctgttttgctctctaggatctttttaataaaatgctaattacattatttttgcttctaagtggatgcaattagattattttttcatagaa

SEQ ID NO: 150979 - DNA, 319 bp, Arabidopsis thaliana landsberg
ataaaaaacaaaatgggtctctagatttcagatttctgggatctgggtgttagattaatctctttctcttccattattagtagagaaagctcactcctttcactcaaagtttctacctttttgttttcctgaaaatgggttgtgtttgaaatctcacactttgagatttgggtgtttattttgggatccttcttaccacatttagaaatttcagctagggttttcgatttctttacttctcaaaggagattttagaggcaaaagatggctccaagggtgggatttttaagattggtgggcgaaaagaacgaggaaagga

SEQ ID NO: 150980 - DNA, 277 bp, Arabidopsis thaliana landsberg
atttttcgctttgcgtgccttcttatcaacttgtaaacaaagctacaaatatctttaaataaggacccaactctttttcaattcctcccatcaatcttcttcatttgttcttctgttggtggtggtgatctactttcagagaatcgattttgccaagtgggttcttcttgacaatctttcttcttctttgaaatgggttcttctgaggagcagaacattcttgatactggtggtgctggctttatcgggacgcatactgttgttcaacttcttaaag

SEQ ID NO: 150981 - DNA, 181 bp, Arabidopsis thaliana landsberg
ttttgatataggaaactaggcattgatatatggttagatacgtggcaatacatgagtggagacagtagctgtgagacgtggcaagagaagattggtcgatgagagtgttagagaaagaatcgagacgcggagatatatagctaatgaggatcatttgcagaagaataagaagatttggatt

SEQ ID NO: 150982 - DNA, 615 bp, Arabidopsis thaliana landsberg
acgatttcatgagagaaaatcgacaaaacccctctcaaccaaataatacaccttcttcttcttcttcttcttcttcttcttcttcttcacagctgggtttcttctaatggcggaaccgattccctcatcgtctctgtcaccgaaatctctacaatctcctaatcctatggaaccttctcctgcatcttctactcctttaccttcatcatcatctcaacaacaacaactcatgacagctccgatttccaattctgttaattccgctgcgtctccggcgatgactgtaactaccaccgaaggtattgtaattcacaacaattcgcaacctaacatctactctcccaaccctacttcttctaacccaccaatcggagctcagatcccgtcgccttctcctctctctcacccttcttgatctttagatcagcaaacacagactcagcaactcgttcaacaaactcagcacttgcctcaacaacaacaacagattatgcagcaaatctcttcatctccgattccacaattatcgccgcaacagcaacagattctgcagcaacaacacatgacttcacagcaaatcccaatgtcgagttaccaaattgctcagtctcttca

SEQ ID NO: 150983 - DNA, 128 bp, Arabidopsis thaliana landsberg
tgttttgtttatgtctggattttaagaaggcaattgtatctgatcctctaatactttgtatctccaacatgtttattctcgctacaaatttaaataactatatactattcaatttttcctattataat

SEQ ID NO: 150984 - DNA, 306 bp, Arabidopsis thaliana landsberg
tctccaacattttcttattttccttcctaatttccaacctctgttcttagcaatatattttttctccaaaaataattctcagtttgattttcttcttctagctcttaagtatatttctttgttgttatttatcttttaatcctttaatctcatctttgtttatctttaatcaaaacccaaaatttacatgggttcttgaaaatctagaagaaataaaggaaacataacaaaaatagaaagaaaaagaagctaatggtcttaaatatggagtctaccggagaagctgttagatcaaccaccggtaac

SEQ ID NO: 150985 - DNA, 420 bp, Arabidopsis thaliana landsberg
cgaataatgtgcttcttttatatgggctttaattattaaaggcccaataagtagttggtaaggatcctgaagtgaataagagaagcccaaggcttttaagtgggtcgttttattctcccaatgcttcggccttgcaactataggccagtttctgcaaatgtcttttacaatatattttttttttgtttttttgtttttttttgggcatgtgttaacatatgtgttgcatctacagtcttgagaatccacgcagtagatgtacaagtacgaaactcattcatgatgatgaacatgatattgataggtcttatccattaaattctatcagcttttgtgttctatttgattcttgtagatagactgtagaattaatgtaggtattcacgagtatacaagttgaatagttattcttgtaaacag

SEQ ID NO: 150986 - DNA, 159 bp, Arabidopsis thaliana landsberg
cggttgttgttatggtatgtcttaattagggtaaaaaaatacttgattgttttctctcatttatcatgcatagagtacgcaataaaccggttaaatccaccgctactgcttccgtcaagcatttaatcaaacagagaggcggcgacggagctacggcgg

SEQ ID NO: 150987 - DNA, 90 bp, Arabidopsis thaliana landsberg
acctcgcatcgcaatgcggcagagctcttgcatggcggcggcattaaggacggacgccgggcttggattgtgagcaggataagtccctga

SEQ ID NO: 150988 - DNA, 139 bp, Arabidopsis thaliana landsberg
tggcctaagacattttgaagaatttacattatctgtttgtagtgttggttaaactgttgtcttgttccttttatttattttggatgacacaactgtgtttgagtgaataagaactcctgattttcccaagtttagagag

SEQ ID NO: 150989 - DNA, 579 bp, Arabidopsis thaliana landsberg
agaaaaaaacaattttttatatttggaatccaaaaaacaaatcaacgccaaaaattaaaatcaaataggaaaaagaagaaagaagagagatatgaacaaatcaaaacccttcgaggctagttctcctaccactggctgaagacgatcttcgaacctcttcccgagccatttcctccaaagatgaacacgctcgcggcggaaacactgggggaaacacgagcgtccgtccccttgtgggtgagacagacggtcgtcgtggtggaggtgacggtgaaaaactcgaccttggtggcactgatgccggggtccaaataatcgtgttgagactgcttgatcttcccatatgtttccttgccacgaccggtgcggttctctcaatggaacctacacgagtacttcatgtcctgtatgatcttgagttgatccacgatgtttctcatggttggacgctctgaaggctccacctgcagacatttctgtgctatatctgctatgctcctagccgcttttgccggaaaccgacctttaagctgaggatccattataagcgagagcctgcaatcatctgctagaaaagct

SEQ ID NO: 150990 - DNA, 412 bp, Arabidopsis thaliana landsberg
atatacgagttacattcaaaatcgtcataaaggtaaaagaacaatttgagcatcattacactttcacatggttgagatgttgttacttatttgagttttaaatggatcctttcaggaagttgtcgacctttgaattggttgcagaagagagaaacttcatgcaaacaggaggattaactccggctatagcgagcacggagctcggcaaagaccaaatgccatctccgcatatcaaaccagaagccaccgctgtcccaaaagcttcagccttggctgcatctactctttcccagataaaaagtatcaaacttcccacacacatgtcaattgcgaagtaaggtcccaagaaaaacggtatagccattgccatgggaagtggaatgaaccttccccaattcctatggagcctatc

SEQ ID NO: 150991 - DNA, 512 bp, Arabidopsis thaliana landsberg; identical to SEQ ID NO: 13985

SEQ ID NO: 150992 - DNA, 268 bp, Arabidopsis thaliana landsberg
  unsure (1)..(268): unsure at all n locations
tcattctcaagacttctcatatgttgggtcggctactcattgcagagatcttgtcaaagcatcatgtcgcttcaagaccgatgataaaatcacgcccagagcaaaaatttaaaagtaaataagaatgtaaattttctgggttccttttttttttttttttnttttgtggcccgtcgtttggaatgagaaaaatgtatgtacgtagttcatgaaatagatgagagtctaatttgtagatgtgccaaattttatcgaatcttacatacta

SEQ ID NO: 150993 - DNA, 220 bp, Arabidopsis thaliana landsberg
tactttcttgtcgattccccatgggaaaagacaatcttctaactcattaaaataacgaaaatagcttttaagtatttctgtacattttgtaaatataaataaacattttcgagtattggactcataaagataaatagataatagtcaataagtagtatttacaacagcaaatacaaattttaccgccaaaaaaggaaggaaagtaagaacaaaagcttca

SEQ ID NO: 150994 - DNA, 129 bp, Arabidopsis thaliana landsberg
gactgttagcttaatcgtggaatctgcaaatgttggatcttcgagctccatcacaattttacctctgtgattcttatttcttcctccggctttgctttcaccttcagattcacttaatttcagaaatac

SEQ ID NO: 150995 - DNA, 832 bp, Arabidopsis thaliana landsberg
gaatgtgtatttggatcaacacaactcatgagtggcttcattttttaagtgatctagaggttgttaagagctatacaacatactgattagattatagattataaacaataacggatccattgttaacaacggtttttcgtgtggtatacggttgcagaagatggagctatcgcagtgtgtaaatgcaagtttgtgtcttccaaagaaaccaaaattggtagttggattgaaagcagccactgcttacatatttgtggataatgcagcctatagaaatttcttatacgatacttttggagtctcctcctctgatatggagagttctgcagtagccatggtaattttgaatccattaatttttacataattttgatcgttaagtgatatgtttgtgttgtggatttgaccagacatgcgcatcaaatgggtatccgataattgtgataaggggtttatcagatttagctggagaaggaggagataacactgttcatgagtttggatctttggctgccactaacactgccaaagctgttttagagttcattaagaagctcccaccctactaattcctctagtgtaacctatttatcatgaatgtttgaatctagttctctagttcatatcaacgaacccgtgacaacaaatgatttggattgttatcaaattccattttccatgatcgtaacaatgacaacacttttatctcatatatctacgaaatgcaacattcgaaaaattaacaactttcactcattctagcgacaatcgttaacaagcacaaaaagggatgtatatataccttacaagagaagccaaattgttaaaatta

SEQ ID NO: 150996 - DNA, 238 bp, Arabidopsis thaliana landsberg
tagtataagtaacataaacaatggattaggttctgatttttgtttgggcctaaaatgttactgcatacatgagatacgggcccaatgacacaagtacacaactcatctaggcatatatgaaaccgaatcggttaatttctacttgagtcattgtgagagctgacattaactgtaacaccaaacaaggacaaaacattgaaacaacgaggcagaaacttgagctcatgaccaaaccctt

SEQ ID NO: 150997 - DNA, 167 bp, Arabidopsis thaliana landsberg
tgctagaccagatgttgggaactcaatttcctgtaaaagggttcctttggatcacgaaaaataacgtgttttcgtacatccattttaaaacagaccattgcaacaaaactcaccattaactgtttctcatccttcaaagccatttccactgcttctttggcctgtaa

SEQ ID NO: 150998 - DNA, 307 bp, Arabidopsis thaliana landsberg
cctcgttttcaaattaaaaacagaagagaatttggaaatgccagtacgacgggagataaaacctaacatccgccatggtgtctgttatctaaactacgccaaaatattcgaagtgtcgtcgtttcataatataacgcaaacaaaaacccactcccactttctcctttccaaaaaaagaactctcgccactttctctgctctttttctttctctctctctttcttgttttcgccggcgatcatggagaaaagcggcttctctcccgtcggtctaagggttcttgtcgtagacgataatccaacttggc

SEQ ID NO: 150999 - DNA, 149 bp, Arabidopsis thaliana landsberg
aggggctcaccgagaagttcaaggagaaggatacggcgttatcaggctcagctactttcaattacgagaacttcatgctcactgttttaccattcctcgtcgcttgagtgattgtttttttttttttgttgaccaaagagattgttttc

SEQ ID NO: 151000 - DNA, 349 bp, Arabidopsis thaliana landsberg
caaactgccacaacaaaacctgtttctgatcaaagaaccgccatgaattcccaaggagagacgatgaagtcactacgccgccatctttgttgatgatcctctctctggcatttgccattgaccaatacacttgaggggttaagctgttaacagataaaaccatatctcctgatttgatctcaagggcataagtcatgttgctcgaagaagcactgctagtgagcttcatgccttctttgaaagcttgattcgtgatcagagtatctgtaaaaatgatcaaaactctcccagatcgaagttccgtcaacggaaacaacaacgagattcccggagtcaaacagctcgattg

SEQ ID NO: 151001 - DNA, 249 bp, Arabidopsis thaliana landsberg
gcaaaggttgaaacagtagattctgaatcaaaccgttctattgacatggaacatgattctggaccagatcatcaagaagaagcagcaaatgggaaagaagatccaacggttgaaaatctggctgttgattcttcttgtatggacattactcctccatctccatctgctgctacagagttcatacctcaggagaacgaacgttcagacaccgagtccaaacctctggagaaagaacattcagacaccgag

SEQ ID NO: 151002 - DNA, 138 bp, Arabidopsis thaliana landsberg
gaagcaagagagtattttggggaagctcttcttcatggagcttgaattctcactctgctactgctaaatcgatgttagatagtgcccatcgcccggtttttactcactctccatcggaaaccaaatcccagaaaatgc

SEQ ID NO: 151003 - DNA, 347 bp, Arabidopsis thaliana landsberg
ggaatctttctctctctctctctctctaaaaccagattcttaatagaagaagaagaagaagaagaggaaaggagaaatctgccatggcgtcgccgagcaaacgtcgagagatggatatgatgaaactgtgggttcattttccaattgattgaattatatctctagatttattctctggggtttttcttcttttttgatctgttgatgaaatttcttcttcttcttcttcttcttaatgatgaatttggattaaataggatgatgagtgattacaaggtggatactgtcaacgacgatttgcaaatgttctatgtcacattccatggacccactgacagtaattctct

SEQ ID NO: 151004 - DNA, 444 bp, Arabidopsis thaliana landsberg
cttaatgtggactgtgatcattacatcaacaacagcaaggcaattagagaagctatgtgtttcatgacggacccacaatccggaaagaaaatctgttatgttcagtttcctcagaggtttgatgggattgatagacacgatcgatactcaaatcgcaatgtggttttcttcgatgtatgatttccatggaatttgtctttgcgttgttctatttatgttacagctcccttctcattggtttctctatgattataaacagatcaacatgaaaggtttagatggcatacaaggaccgatatatgtagggacaggttgtgtcttcagaaggcaagcactttatggatttgacgcaccaaagaagaagaaaccaccaggcagaacctgcaactgttggccaaaatggtgctgtctgtgttgcggtatgagaaagaagaagacaggtaa

SEQ ID NO: 151005 - DNA, 154 bp, Arabidopsis thaliana landsberg
ttaacgatgttttgacggtcgtaagtgatgccagcaagcggtcgtgactggatctttcatgatctctagtgagattgggcagataaagtaattaggaatctcgatctcttcctcttcttgatccatttgtggaaaaacgtatgattttgtgtac

SEQ ID NO: 151006 - DNA, 484 bp, Arabidopsis thaliana landsberg
aactagtttggttttgcattttgtgtgataatgaatcaactcgagaaattcatgtacaagtgtaaccacaaaacaagtattgtttatgttttttatcacactatcaaaaccatctaatcaacaacttcactgctaaacaacttgaacttattagcatcaagaacaagtttcctaatggaggagaaagctcccatgagtcctgcacaagtgaacacaaccattatcgtcatgtttatccaatacgtgaagctccgtctggttggcttataggtcatgttgtatagaagcattggcagcacgaaatcgagtgggataaacccaaacgctcctaccaccgcgtttatatccccaaagaacggtagcatcgctgccatgaacccgcaaaacgccatatatagtgttcttagtatcaaacgcggcacaaggttgcgttttgagaatatcccttttgttgtatccgctgatttcttctccattatttcat

SEQ ID NO: 151007 - DNA, 633 bp, Arabidopsis thaliana landsberg
cagctggtgggttttgttggaagaagcagaatctaaagctccactctttatcaggttcgttagggttttatgggtttttgaaattaaatactcaatcatcttagtctcattattctattggttgaatcacattttctaatttggaatttatgagacaatgtatgttggacttagttgaagttcttctctttggttatagttgaagtgttactgatgttgtttagctctttacaccaatatatacacccaattttgcagaaatccgagttctgcgttgtgattcgagtaaagttgtcgcaaaaccgaagtttaggaacaatcttgttaggcctgatggtcaaggatcttcattgttgttgtatccaaaacataagtcgagatttcgggttaatgccactgcgggtcagcccgaggctttcgactcgaatagcaaacagaagtcttttagagactcgttagatgcgttttacaggttttctaggcctcatacagttattggcacagttaagtttctctttaaaaatgtaactcttttaaaacgcaatctttcagggttttcaaggagataacattagctctgtgattggatttgcaggtgcttagcatttgatctgtaacttcttactgagagca

SEQ ID NO: 151008 - DNA, 180 bp, Arabidopsis thaliana landsberg
tcctaatttagaaaagattatataaaaccaaaaaatgttatgtggtatgtataatgttactatatataaaattaaactataaaatataaatgtattagagaatgatacaatttgcataacttttatatataaaaaataattcttaaattttaaaaattactactttaaaaaaaaaatcac

SEQ ID NO: 151009 - DNA, 504 bp, Arabidopsis thaliana landsberg
aatagaggctcttagctcctccttcaaagtgacggctctcttcctcatttcctctccttcttcgaaaaccattaacctcttcacagctctctcgaccgctcctctgtctagatcaccctccacttgaatcccaattttccaaacacactccaagtaccttgcgttcacccgaaaatggcctgcaaatcaccggaactccttcgctgatcatgttttctagtatcgagttgcatccactatggctccaaaacgcccctattgcaggatgagcaagtacttccttctgtggagcccatttcacaatgtagttgatacatatgttttctacttgtttatagggcggaagctactgttactaagaaacctgcttttcctccatttccaaaacctacaagaaaactaataagtagctctctaagctccgggcttatagattactctgcttctcatcttctttgaatgttttatatatagaaatatcagattctcgcttgtggacactaa

SEQ ID NO: 151010 - DNA, 83 bp, Arabidopsis thaliana landsberg
ctctgtaaacctttcttcttcttcttcttcaatgcctccctaaaaccctagactcagaattctcaaaggcgacaccttttacc

SEQ ID NO: 151011 - DNA, 1112 bp, Arabidopsis thaliana landsberg
ctgtagtgatgtcacagattcaagccatggctgaagatgctcaacctttgctctctgagtttcgtgatagcggcttgctcaaggaagttgagtgtcttactcgaagccttacccaagcttctgacgatttgaggtaatagctcttagtggaacaatcttggcatatcgactgtatatcattatgaatattttgaattccatagtgcaaatgcaaaactctttctgcatcatgatgaaagcagaccttacgatagatataagcacactagcttcaatttctcgtatgtggcttcaacactctatttgtggattaagtttctgaacaagagatgatggttaaaaagttaaaacacatacatatctatgcataaatgtgtcttatcttatgggttccatgttaaattaactgctttgctcatcagtgcttttcaatctttcctctattgtcttaaaatttcaataatttatcttgtgttgcctctacttatcttctgctagcctactgtttctgtcacttaatgtatgttcctggaccacatatatgcaaaagctcgtttacttacatacgtatgatcaactgagtgataactgtgattatgagaacctatattcttgcagtagacagcaaaaatataattttcattttggttacattgcagaaaggttaattcgtcaattatgactcctgagaatacagaactcatacagaagtcaatctacactctggtttatactttgaagaacgtcgaggtaaacttttttttcttcttattctatgaataccagctttgacaagttggaagaaacaatgttaacaaagacttggtttttgattttcttgattgtagagtataagctcagatattctgggattcacaggagatgaagccacaagaaaaaaccttaaactactcatcaaatccctaagcaggctactatgatcagcctgtagattttagactggataaataaaatccagaatttttatggtaagcaagttttaaaaattcaaaaatgtgttgtttctttttagagtatcttttgttttcgttttgtgttctgagttggggtttaatggagagacataattcagtttttataagaacacaaat

SEQ ID NO: 151012 - DNA, 194 bp, Arabidopsis thaliana landsberg
gtcagtttctgtgaagtttcagaatttaggccctgtggttgtagtttacggaactgtaggtggatctagtgggcgagtgcatatgaatcttgataagcgtaggtttgttcctgttatcgacttggttatggatacttctacatctgacgaagaaggctcttcgagtatctaccgggacaggttcatgtcctgga

SEQ ID NO: 151013 - DNA, 176 bp, Arabidopsis thaliana landsberg
  unsure (1)..(176): unsure at all n locations
taccttgacggtgattctacggtcactctggggtctgatgaacttagcagacctcttcttcacaaccttcttggtaagcaacgggaccgccatttttgcttcttcgtaagatcgatatctcaaangcgaatccgtaaaacagctgaacaaacctaaaatgtctttataagcgtaca

SEQ ID NO: 151014 - DNA, 373 bp, Arabidopsis thaliana landsberg
tttctctttataagcttctacgagaaaaccccattagccaccgattataaactcttgctctctatcttcctcttaccgtaaaagtaagatcagttctgttttttaagtcttacttggcgtcaaacccgtccatagctagaacgtgaagagtagtaaccagtggaagagacagcggaaatgtactgccatgcaaaagcagcaatcaccagaaccataaattgcggctatccacggctttcatggaagtgtatacaagtggcattttcccaaattctgccacaaaccggtttacgcagtgtgttcttttttctgtgtgccctcctatgctactaattccagttgaaccgatttcatatattttacctacaaaaac

SEQ ID NO: 151015 - DNA, 256 bp, Arabidopsis thaliana landsberg
accatgtctgcagcattgagctcgtctctgtacatttccccaaagaaaccttcatgtccacaacaatctcaatccacattcttatccacgaaaccaaccaccatcaaaaccaatctccatagccatcctctcttcactgtagctgatcagacagtaaccctccagatgaaagagaagatcctatgtctcgagctaatgggaattgactcaggaaaagccctttctctcaacccatgtctctgctcagccccccatg

SEQ ID NO: 151016 - DNA, 715 bp, Arabidopsis thaliana landsberg
tgagatctgtccccaactctttttcactggaacttattagcggtggcagtaacatttcgcagaaatataattgaagatatatcgataatacctaatgtgttctcattgtcgtttctaatcaatgccacgagttaaattttgaggacaacatgagaagaattgctattaataatgcaattttattcttttggtttcaatgcaattttatcctacaaaaatataagaaactgaacaatgaaaacttaaaaaagaaactacgggtcctatcattccttctatacattgaaaacattctctacccatgagagtccatttggacccaaacctaacaattccttcacacataaattgttcttgtctaaacactactaaacaacaacacacaaaatctcacaataaaacaatcaaccaaaccgctacaaacgctttaaatcaatttcttaccaaattcaatgatttcacaagattagtttacatcactcactcagagctatttgagttctcctctctactatcatcatcatgatcactctgttgctgcttttcttgatgctccaccgcattgttcgcttgttccgcattcgcgtttgcgtttccgcctcttgaataagccgagttcaaagcggctaacatcccgagattggagtccggcatacttagtcctaagttctgagtcggctgcggctgagctaaaaaagaacctaactgaagtgaa

SEQ ID NO: 151017 - DNA, 427 bp, Arabidopsis thaliana landsberg
aaaagagttcataaacaaaaacctactcccagaaagttcttccaaatctctcgccatggtttctctcttctttcgtgaattttagtttttctaaatttaattatactttaaattgataagtccaaactctttcgcttttgattcatcggtaatacaagtttaagaaaaaaaattcttatatttatctctcaaatcgagtttcgagtgtttgatttgattcgtaaaatcaatggcgacgagcaaaactcaaagatcgccggctgaaattgaggatataatcctccggaacatattttatgtaaccctaacggaatcaactgattccgatcctcgtattgtttacttggagatgacggccgctgagattctcagcgaaggtaaagagcttttgctttctcgtgatttgatggagagagttctcatagat

SEQ ID NO: 151018 - DNA, 386 bp, Arabidopsis thaliana landsberg
acttgagtgagtacccattttctaaatgtaagatgagaataggtatattatacatccaaaaaagctttttacaagtcttctttttgttaatagtttttgttttttttttcctttcaaaaaaagctgcacgtggtggcggtggtgctgagacggcgttgtattctcatcggaagatggtacctcttcgtttctctcaaggttaaaaagctggtcctttatgttttaaaatcatctcgtgaatcgtgatacttagtcttggttccaagaactgtataacgtcattttgagttattaattccctcaccacacagattatttcataggagttgggtaccaagagtagtgtgcaatgtataattagtaatttaataaacgtattaggttca

SEQ ID NO: 151019 - DNA, 117 bp, Arabidopsis thaliana landsberg
agaggatcaacaggtctttgtctgattctgattctgatattattgtggttggagattgtccgtttctggaagaagaggattctccatttgtgccatcaaaaagttataaagtgattg

SEQ ID NO: 151020 - DNA, 66 bp, Arabidopsis thaliana landsberg
gcttcttcttcctcgtcttcgtcgtcttctgtgtacagacatacctccattttatagagagcgaga

SEQ ID NO: 151021 - DNA, 149 bp, Arabidopsis thaliana landsberg
  unsure (1)..(149): unsure at all n locations
aatctagatagctccataaaaaagaaagaaaaaaaacgttctctcgtttctttctattattcaaaatattctcaccaactaaaaaaagatacatcgaaacaaatctctctaatcatatctaagntataacttttcttataaacaataac

SEQ ID NO: 151022 - DNA, 303 bp, Arabidopsis thaliana landsberg
acctgaaggcgcataagcagatcggcgctatgtttctgcacgaatcgattatccgaaaaagacttcctagcttcttcgacggcggcgagatcctcaggagtaccgagattcggatcgaactcccaaaactgtcttccgacgtgattattggtggttctaagccatggactacctccttccgcgatcttcagtttccacattatcactctctcgagagggaaaaatatgccgtttgatcggaaaatgagtttgaatcaaagatggattctagagattcagtgaggagaaaatcggaaatttggc

SEQ ID NO: 151023 - DNA, 770 bp, Arabidopsis thaliana landsberg
gagctatcacggctcgtacacgtggttctaaccacctcattatctctcgaacttaaaattaacaaaattcccaaattatttagctatttttgtctgatctgccgacgctagccgttctcctccgccagattcaaatatttcctccgccgtcgacactccttacctcctccggctcacaaacttaatccaccaattttaccatgctttagaaccttgggcatatatcaatggagaagcgagtcaaatacaagagctctgtgaaggatccaggaactcttggatccctcgaattagtaagaatactttaactctttgccactatatgatttctatttttgtttccttagtcaatggtttttttctcaaaggatcttccaatttttgttctcagagtgaattgatgctgctctttgtcccaaatgatcctaaatcagatttgaagcttaaagttcagactcacaacatcaaaagtaagtgtttgattatccatattgttcattcaggtttatcatgaataatttctctaaatgattattgtgccatgttaaatttctcaggtcagaaatataccaaagaaggatcaaataaacctccttggctcaatctgaccagcaagcaggttgtttttcctcggccctttgtgctcaaggctaaaaaatattgataggtgtatcactgaagtttcctcgtctttgattattacagggaaggagtcatatctttgagtttgaaaattatcctgacatgcatgcttgtcgtgatttcatcag

SEQ ID NO: 151024 - DNA, 101 bp, Arabidopsis thaliana landsberg
cttacttgaaactgaagaagggaacgaaaaagattgcagcttgatgagactaagctccatcgcaacagaagaattatcatttctctcatcctcatgacttc

SEQ ID NO: 151025 - DNA, 352 bp, Arabidopsis thaliana landsberg
ctacgtcaagctgtttatctagttctaggtatgtttcacatcaccttgccttagagtttagattagggttatttccctctgttttcgtttgcttagtgttttctttagatcagtaatgagctctctgatgattctagtcgttgaaatagttcagtcatttgtctactaatgtgtgacagaatctttattactgatttattaccaaaatattaattatatcttcttaaaaattgtgatgatgatttaagtgtgtttataagagtaacctttttgtagttccaacggaacccccactgccggatatccatccaccggaaattcaaccacagcaagtccaggcaccacaaatcca

SEQ ID NO: 151026 - DNA, 550 bp, Arabidopsis thaliana landsberg
ctttcgcggttgagattttatgatctttccgaacgaaatcaagcattccgacgtccgtacactatccggcgctgcttaaaccgtctctcgtcgcctgtctgatctgttatcttctctactctccggtgtcgttgagtaatcattcttttctgcttctgatagagttaattttctttgttacatgtttgaggctgctgcacgaaattttagctgtaatcccctgaaaacaagctctgctgataggcatgatagggtttctaaatcaggcttgtttctgttttgtatcgttccagtgtgttaatactgagcagaaatcgtgatttcgctgagtataactcttgttgatttggtcgctttagggttttgcttctcactcgttttttcagtgttgcaatttgtttgaattatagaattacttggaaatactagctgatttagatgtgatgtatgaacattgaaaattttggtgtagagattgattatcaacttctctggtgtttggaccgagcttggtcaaaagacctcttgatcagcaaatatgggagagatg

SEQ ID NO: 151027 - DNA, 107 bp, Arabidopsis thaliana landsberg
atgatggtgcggtttcatctgacgaggaactgagagaagatgatgacatagcagcggatgacagccaacaaagaagcaatgaccgcgatctgaaggaccagctacta

SEQ ID NO: 151028 - DNA, 166 bp, Arabidopsis thaliana landsberg
ctttaaataccattttccctacgagtctacgacgctctctaaactttttatacagaacaaaacacacccaaatatgcataagcttgtgttatctcttctctacgtcgtctcactctcatttctcctcttcttccatggcgccgaggcacaccagcgagaggcgccg

SEQ ID NO: 151029 - DNA, 290 bp, Arabidopsis thaliana landsberg
caaagccaagaatgataaggaggtaaagagaatgacattttatataccataacgcacatagtttatgtcttttgtaggaaattttcttatgatttttttttcgttcatattgggaaaatgaaacagagattggacagtttttacaagaggaattataaagactactttgagtttgttgaaggatctataaagggaaagacagaagcggagctcagtgaatctgaaaaacggattctggaatggctcaaagccaacgaatgattatgatgaattgatgatgatgatgataa

SEQ ID NO: 151030 - DNA, 412 bp, Arabidopsis thaliana landsberg
gtcgtgtagcccagtagctctaatcgctacgattgctacacaccacatcccttaagaaaaccctaatcatctctctctcgcattctataggaatcgcttcccgaagcttccaacattctcttgtttctcctttgtctctcaatttcagtttcctatattatacgcttgtattaatcaccagtatacattttgtcgtttctgggtctggaaccctagtagttattatagcatccatcgctttcttcaatcgccgtccatcagagtttcaagggatttgctttaaagatcaatcctttcctaagaaaatagcgacaattcatcagcttttccttttcccatccttcattaccttaactgactcgaaattcataatccagctgaaattgtgaaacttcgtttcgggtttgatcag

SEQ ID NO: 151031 - DNA, 454 bp, Arabidopsis thaliana landsberg
ttgtttttacagttcagacctgagtttctacagtactgaagataaggtgagacatctgatttgtctgaagcagaagagaagctaagcatgtgttcttgtcctttacgaggatcattaatagtggtagatctcagtaaagggatgccttgatgaaacgacagcgttttagcagaggcaggggaagaagagaatccatcagttgatgttcgtgagagctttgaacttctccagcaatcttcaccatcgaaaccggatctttcttgcttgttactgaaaccagatccgagttcagtttgacccggagaagaaacggtttcatgaccagaaacacgaactccaagatccataaaaaatggattcagaaggagacaaagaaaaagtagtgctaaataatcacttcagagatttttcccatgggaggtaatcgctttgagctcagtgaagaagagaaccg

SEQ ID NO: 151032 - DNA, 411 bp, Arabidopsis thaliana landsberg
cgattctcgctgtccttctcgcaacgttcccggggaattcacaaatcgccttgaactccttggagaaattggagcttcgattcattcatttatgaggatctctgatgattagtttcgaaattcgtgaagacatcttcgtccttgctttcgaatcgctgaatcgtgttacgttttctagattcggctgaggagtgaaattggatttttgaatcgatttctgaataaagaggaagaggatcggagatggcggcgggtgtaatggtaacggccacgggagcagtggtgattctgtacttactgagccgtcggatcgtgtgggcgagaaatggagaagatgattcaggaggtgaattgggtaaatcagggagatctggaaggaggaggattgttaggagaccggctcaagcaccg

SEQ ID NO: 151033 - DNA, 305 bp, Arabidopsis thaliana landsberg
aggaaattgatactgaaatatagccacaaatacaggctaggtctatggaaacctagagctgacgcaataaaggcgtgattggttcctgtactcatcgaatcataagttcctctcatactttgttatgctaatggaatgagttgttctcagaatgatctaggcatagcaatgttgcaaatcacttgaaacattgtaccaatttgcattcatgtacttgttttttccatggttataaacattaagcgactgttcacatcctggagcagtaacttttgaagtgttgaatgtatcggtcttgtgggaat

SEQ ID NO: 151034 - DNA, 479 bp, Arabidopsis thaliana landsberg; identical to SEQ ID NO: 6879

SEQ ID NO: 151035 - DNA, 286 bp, Arabidopsis thaliana landsberg
ctaatggcttcttcgaaactccatcatcatactcaccgaacaaaatccccaatacgtcgcttttgtatcttaatcataaccatgtcctccattctcatccttctcttctctctcttcctcttctcctctccctcctcctcctcccgtcaccaccaccaccacaattccggcgacacttctccggtcaatccttcgtcgtctctcgccgctcagatccgtctcgcttgtaacgcaactcgttacccagaccaatgcgtctcttccctatccgaacagggtcgggttc

SEQ ID NO: 151036 - DNA, 145 bp, Arabidopsis thaliana landsberg
  unsure (1)..(145): unsure at all n locations
gaagaaacaaaaaaaaatggcgacggttcaattgtccacccaatttcgctgccaaaccagagtttcaatctcaccgaactctaaatctatctccatgcctncgtttctggtaccagtgacctcaattattcaccgcccgatgatc

SEQ ID NO: 151037 - DNA, 166 bp, Arabidopsis thaliana landsberg
  unsure (1)..(166): unsure at all n locations
ctattaagacctttcttctcggcatgttgcttccacagtgggatgatgggagtttagatacaatatttgtttattaataccgaacaatcaaaaatagatactaaagttttntgttttccaaagctcaaacctaatgtactaattcagtaaagctttcgacaccatc

SEQ ID NO: 151038 - DNA, 379 bp, Arabidopsis thaliana landsberg
gggctgacagagaagttcaaggagaaggacacagcatactcaggctcagctactttcaactacgaaagcttcatgctcaccgtcctccccttcctcatcgcataagttttttttacggtaacccgtttgcacatcttctgtttttttgtatgttctttgttgtgtgaatgctattgtcaatggaagcttttccggtttagttgaactcaagagtttataaaaaaaaatgtgaaatgtatagtgagagatcttgtgttataaaataatcaaacaactcattatggttggatattattacatcttgtttattggaatacatgtataaaagaaaaactttgtgcatataatattgcgtagttttatcttttaataaaaagaa

SEQ ID NO: 151039 - DNA, 374 bp, Arabidopsis thaliana landsberg
gaaaattttgactcaaatgagttgatgggtcaaatgatttgatgagtcaattggtttgataaataaaatgagttgggttgtaatggttaatggtttcaatggtttacccaattaacccatcaaattttgtaaaattgaattaaaccaactaaaatctctaaaccaatgccaatttaagtttaactaacacatctaaaccaatttaataaaattaatatttttccaaatttcttaaacatacaagcgatgaaattgagaaaaagtaaactcgtaaattttccaccaaaaaacataaacccgtgattttccaccaaaaaatataaacgcgtgattttcccgccaaaaacgtaaacccgtgattttcccgccaaaaa

SEQ ID NO: 151040 - DNA, 470 bp, Arabidopsis thaliana landsberg
acgtaataaagtcattgactcattgaatggcttttattaaatcatacaagacacacaaataagctcgaagtagaacattcagtttctttgtgttgaacttaagaccctagagataaagatttggatcggacaaccttagaacgggcgtggcaacaagtggattctttagctacaacacgatcccaaacttctactcgacctccactctctgtacttgcggaattttccaatcaaaagaatgcaaaaacgtagcgagattgtaaagaacaaccctctcgcccatagccattcccacgcgtatgctacgaccagacctaaacggtagataattgaagtcatttcctttgaagtcataagacatatccagaaacctgtcgggatcaaacttcagtggattctcccatacattcgggttcctatggattgcccacgcgttgatgaaaatctttgaatctttagggatggtgaag

SEQ ID NO: 151041 - DNA, 85 bp, Arabidopsis thaliana landsberg
acgacgtcgtttccagagcttaaggaattaactgatgttcccaggtcacaactcttgtatgctgtttcacttcctagctccacaa

SEQ ID NO: 151042 - DNA, 157 bp, Arabidopsis thaliana landsberg
tatttacactcctttactatcatttccatatctttatctttttctgatcaccaatttacttccttatctaatcataattgattcaataatagtgacatagcaaaatccgtgaaggcatatacgtacattgtacatgtgtacgtatacgattctgctc

SEQ ID NO: 151043 - DNA, 196 bp, Arabidopsis thaliana landsberg
cggtcggagcgtcgatgaacattcaggtcgtttagtaaaattcgatgaatctcccgcggaaataattagattcgatttcgatttccgtggggaagttttgtgccatttgatttgttttcgttcgtccccgttggagattttttgtaatttctggggacagaaacaatgtctaaggtagtgtacgaaggatggatgg

SEQ ID NO: 151044 - DNA, 377 bp, Arabidopsis thaliana landsberg
attttccagttaaaaccacagcctggtactaccgctagtgggaaaccagacaaatccggttgaatcatcataatcatcatcatcttattcaatctagaagattcaaaccaaagttaacaatacggtaatgattctttttcacaagagttgaggagtttctgattctctcctctatatacatgtaccatccatcatcaagaacaatctgcttttttaataatcaaattaggtgacaaataaaaaacgttttgatgttgaggttttgtcttttcaacatttgttgcttagatttggtcttttgagaccaatggctcgattttaggtaatgttggataatgacgaattcattatgaaagagacattgagatgtaccaatt

SEQ ID NO: 151045 - DNA, 464 bp, Arabidopsis thaliana landsberg
ttgtcatgaacattgacttgtattatatatataccgctttagaatacagagaatccaaaaacgacttattgtataaatcaatatctactcgtcagccaaaaccgttttctgtctccttgagtttccttgcagccgatcaatctcaccgtgcacaatctctttcaccagatctttgaagagaagcctgtccatgtcaagcactaaaccagggattgcatcatcaaagtctgtccatttctcagattggattgccatatcttcatcccatatacatttcaagaaatcttcttcttcttcttcttcttcctccaacaacaacaagttttgtgatctcttcttggcttgctttagtagtatctctatctttgaacatagttccttcaacagattttgtgcacttaagaccttctttctcgctttagcttgctgcatccatggatgtacatagctctcaacaaaagcta

SEQ ID NO: 151046 - DNA, 211 bp, Arabidopsis thaliana landsberg
tatttcatcttcttagacacacctcctatagattttatctttggagagagtgtagaggtacggctcctcccagtataagcgatttatgtctttgaagaacttctttctttcgtaccctcacagattcggaggctcttcacgtgccaagtagttgacataatcagcgtaccacggatgtttctcctctactgcaagcatctcatcccaaaac

SEQ ID NO: 151047 - DNA, 2099 bp, Arabidopsis thaliana landsberg
cttttccaaaacgccttctctctgtttttcttttgtatgtttctaatgtaccgatcattaatgggtactgcaagatccataatctcatttatgctcgtgctcttcttgcttttgaccatccctactcgagctcaaagaacaacaacggagactccaaaaacagagtttattttccgaggttttagcggaaaccaatcaaatattgtgacaacgggagctgcgacgatcaaacccgacggactattgaggctcactgaccgaaactcaaacgttaccggtacatctttctaccacaaacctgtgagattgctggagactaatacaagttccacaaactccacaatccgttcttttagcacttccttcgtatttgtcataatccctacaagctccagcaacggaggttttggcttcaccttcacgctatctccaacccctgatcgtaccggagccgaatctgcacagtacttgggagttttcaacaaagagaacaatggggatcctaggaaccacgtattcgcagtggaattcgacacggtgcaaggatcaagagacgacaacaccgacagaataggaaacgacatcggtctgaattacaacagtcgtacttcggatctccaagaaccagtcgtgtattacaacaatgatgatcacaacaaaaaagaagatttccagcttgagagtggcaatcctattcaagcccttttggagtatgatggagcaacacaaatgctaaacgtcaccgtttatcccgcgagattagggtttaaacccacaaagcctttgatctctcaacatgttccaaaactgttggagattgtgcaagaagaaatgtacgtcggattcacggcatcgacggggaaaggtcagtcaagtgctcattacgtgatgggttggagtttctcaagcggcggagaacgtccaattgcggatgttctaaacctctcggagcttcctccgccgccgccgaataaggcgaagaaggaaggtttaaattctcaagtcattgttatgatcgtggcgttatcggcagtaatgctggtcatgcttgtgttactcttcttcttcgtcatgtacaagaagagactgggacaagaagagactcttgaagactgggaaatcgatcatcctcgcagattgagatacagagacctctacgtagccacggatggattcaaaaagactggaatcatcggaaccggaggatttggaaccgttttcaaaggaaaactgccgaattcggatcccatcgcagtgaagaagataattccaagtagcaggcaaggtgttcgagaatttgtcgcagagatcgagagtttggggaaactaaggcataagaatctggtgaacctccaaggatggtgcaaacacaaaaacgatctcttgttgatttacgattacatccccaacggaagcttagactctctgctctacactgtaccgagaagaagcggcgccgttttgtcgtggaacgctcgttttcagatcgctaaaggaatcgcgtctggtttattgtatcttcacgaagaatgggagaagattgtgattcatagagacgtgaaacctagcaatgtcttgattgattcaaagatgaaccctagattgggagattttggactcgcgaggctttacgaacgcggaacgctatcggaaacaacagcactcgttggaaccatcgggtacatggcgccagagctttcccgcaacggaaacccctcatctgcgtctgatgttttcgcgtttggcgttttgttgttagagatcgtttgcgggagaaaaccaacggattccggtaccttcttcttggtcgattgggttatggagcttcacgcgaacggtgagattctcagtgcgattgatccgagactaggatctggttacgacggaggagaagcaaggcttgctctcgccgtcggattgctctgttgccaccaaaaaccggcgtctcggccgtcgatgagaatcgtgcttaggtatctaaacggagaggagaatgtacctgagattgacgatgagtggggatattcaaagtcttcaagaagcgaattcggatccaagttggtaggatatgtttcgtcgacctcaatcaccagagtttc

SEQ ID NO: 151048 - DNA, 200 bp, Arabidopsis thaliana landsberg
aatggtgagaatcagccacatcagcagcctgaaggactagcgagtggatccttggatcttttaactatgcttcttaaggcaagttatactagctagattttcgtagtacgcaattattttttatgctaaatggacagtatttgtgttttgctgactatttttctagtcatatatagggtgccccaagtgatatagtgaaa

SEQ ID NO: 151049 - DNA, 402 bp, Arabidopsis thaliana landsberg
cgcacaggaagtcctttcaacaatggcccgaaacaaactgagacggagctatacgggcaaaaatcggctggcaatgctttctcactctaccaagctcctgatgaagccatgtaatatttagtaaagtatcagtctaaaacacagcagtaataaatcgaagtacgagccaagaaacataaatcttactgttgatgacattcaagtgacatacttaatgtccaagaactttgggttttaagtgcgcgaagtttcgatatgtttcgaacatattgacgcttttctaacttgctttgctgtttcctttggaatcctgcaggtttcttgatttgcactaaactcggaacataagagcacacaagtgggcaacgtcttttattaaccggttctccgagatcaacttga

SEQ ID NO: 151050 - DNA, 401 bp, Arabidopsis thaliana landsberg
gatgttctgcttaacacatttaaattgaaaacgtctgcaggatcgcatatggtattcttcgtcttgaatgtgatagtagtggtcggagtagctctgacattcaagccatttctaacgacgggtcgaagatgaaattcatttgaattggtaagatagggaatgtatggacaagttgattcttttcatttcagatacgaaagaaaccggtaataaaatttcactaaccttaggatttcagctccttctattacttgtccttttgttttgctttgtctgattattatacaccaaaaccgctttcataatcgtggatcccatccaaaagtgatgtattaatcggttaacaaatcgtatggtcagtcaatacggcagtaaggaaattagaagatgagattgagagg

SEQ ID NO: 151051 - DNA, 358 bp, Arabidopsis thaliana landsberg
cgaggccatcaacaatggcagtattattcatcaagcaagcagagcaatatgcagcagcccgacccagttaccccaccaaactcttcgaatatatggcatcgaaaacaccgtgccacgaccttgcctgggacgttggcgccggaagcggccaagcctcacgatcggtataatagtgttgttcaaatctccaaataactcatgttagtctttcaatcttgattcaaaattctatatcattttaatcttgtccttcttttcagctagccggaatctacaagaacgtaattgctacagacacgagctcaaagcaacttgaatttgctgcaaagcttcccaacgtccgttacgagatcactcc

SEQ ID NO: 151052 - DNA, 81 bp, Arabidopsis thaliana landsberg
cttcttccaatacgttggttcttcttcctttgtcctgcgccgcgatctctccttctccaacttccctcgtcctgtccaaag

SEQ ID NO: 151053 - DNA, 189 bp, Arabidopsis thaliana landsberg
aggcaatataatacaagccgcttcatcattggaactcccatgtgtcctcttttcaagttttgagcatttctttaagctttttataactagagtcacttttattaatttcttttgaatgttcttctctactgttgctatactattctctaattattcacaaatagttattattagtgttttcaatatatt

SEQ ID NO: 151054 - DNA, 105 bp, Arabidopsis thaliana landsberg
cttcttccttttaactttttattcttgtacttaaatcttttgtatttgtaaatatgaatggcacactttttgtgtgttgcagtaattacaaaaacattgttgctt

SEQ ID NO: 151055 - DNA, 909 bp, Arabidopsis thaliana landsberg
acccaaatataatgaagaggtttcaagttgatagaggtgccataaagtttgttctgtctggtgcaaacataatgtgtcctggtcttacatccccgggaggcgttctggatcaagaagtcgaggctgaaaggccagtggtatgaataaaaacagtatttccctgggttgcatttttgtttgtatatgctgatcttaaaccatgaatctgtatttgtttaggccatatatgcagaaggaaagcaacatgccttagcaataggcttcaccaaaatgtcagcaaaggacatgtaagtcaatttttcgctggaatttatttgaaaatacaaacatgtgctttgatatactttcgtatcttagccaaaatacagtctcttggctccaggcctctccaagtaaccctatctttgtcactttattgatattccttcttcccttagatacacatacctgcaccaggatcaattttggccgtgtttcccctgtttgctcataaaatttctttcgcatcgctaaacttttcttgtgtatgttcacagaaagagcattaacaaaggaataggagttgacaacatgcattacctcaacgacggtctctggaaggtaccaatacttgtctctggtttctctattcgtagtattgccaagcagtctcattgttgatataaaaatcgattttggaagaacacaaatcaaaagtttctgaaatttgtattgcagatggaacgactagactgaggacaatgtcaaatgtgaatcagtgtcggagagatatattggtctccttttatgttctctctaaacttatggagcttttgtccggatcaaccttagctttggtttgatttgttttcaaacatttgatacttattttatgagggaacgtcaaccttagctaaggtaacagtttct

SEQ ID NO: 151056 - DNA, 691 bp, Arabidopsis thaliana landsberg
atcaaaattcacaccggcgattttgagattgttctctgattggcttaatccgagagaatcaaggaattgaatggccagtgaatcagatgcatcgagcattgctactctttcctgtgctcgctgcgagaagcctgcacatcttcagtacgtatttactcttcttcttccttttctctatttgacttgcatagttggtagtcaatttagctccaaagttcgagtttttaatagatgatttcgataactgttgcttttagtatatgttagaggaatgggatgctgatgttcacatggattcatggctttttaatatgcgtagtttcattatttatggctcttgattcgaattgaactcgcaggtgtccgaaatgcatagacttaaagcttcctcgtgaacaagcctctttctggtacgtgtctggctttaaccttttttgatttggtgagtctttagttcttaagttttgatttttcgttcttatgtctaacacagcactcaagaatgtttcaaggcagcttggagctcgcacaaatcagtacatgtgaaagctcagctgtcttcaatcggtgatcagaactctgatcttatttctcaaggctggctctattgcgtcaagaaaggccaggctagaacacctaagcttccacactttgattggactgggtttgtaaccaatattacctcagtgtt

SEQ ID NO: 151057 - DNA, 391 bp, Arabidopsis thaliana landsberg
aagaaagagatcgatgtcgaccttggaatctccattagaggcgttggcgtttgaatacgctagcttcggtgttttcgcgcgtcgcaacaacgtctggacatggatcgccgtcgtgactgccgccgtcagcttctggaggatcagagtcacaaccatcggagtcggagacggccatgcatgtgtcttgatagaagaattaaccggttctaaatctgaaaacgaatccggtcgtctcgaaccaaaatcaataaccggtccggtcaaagaaacggttgcacgagtgaaggaaacggttacgaaaacggagccgttaatatgcgatgacggagtgacaaaggggaagctgacgatgtactacgaggtagacgttgacgttgacggtgggaggtgt

SEQ ID NO: 151058 - DNA, 277 bp, Arabidopsis thaliana landsberg
tgtttccaatgtgagagagaatgttccaagtctcatattttatacatattgcattgtgcttatagtcagagcttgtccctcacaaacattccattactgttttctctaccaatctaaacaatagccagaactgctcattcatattcataataattaccaaaagagattcaaacaaaaccactcatcagcattggatctaaacttcatcaatcgataaattcttggctgctcaattcaatcctcttctcaatcggactactcatcatcttgatactct

SEQ ID NO: 151059 - DNA, 601 bp, Arabidopsis thaliana landsberg
tcagtatgcggacatctgccacatgaagagtgtcgcaaggcacttcttgcagccatgtgcccattcataagcagacttgtatttagtgaggactgagtgactgagtgatcactgtacttagtcaggagtgagtgcctgagtgatcaccttctagttgtcttctgagctcacaatcgattagtgtttgcgagttttttttgtctgccccaaaaggaaagcagttggggtcattgaggtcttagtaagtctgtattcattataagcagagttattgtaacattctctgtttttctcatcagagtttttaatggtttggaataattctgtttattttccacttaaaagaagagtggctaaatctttgtaaaattctgcggtatagaatccgcgcagtttgaaaacgttattttcttcgtgtactcctaaatgtcatgaaacttgaaggtctctgaagtgtgatcaccaaagaaccgaatagaaacattaaaaacacagcaactaagcaggttcttaaacttaacgttactcactcaaactaaacgttaggacgacaaatgagatacttcttgcaagcagaaagaagaaaagtgtaggaagagag

SEQ ID NO: 151060 - DNA, 366 bp, Arabidopsis thaliana landsberg
agcaaataaatcagtaattatgaaagtggtaaatggtttcttaaatagttttaagtccactacaaaaaagaagtccattagtttttggattcgtcttaaataaaaacttgggctgtttaaatcaataaggcccattcaacgggccattataaacaatacttacaaaagaaaacagagttaggttccactagtcctctgcaactctcattcaagaacttcccttacaaagctctgaaaataaaattctacaatttagagacaaatgaatcaaaaagataaaatggattcagaagagtttctctatagcgtcccaatcaatctccaaagaaggatacttgtgcaaacccatcaagaaactctcatctt

SEQ ID NO: 151061 - DNA, 621 bp, Arabidopsis thaliana landsberg
  unsure (1)..(621): unsure at all n locations
tgcgtcacacgggattgatttccctgaaacggtgccgtttctaccacgaacagctataggaatcacttttggcgcgtcggctatgttgtgagtaaagcgcgtgtaactcaaaccatgcccgaacgggtaaacaactggaccgtcgtagaactggtaagtccgacccgggatccgcttcgaatggagcggccgcatcgacatttctgtcattggtaaattggttaaataatcttgcggataccaagtcatcggaagctttcctccgggattagcactgccgaataagatatcggcgattgcggtaccaccttcctgacccggatacccggcccaaacaatcgctggaattttccgatccttctcagcaaaagatatatcgataggcccaccagacatcaatactaagataactgggcctttagcggccttagcaactctagagacaagctcttgttgtttccaggcaaaagcaaactgtttctgtccttgaactccgcttcaatagactgatcaaacccatcacaagaaccgtcgcannnnnnnnnnnnnnnnnnnnnnnnnnnnnnncgaacaatctatcatccatgcagtgtacgtccacgcaacccttttgatgaatgg

SEQ ID NO: 151062 - DNA, 176 bp, Arabidopsis thaliana landsberg
gaaaatcacaaaaggctcaggcttgccataatcgccgccatatccttttggttttcctcggcctcctttccaagacatggacccaaattcacggcttgagtggtgctgcgatatctcacaaacaagatctaagttagatatgagccaaaccaaaacccaacaactctatcttctcc

SEQ ID NO: 151063 - DNA, 565 bp, Arabidopsis thaliana landsberg
tcacagatctttgggtatcaagtaaaactgtgaagtgatgtcgggaagaggaaagggaggaaaaggattgggaaagggaggagcgaagaggcacaggaaggttctgagggataacattcaaggaatcaccaagcctgccattcgtcgtcttgctcgtagaggtggtgtcaagcgtatcagtggtctcatctacgaagagaccagaggtgtcctcaagatcttcctcgagaatgtcatccgtgacgccgttacttacactgagcacgctagaaggaagacggtgactgctatggatgttgtttatgctcttaagagacaaggaagaactctctatggattcggtggttaatccgatttgggggattagggtttatgcaagtttggggatttcttcttgtttctgagatccgtgttaaatggtttgaattagtcaaaagtaaattcaggagtgttagctactgcttttgttttctattgtgatgtcgttgttagccaatgcggtgtagttgaaaatctttgcaaacttaaagctaagaaaatctaatgaggatgcacaatttactcg

SEQ ID NO: 151064 - DNA, 620 bp, Arabidopsis thaliana landsberg
attattacggagatgaaattgatttattattttaacacagattattttaatacatgcaaattcaccatcgaataacagagaagtagattgaatcttcattttcaaatttaatggattataaataattttgtagaggaaaaacaaaatattttctgttattacataggtgaaaaatctcatatagacatatagtatttaagaactctttttctcaaaagcctgacgtatcactcacacattcaacctcaaatgaattgacaaaaaacatcattcatctttaatacttattgacggatatgtcattatcaagtatcaacctatttttctatttatttataatttcaaaacctataattatcaacatagagttttggaatcttgaaaccggtgaatgattcgtccttgctcctatgtgatgacgagtggcgccggaggaaccgtaggctgtagcggtgaacaatcccagtctttaccgtctttgaccactaagaaatgtttgggaacccatgactcaccagaagcctctctctgttttaaagacgctctctgcttctcctccacaactatcttagcttctcttgctctttcccaatctttcttcagtattccttcacttactt

SEQ ID NO: 151065 - DNA, 318 bp, Arabidopsis thaliana landsberg
tacacagcagaatattttatcgcattacaaaacgaactaacatctttatctacagaattgctatgtctctacttcttcctctacttaacaacttgaacagattacaaaggtaacgaacatatcttaaagacctggttcgagcaaccaggtgtacaatcaggttcgagcaaccaggtgtacaatcaggttcaaaccgaaatctagaccagaaagttatctcaacacataaatacaactgtgttacaaaatccatgattctaatgaagaagcagtcaggattttagtaactaacctgagcaatttcgcttagccaaaatc

SEQ ID NO: 151066 - DNA, 364 bp, Arabidopsis thaliana landsberg
gaaccaagagtcgccaccaacttattttcgcacaaacaaatttacttctgcaatccattaaattgttgatgcgtatgggtaagtgtctttctggagcttttgacgcagtttaagaaacgggaaattgaagatagcctttgaattataagaaaatgtgttgtagactgcgttttactcttgtcacagtttcctatgaactctactctgcagtgtggccaagtatcaggaagccaatccaggtgtattcaccattgttaccttccccttccttttcgctgttatgtttggtgattgggggcatggaatatgcattctgcttgcaactatgtacttgatattgaaagaaaagaaacttgccagccag

SEQ ID NO: 151067 - DNA, 115 bp, Arabidopsis thaliana landsberg
gttttgtgtttcagcattaagcgtttatcagctcgaagcaatggagacatgggagcaacatgcacggcgtgcttacgagttgtttgagaaagacgggaataggcccatcatgatt

SEQ ID NO: 151068 - DNA, 147 bp, Arabidopsis thaliana landsberg
aaaagatcaacaacaaaaaaatgtcagacaacaatccagatatcgaatcatcaaccttcaacaatctaaacatcgacgtcacagaatcaatcctgtatcatctcccaatcccttccttagtcccgttcactctcgtctccaaacaat

SEQ ID NO: 151069 - DNA, 295 bp, Arabidopsis thaliana landsberg
acaaatgaacagagcttctagggatttcacctagctcgccagacgcagccgtattcacaaacaatgccacaacaacaccggtggcaccagcaggaaagtctccggcaactccagctacgtccacggataagggaggatcagcttcagcaaaggatggtcacgcagtcgttgctctagccgtcgctttgatggccgtctcctttgtcttgaccttgcctagacatgtcacattagggatgtaatcttttcttatgaagttggttggtgcttttgtttttgtcccttttgtttcaaa

SEQ ID NO: 151070 - DNA, 413 bp, Arabidopsis thaliana landsberg
atgatctatactcataagtgataagttccacagataaagtttatacatcataaacacaccaaaatatcaaatgttgataagcaggaagaaaaccccttgaatcagaacttaaaagttccaacaaaaattcaactttatatatgtgtatatagatatggtattcaagaaatagagtgtctccgatcttttggtggtttggttctgcctctaccgttgtatggtgtgatgctaaaagggtttagcttaccgagtttcttggaaacagagtttatgaatgactttcttggcaatggaggcttacccgtggaagcagttgagattggtgaacttggattcgtgctgatggatgaaaatgatgttttcttctcactctctttctcaaactcttttagcttcattttcattttgagaag

SEQ ID NO: 151071 - DNA, 618 bp, Arabidopsis thaliana landsberg
aagtaatctaaatcttgcaggtcttggaccttcgtgtctttgatactggagagtatgcacttgtaagtcagtctccacacaaattgtttatcctgtttcgtaagatgagctaatggattgtgaattttggagactttaggttggatgggttggtatccccaccgcaccagcttggctcccaacagatatgctcatcaaggtactcataattttctcagtacatgaacaataagtagcattgtcttgatgtcaagtcatgattgttttctgtgttcttggttccggttccactgcagtgtgagaaacttgtttacgagcgaatgtagagccaagaaggttccaacaagaatcctttggaatgcaactgatataccaaggattgtgttaagctgagatgaacgataacaatggcgcaccatcatgatcatgtgttcaagagtttgacaaagtatcaacgttacaattagttacaaaaactgttgtggagtgtggaatatgtcatcagactcctataataagaatgcagcttcagtaaacggatgatggtaattttatctcatcgatctcccaacataaactcatttctcacagcttcataaaatttcctctggttttgtc

SEQ ID NO: 151072 - DNA, 448 bp, Arabidopsis thaliana landsberg
ggctttgcacagcttgtctaaagaagcaggattttcacctgccacaacgggtgagctcctcaaagaaatttgttctttctctagttatttgccagttcacgtattatttctaaaaccaggctttatgtcttgcaaattcaatttttcccctttgtaccctctgttttgttgtagcaggtccaagtattttagatggttctacgtcttctgcagcatggaaacttcattactatgagtgggctatgcaaatttttgaacggtacaatataagtgaaggagcttgtcagtttgcctatgcagcccttgagcaagtagatgatgcctataatttcatagagatgactgaggaattcgatccaactaaagcagccacctaccctagagcacgactgtgggcaaatgttttcaagttcacattagatctcaatctcttgaatgatgcctactg

SEQ ID NO: 151073 - DNA, 139 bp, Arabidopsis thaliana landsberg
tgcggaaaatcaaagagttagctcagctccgatcactctctccgattatctttcgctctttagattcatggtgaatcgtttaccgtcactctctcctcgtaaaccctagctctctccgaaaccctaactcgctgcgttg

SEQ ID NO: 151074 - DNA, 428 bp, Arabidopsis thaliana landsberg
gatgataaatgcaggacataaaacttgctgttcatgcacatccaacactgtctgaagttgtagacgaactgtttaaagcagccaaggtaaaatacaagaatctacatttgcattctctaatcaatagacatcgaatctcgattaaaaggcaagcaactcctgtctatatcaatttcaggtcgatagtccagcttcagtaacagcacaaagtgtgaaagttactgtgtaaacatgaagaatttaagagcagcctgtaacaaaagttttgtggaaaagacatttgtacttcaccaatattcatcaaaggacgaagattgcgtctctagtttcatcacgtatatttgtttcatggttttgacaaactgtatctttattagattaaaaaaaaaaacagattgtgacagacacaaaattaaagtatatttatt

SEQ ID NO: 151075 - DNA, 1752 bp, Arabidopsis thaliana landsberg
gaggctgacaaacaaaatcaacagaatggccctgctaacattggtgctggagatgcaccacaggaccaccgtcagaggaaaggaattgcgcctcctactatccagaacaacaacttcgagattaagagtggtctcatctcgatggtttgccaatggaggatccactcgaccacttggatgaatttgataggctctgcaacctaccaaaaatcaatagtgtcagtgaagacggattcaagctccggttgtttctattctccttgggcgacaaagcacacatcagggaaaagaatctgccccatgactcaaacaccacctgggatgattgcaagaaggcttttctggcaaagttcttttccaatgccagaactgcaagactcagaaatgagatttctggtttttcacagaagactggtgaaagcttttgtgaagcatgggagcgtttcaagggttacaccaaccaatgccctcatcatggcttcactaaagcctgtctgctcagcactctttacagaggagttctaccacgcatcagaatgcttctggataccgccagcaatgggaatttccagaacaaggatgttgaagaaggatgggaattggttgagaacttagctcaatcagatggtaattacaacgaggactatgataggaccatcagaagcacagctgactctgatgacaaacacaggaaggacaggattctttcttcgccagcagaagcatgtgtacttccttgttgatgacgagcagtatcaagtccaagatgggaagggcaaccagttggaagaagtcagctacatcaacaaccagagtggctacaaagggtacaacaacttcaaaaccaacaaccccaacctctcctaccgcagtgataagtgtgtattttgcatgttttgagaatccatttgtcatcactttagcatcatatcatcactgttttataccatttcacatcatttgtcatcactttgcatgtttaggatagttttgcatgcatgttgcatatttgcgttgatttcaggtgatttggagctgttgacgagctatctggaagaagcggacctgatcatgacaaaccactcgaccaagaggtcgagtaggagcttcaagatctcaagagaccactcgacccctaggttgagcagaggacatcaccacttcacttcaccactcgaccacgaggtcgagtgccctcatctccatcaccagaccatcactcgatcacatcactcgaccatgaggtcgagtgtcttcacctccatcatcagaccaccactcgacctcatcactcaacctggaagtcgagtatcttctgacaccactcgatcatataactcgacccccaggccgagtgacttcatcccattgccaaacctctactcgagctcatcactctacctggatgtcgagtatcaccatcaccaccacttgactgcatactcgatgaaaagcttcagagccttcttcattccgcacttaaccagacactcgagcacaaggaagaaaagaagactccagctattcacttgacctctcactcgaccacgtgggtcgagtacagttcttaacccgtcccaatacttcgtcgttttgagtattatggtttcgggatatttggctataagtagcatgtacttcacattttcgcagacaagaagtttttatctagttttatttccgcagaacttgtgttctagactttttgtaatccggatttctctttaccccatccttattgagcatgtcaat

SEQ ID NO: 151076 - DNA, 105 bp, Arabidopsis thaliana landsberg
agtcgtttaaaccggagaacattgaagtccgggaagtaaaagaagtgcaggttcagagaaaagctggttctcctgattgttcttatggtgtaaaagcagattttt

SEQ ID NO: 151077 - DNA, 132 bp, Arabidopsis thaliana landsberg
agagtcagtattttctggacggatataagacgttgccgtttccgtttgagagcgtgggtttgggctcatttggaaagcccatggaactggagatgaagaaaacggtgtcgtttgaaggattcttgcggatgc

SEQ ID NO: 151078 - DNA, 292 bp, Arabidopsis thaliana landsberg
agcgtcttttaattttgatgtgtgtatcatgtgggcgcgcctggacctttcccgccacatattgaataaatgccctacagagattttcgttgctctgcaattgttatcatcagctgtatagcctgtattgcaatggatgattaccaaaatgccacttctctccttgttgctatgttgaacaacataatgtgatgtgttctaaaagcatgtgccatgatttcagatttaacatcagggaagcaagttcactccctgtgccacaaatttgtatctttcttccactgatgtcagt

SEQ ID NO: 151079 - DNA, 746 bp, Arabidopsis thaliana landsberg
atcatatcttgcctaaagtgatcacttcatgagaagctatcttgatcagtggaatgagcttgaggttattgatatccaagataagaccaaacatgtatgtgtattttaatcttttacctttctctgtttttactgttttaccttctctgttttttcagtctacactgtttttatatgtcagataattttttttaaaaatgaagtagttgttgattagtgattttattaggaatgattatttagaaattctctgtttttaagtaaagaaattttacagtttctgatagaaactgataaacaaactgataatcttatatggatgggtgtatagtagtaaataattgagaatatttgtcttcgcttatatccaagaatatttgtcagatttgcttttgtttatttatgtgtattttgagtatttttaaatgtttttttttgggtgggtttcagatggcatttttatcttcactgacacaaatcgctgggaacttaagaaaaccatttgttgaagaattcaaaactgcattcttcaagcttgttgttgggactttatccgttccgatagatcttccgagcacaaattatcgttgcggaatccaagtaaaaatactcgattcgacctcactaagaaaatttaaatgagaaaaataagagaagctgaacttttatcggtttctaatcaggcaggaaagaacattgacaggttgctaagagagcagatgcaagaacgtagagattctgagaaa

SEQ ID NO: 151080 - DNA, 495 bp, Arabidopsis thaliana landsberg
gtcaatgcagcttcttcttctttttttataacaatttgggttttacatttgattcttcgatctacaaatagaattcaaaagacgtgtatgtttgataaattggaaaattcggaaaaccgaagacagcgatcaaacgaaagttaaaaactagtgtataatgtttactgtctcaaccagctttagaagttcttactacttttggcagctcaacagaatcaaggtcaccagggtaaggagtccagagcccaaagccgcctcggctttccttcaaactctctcccttccctttgagttcctgaagactcttgacccactcaatcttcgaggaatgctctcgaatgtgagggtgcagttcgaagagagagttatactcacagttctggaacatgaacaccttgaaggctccttttagtctgtccactacatacccaaagcttagctggtccctcggtgttaacaggtgtacctcattgaaccacaggcagctgaacagat

SEQ ID NO: 151081 - DNA, 355 bp, Arabidopsis thaliana landsberg
ttgcaagcttctctctgaatgtgaactctgatgaagatgcttttttcattacgactcagaaaaaagatttacaatttagctttgctttgtggttccttgaactttcctattacaaaatcttctgacaagtttatttaccctctaagtatgttaatagtcatttaaactcttatctgattaagtaatttcgccatgttgtgattgtgaagtcccagctgcactttgggtacttttgagtttcttgctactcttctgcttaagtatctccttgatctctgcttccctcttatccacaacttttatcaattccttgaaactcggtgctcgtgaacctctccctgatcgagatggctca

SEQ ID NO: 151082 - DNA, 250 bp, Arabidopsis thaliana landsberg
caagtttcgtgtagcaggtgccaacaaaaccgcattccaacatatgaatcaaagtgcacaagtaaaatgtgaccaaagccccgaaagcagtgggtgaaatcttcgattgcagttttaccaaaactatataaaaggtagttttttgtaagttctacgtacaatcacaaaatccatcgacatatcccaaaaaaaaaagcagaacaataacgaaaacggaaaccaaaaaaaaaattcagataatgtttgcccc

SEQ ID NO: 151083 - DNA, 383 bp, Arabidopsis thaliana landsberg
ctcatggagaatcaaggatttagctatagtaattgtcgaatgctggtaaaggactgtaatcacaataccttgtcttgacccccgacatcccacacggtaaagctaatgttcttgtattccacagtctccacattgaaacctagcaagaacaggtattgtcaatacgacagatctaaaaaattcaagcactcattctatgaatcatacacaaaccatgaatcaaagatgaatgcccttgagcaagtagaagtacaccgcatgcaaaccaaatgaaaaaacttgcaactatatattcaagttccaatctaatctaggaatccaaccatgatacgaaaaattcaacctaagcccttgagatgattgcataacaatgtgtcaatttc

SEQ ID NO: 151084 - DNA, 222 bp, Arabidopsis thaliana landsberg
gtgtctttcatgtgcagcttctggaattgtttggctaaagagattcattctcagatccggttcttgttcaagcatctctatgttttctaaaattggttagcagaaaacaaatttgcctcaaaattgttaagtctcacgtaggctattattctacaacattttgttcacaactcaccacaaccttgtgtgcatatgaaactaaactcaaaccaattttgaata

SEQ ID NO: 151085 - DNA, 1143 bp, Arabidopsis thaliana landsberg
ctaagccatgaaatagtcgtaaaggcgctttcttattctttgctagtaattggtttcgacgacaatcgatcgtagagaagtctacctcgtagacatctctctcacaaatccaattcaattaccattgtttgttattatctgatgtcgaatatgcaattctgtcgtggttttaatccctttgttatcctcttctgtctcgccgtggttgcaccaattatatcggctgatgtcgctatcttgagaacggactattaccaaaaaacatgtcctgatttccacaaaattgtgcgtgaagccgttacaaccaaacaagtccaacaaccaacaactgcggccgggaccctccgtctctttttccatgattgtttccttgaaggttgtgatgcatctgtcttgatcgcgaccaactcgttcaacaaagcggaacgcgatgatgatctcaatgattccctcccgggagatgcttttgacatcgtcacccgcatcaagacagctctcgagttgtcttgtcctggtgtagtatcatgcgcggatattctagcgcaggctacacgtgaccttgtcacaatggtaggaggaccttactttgacgtaaagcttggtcgtaaagacggattcgaatccaaagctcataaagtcagaggaaatgtcccaatggcaaaccagactgttcctgacatccacgggttattcaagaaaaacggttttagtcttcgcgagatggtagcattaagcggggctcacaccattggattctctcactgcaaagagttttccgacaggctctacggatcccgtgctgataaagaaatcaacccgcgattcgcagccgctctcaaagatctttgcaaaaaccacaccgtggatgatacaatcgccgcgtttaacgacgtgatgactccaggaaagttcgacaacatgtacttcaagaacctaaagcgagggctagggcttttagcgtctgaccacatccttattaaagacaacagcaccaagccgtttgtggatctatacgcaactaacgagacagcattctttgaggatttcgctcgtgcgatggagaaacttggcacggtcggcgtcaagggcgataaagatggagaagtgagacgtaggtgcgaccacttcaacaatctcaacgtt

SEQ ID NO: 151086 - DNA, 272 bp, Arabidopsis thaliana landsberg
ctgggattgcatagttttgcaactgagtttcgttctggttaacaccggtatagaggataatcggtccttttcccggtacgattgttattgaaccggaccatgtacctccgatgtcgaaccattttgaaggactaagagccggttcaagagcctcccagttaaccaagtctttagaaaccgaatgggcccatataatattaccccaaaccgcacctttggtgttatattggtagaagagatggtagagacctttgtagtatactggacctgtt

SEQ ID NO: 151087 - DNA, 250 bp, Arabidopsis thaliana landsberg
agaaacccatcgtttctctggaggaatacgacgccggttccttcgccgagagttgaagtcaataataaggacggtgaaggaacatcgtcagttcatcatatcggtacagttggttcaactagcggttcccttaggctaccggtttagtgttcggtgatgttttgtacattgttcataaacacgcaatagattttgcgtaaaaatttaaaattgtttgtctttttctgtaagatatttaaatcgacaatcc

SEQ ID NO: 151088 - DNA, 947 bp, Arabidopsis thaliana landsberg
taaaatgaatatattttcatataacattgaactcaatatgtagagttatagagattatttcatcgattttgagccgtagataatgatgatttaagcttcgtaaatcatatcatggtaattttatcgactcaatagtcttctttccatcatgaggtcttccaaaaaaaaacttcaagtagtccgaatacacaatctttctataccgagccatctcattgttcttatctaacacctccggtaacggctcaataaccgaatcatgaaccggtccgcagaaaaccggaatggaaacccggctacaatacttattgaccaccacacaatgctccacgctcctatacctatcattgctcaatatctgtaatacatctccgatattaacgacaatagctcccggaattggagggacatgaatccatttgtctccatcctcagtggctcgggcgtaaagactgcttaatacaccatcttcttgtaggaggagagtgagagtgttgatgtctgagtggcgaccagttcctatggccaggcttggctcaggacatttcggatagtagttgaagttcattctcattgttcccattagggtttctttattggactcatcgatgattgtgtttagattgttgatgagtatgtttaagatcctctctgtgattggtttgatccttttgaaatggtctatcacttgttccctacacacatttattaattttaaacactacttatgttgttacttcaaaacactaattatgtacttagtaacacagtaactatacttacttgcagacagaaggccacgtggcagcgaagtcatgtcgttgaggaagatactcaaacttgaggaaatctctccattccaaaacactttctatgcaaggattgaaacttgtggtcaaccacgccgtctccgacactgaactccctctccaataccttcttctctc

SEQ ID NO: 151089 - DNA, 910 bp, Arabidopsis thaliana landsberg
ctgtccgtgagttgtctgtgattagatgtttttattgttcaatattgactcttctttcttttatataatgaataatgtaaaaaatttcctaatattcgtctaccttataaattagaagcacaacactctctcctcttcacaaatctcacatcctcactcctcagctcctcaaatcagaatgaatcaatccgcgcaaaattacttttccggtaattatcttcaattgttttctaaaatcatgatcaatgtctaacgtataatcatgatgaacaataattctttactcaccaactagataattttttttttttttggcacagtgcaaaaaccttcagagacttcatccgggccgtacccaagtccgccaccaattggttatccgactagagatgcggtggtgggtgatcctccggcagcagcagtggagacaaactccaagggcgtcaacctcgaaggcataatggattgtatcttctgctgcggcctatgctccagcatctgtctatcagagtaaatcagcatgatgagacagaagtcgttgcccaaacctgaaaaacaacacgtgatagaaaatctatatatatatatatatatatatatgttatagtagtcgtttctatggatttccacgcattttaaagtttatttgtttcactgtttaaaatgaatcatttgcttcgtgtattacatcactatatacataacagaaattaaaaaccaaatagctagtcataactctttactactcaaaggaaactgtgttttagtgttcttaattacatcttgtttctgaccaacagtgaatgatccttgcatgggactcattaacttcaaaattaacgatttcatacaaattattgttgtaagaaatagataaaaaaaatgtttgacgatagtgaggaattaagga

SEQ ID NO: 151090 - DNA, 421 bp, Arabidopsis thaliana landsberg
tcatcaacaaggaagtgcacatgcttctgctggctaagaagaatcctgtccagcttgtcattcagcgcattgatatctttcctgtgtttgtcatcagagtcagctgtttctctgacggtcctatcacagtcctcgttgtaattgccatctgattgagcaaggttctcaaccaattcccagccttcttcaacatccttgttctggaaattcccattgctggcggtatccagaagcattctgatgcgtggtaggactcctctgtaaagagtgctgagcagagaggctttagtaaagccatgatgagggcattggttgttgattctgttcttcagccatttcgagtggttgccgaggtacaaggttgactgtgtttctccttctctgagttcgcgagctatgcggtcgatgttgtcgttgaaaa

SEQ ID NO: 151091 - DNA, 309 bp, Arabidopsis thaliana landsberg
gttaaagaatctgaaactgttcactttttgtttagtgattgttgattgtcacatcaaacaacttacaaaggatcactttgattcaggtacaaagtcatttccatcaaaagaaccaaaaaaaaaaagaagcaatcacaaagataagtagtaaatcactcatcggacaattgatcccaaacattgacgatgagccacccttcaatggctgcagcctcaagttgttcttcaggacctgccttctcccatttggcctcaatcgaatccagctggcccaaatcagaccacaatactctgtgcgctaattctctt

SEQ ID NO: 151092 - DNA, 1023 bp, Arabidopsis thaliana landsberg
attcactaataataattttgagtctctcttctctcttctctctctcttatatctcaaaatccgagaaaacgaggttcaaagatccgtggttgaattcgtgattctgaaatttcgtttcttcaggtctctgatcgtcctggttctcctctgatctgttatttgcttcgaaatagaagtttgtttctcgtttgacgatggagactgcgactggagaaatcaccatcgtctgcaaccactggtttgtttcccccctaaaaccattgatttctctgtctgtggttgttgacttgtttctatttgatcatagtttttttcggcgattggttgctttctctttgttgcgtaatcgttcgatgatgacttgtgtaattcgatattctggactcgaggttataacaattttggaattgatcggtgattgcaattgagaatatatgtgtcacattaaagatactcgtgagctgtatgattcagtttggttccacggtttgtgtcggtgattacaagtataactagggattcgatggatggattagtgatatacaatctttttttctaaaagagttcatttttatttggtcacctactaaaaggttgattcttttttgttactttgcttaaagtccttcatgataaatctattgattatgtatcagcttcctggtgtctgtacaagagttttattgtcttctgtttatcgtcatgctttctacgatttgtctgattgtttgcttagtttctaaactttctaaagatatctgtgtatgctttgtctagttattgttgtgttgagtctgctgaggctggaaatttttgaatgccgtaattcttatttgggatcagtaaatctaatcccttgtgtatgttcagtggtagcatctacctggatggttgatcccatgagactgattatcttaatgttttcagtgacagagacattccatcactgaatatcgatctgcatcgtgtacattgtgctcgaaatttagaaaaatgtaagatttgtggtgatatggtacccaa

SEQ ID NO: 151093 - DNA, 95 bp, Arabidopsis thaliana landsberg
tgtttttgttcttcttcggattttctatttctttaatcatagtaatgttacaaataacatatcatttgagtcatcgtaatgttataaaagacact

SEQ ID NO: 151094 - DNA, 1022 bp, Arabidopsis thaliana landsberg
atctcccttcaacaatggcggaacaatctcaactcaagaatctcaccatcatcctcctcctcctctgcttatccttccaatcactatccttcgccgccgaatctcacctaaccgtcgatttctactccaaatcatgccctaaattcctcgacattatccgcgaaaccatcaccaacaaacagatctcaactccaacaaccgccgccgcagctctccgcctcttcttccacgactgtttccccaacggctgcgacgcctccgtcctcgtttcttccaccgctttcaacaccgccgaacgcgattcatcaatcaatctctctctccccggcgacggattcgacgtagtaatccgagctaaaacagctctagaactcgcttgtcccaacacagtctcttgctccgatatcatcgccgtcgctgtacgtgatctcctcgtcaccgtcggtggtccttactacgaaatctccctcggccgccgcgattcacgaacttcgaaatcgtctctcgtctccgatctcctcccgcttccgtcgatgcagatatcgaagctcatcgatcaattcagctccagaggcttctccgttcaagaaatggttgctcttgttggtgctcacaccattggtttctctcattgcaaagagttcgcgagtcggatctttaacaagtctgatcaaaatggtccggtggagatgaatccgaaatacgcggcggagctgaggaagttgtgtgcgaattacaccaatgatgaacagatgtctgcgtttaatgacgtttttactccagggaaatttgataatatgtattacaagaatttgaagcacggttacgggttgctccagtccgatcacgcgattgcgtttgacaacaggacgcgctcgctggtggatctttacgcggaggacgaaacggcgttctttgacgcgtttgcgaaggctatggagaaagttagtgagaagaatgtgaagacggggaagcttggagaagtaagaaggcggtgtgatcaatacaatgactacaaggga

SEQ ID NO: 151095 - DNA, 190 bp, Arabidopsis thaliana landsberg
tcttccctctaattactctcttgtctctctccctttcctctttcgtctcctacgtgttataaaccttgaaaattcaaagagtcttttttggtgtttaaatcacccatttttgtcaatctgtttttcgagcaaaacagcaggaggaaaccaaaaagctagaggctttgtggagtgagaagaagagtctcag

SEQ ID NO: 151096 - DNA, 138 bp, Arabidopsis thaliana landsberg
caaaacaacactaaacctgaaacaaacgtaaatccgccgcaacaacccagtttttttcgacggtgtacaagcttcctccgccgtaacgccgtcgtttaacaccacgaagcttgattaggtttccgtagtgtgtgattt

SEQ ID NO: 151097 - DNA, 498 bp, Arabidopsis thaliana landsberg
cagtaacgaataaatacctgagggatcgtgtaataaacattgctgacatgggcaagaacaccagcttgctcagtgacagctcgaagccaatcaggatctccatgaccaagagcattcacagcgattccagatgcacaatccagatactcttttccttcagggtcgaacaatttacaacctttcccactcgagagaaccactggagctcgcgcgtaggtacccacaataactttggcttcctcttcaatcaccttctggctcacactcgcttttaccgacaccgcttggtcccctgcgttagtcaatacgctcgcaatccggccgttgaatccgatccgggttctgatgatcggccgctccaatcgacggcgtaagaggccaatctccgccgacggcgcgcgtggcagggtgatttggccaagagacgccattttcgtgtgtcgggacaataaagagtcgttaagacaaaatagctgagagcttaattctatttctagg

SEQ ID NO: 151098 - DNA, 501 bp, Arabidopsis thaliana landsberg
  unsure (1)..(501): unsure at all n locations
ttcaggattgttacttgctttcacttttcacgttggtggtcgggtaaatgaaactaccccnatttaatcagattttttttttttatttaactgattataatgtcaacgttaaacatatcaacaatgttaaattttaaggggctttggcttggaatcatatgtgccctcgttgttcaagtttttggtcttggcctcgtcactatttttacaaattgggatgaagaggtaaatatctttttgttataaaagctatgcatggatcttagattaattatgattaatgttttcttcgtgtattttaatggataggccaagaaagctacaaacagaattgagtcttcttcaagtgtgaaagattttgcagtcgatgacagatcagttgttgtattttgagaaccattgtgtgtgttttgttcttaacaacaaagacactcaatcattgtcattgatagtttaaaaaatgtattttacttcatcatttttaaccaatatggaagagaa

SEQ ID NO: 151099 - DNA, 382 bp, Arabidopsis thaliana landsberg
atgtgctctgccctaagccagaggtccacaaccaaacccaccaatcttgtcttttacctcctctatagctgtatacctttttcttcttcagtttcttaaggtctctcagaaacattctcagagaagcagagagagacattcacagtaaccatgtccgtctctctgttcactgccttcaccgttctctcactctgtttacacacttcaacatctgagtttcagctgtccaccatatcagctgcaccttcgttcttgcctgaagctccatcgagtttctcagcttctaccccggccatgtctccagatacctctcccctgttccctactccaggttcaagcgaaatgtctccttccccgtcggaatcgtctatcatgccgacaa

SEQ ID NO: 151100 - DNA, 822 bp, Arabidopsis thaliana landsberg
gttttagaagaaaaaaaagagagaaaaaacttgtgaaaaaagtccaaacagttcttctttccccgactcattctctctctctctttgccacaacaggcgatggcgatggagatcgattttctccaacgacgattgaggttacaattgagaatcttcttctctgatcgtttagattgattttgaattttgtaacttgttatgtaatttagtttctctttagattttcttcggatcattttttacaaagagattcatgaaattagccttgatgccgtttttgttaatctgtctgatcaatgtcttgattggagtctgattttgcggttgattgactctaatttttgttttcgtttatttccactgaatttgtggttagtgattgactcttagttgtatcttcttatcttttggttttttcttgtatgttaatatagaaagacttgaactttgatcatttgcttgattacaggttgagatcagataatttaattggaagattttaagttatggataacagaggtcagaaacgatggaggttgtggaagagttacatgatgataagagagcttgtaactctcaggatttcaggccaaagacttttgattattgagtacttggacgttgctgagcaggtacgttatactttccaccaaatgaccttattctttacacctaaagaacgcaagttttatttcatactaactattgaattttctagtgtttgcaaacacttgagaaaatatcctgacatgagccggtagcctgcttgaatgctggagcaattatggcagtgctttcgtttattgatttcttctcaacaag

SEQ ID NO: 151101 - DNA, 320 bp, Arabidopsis thaliana landsberg
atttgcaggcatacaccattccagataatccaccttattgggaacttttttaggatatggtcagtttattctatgtaccgatacttgaatcagacgggagcgcctgttgttctctttctattctgctgtatggtgccttcatcgatcatcttcttgatacttcaaaagccatggaaaggaagggctctttctagtcaacaggtttactttagtcttattcagtttcttgcatgtatatttatgtgtaaattggagagttatgcacataaattatatcttgactgtttcagattgtaccttctcttatcaatggagtcatc

SEQ ID NO: 151102 - DNA, 1046 bp, Arabidopsis thaliana landsberg
tcctgatgttgaaggagatcgaaagtaagtaactgcacgcataacctctttctttccgctctttggctcaatccatttgacagtcaaagacaatgtttaaccagctccgtatgatatattgtcattatgtgtttgttcaagcatgtttagttaatcatgcctttgaattgatcttgaataggttccaaatatcaaccctggcaacaaaacttggagtgagaaacattgcattcctcggttctggacttctgctagtaaattatgtttcagccatatcactagctttctacatgcctcaggtgaattcatctatttccgtcttaactatttcggttaattaaagcacgaacaccattactgcatgtagaagcttgataaactatcgccaccaatttatttttgttgcgatattgttactttcctcagtatgcagctttgaaaagaccaaccctcttatcctttaacaatgaacaggtttttagaggtagcttgatgattcctgcacatgtgatcttggcttcaggcttaattttccaggtaaagcattatgagatactcttatatctcttacatacttttgagataatgcacaagaacttcataactatatgctttagtttctgcatttgacactgccaaattcattaatctctaatatctttgttgttgatctttggtagacatgggtactagaaaaagcaaactacaccaaggtaaaatacttttgtacaaacataaactcgttatcacggaacatcaatggagtgtatatctaacggagtgtagaaacatttgattattgcaggaagctatctcaggatattatcggtttatatggaatctcttctacgcagagtatctgttattccccttcccctagctttcaatttcatggtgaggatatgcagttttctgtgtatatcattcttcttcttctttgtagcttggagtcaaaatcggttccttcatgtacatacatcaaaaatatgtccttctgaatttttatatcttgcaataaaaatgcttgtgccaattgaaacaacagc

SEQ ID NO: 151103 - DNA, 150 bp, Arabidopsis thaliana landsberg
tgcacatatatataaatatagaaattgtggaaaaagtgaaatgcagtttgcctaagttgaggttaagagtaagcacatggggttagtcattgcttgtattaggcagcttgccaaattcaggggataattacaatccagcctctctatctg

SEQ ID NO: 151104 - DNA, 651 bp, Arabidopsis thaliana landsberg
ataaaatattatatttttttctgaatatgatataattcaatttttttaaaacggacatatatttttcaacctatgaagaaataatatgtgtacaatgtcccacatcgcttagaaaaattggacaatggttcagacccatattataaaaggaccaaaatgattctgattatgaatgagcaggaagcttgatttatcaggcgtccaaaattaaaatagttatccgattttactcggattttttattttaaagaattgaaactttaaaatgtttcaagaaattataaatattataactttatcaaaagttaaatattataattttaaaaactttttataaagtttatctttaaaaaatgctttaaatatttataattttaaaacttataaagttttaaaaattataaattaaattttacaagaaatttaaacattataaatatataaaaaatatattaatacgagatgatatattacaggaaaaatcttaaatataacaatcaaaattcaatgatgaattttgggtcgatattgtatttttttaagtttcaaattttataatattgaaatttataagaaaatgacaaaattatgtttaatttcacgggactgggttatatggtaggacgggtttgggtggataataattacgat

SEQ ID NO: 151105 - DNA, 350 bp, Arabidopsis thaliana landsberg
gagatattggcaacagttggagaacaacaggagatatccaagatgattggaaaaggtttctcttctttgatggttttttcccaatcttagtgaaacaagaacttgaagatgcttttctcttccttttttgcttgttagcatgacattgatagcggatcagaatgatcgatgggcatcttatgcaagaccaggatcgtggaccggtaaataatttggagtaatcaatacagattcgagaaaattgtatcgagggccgagaaagaaaaattggttatattaaccccgctccagtcatgcttgaagtggggaatggaaacaagactaaggaagaatacatgtcgcatttcagc

SEQ ID NO: 151106 - DNA, 498 bp, Arabidopsis thaliana landsberg
ttaaggactatataataacaaaataccttcttgtcgttctcagtttcttctcccaattcattgaaccaaaaagattttgcttcatccaagatcttgaagatgggtataaaagtttcatcaaagatcaaaagaattctcgcatccacaggttatattcctattttcatttttaaataccactattatttttattttttctactgcaaatttgcaataaaatttgtaaccaagaaaataataattttgaaactttcctcgattggtacagcttcaggtagttcaaatcccaaagatggtgatgacgtggatgtccgagaggaatacgcaaacgcctttcgtacggaatcatacaatcacttttggacacgtgtcgtacagctaagccgcaaaaagtccacggtgtcttcttcttcttctccaccaatcgaatcatcctccacgtcagctcgtctcatgtcttatcgcctattcgcgcacaatcttctagacccggatccg

SEQ ID NO: 151107 - DNA, 498 bp, Arabidopsis thaliana landsberg
tcatctttgggataataattaattaataacggacctggcgctaggagctcgaggaggaacctccggttcgagctcagaaggaagaccaagaaaaccattgaaccgatcaaaagtcacgtgactcacgtgcttaacctccgtcggccaacctatatccatagacgccaccacgtcatcttcccctctctccatcgcacacgacatcaccaacgacttcctcagaaccgccgcaagaaggtctacgaccgttaactgacccgagccggacccgttcccggatcttgacgcgtgtgagctcaacggcgttgaagcgtcgtagtagtctgtactcgtagtgctatgtccttcttcgtactcgtcgtcatcgttgtggatgttctcgtatttgtctggaccgggtcgagtgggtttaaactccgggaacccgatagttccggtggatttggatcgggagaagttagtcatcgttttctgttctgccagagaagatgagaggac

SEQ ID NO: 151108 - DNA, 503 bp, Arabidopsis thaliana landsberg
caattcattcatcgtttaactgagaaattacaaatctgaaatccctagaacttgaaattaaagagtttacaaaatccgaaattgcaatccgaacgatttagccgccgaatccatacaaagttcgtccttgtctcttgagagcgtaaacgacgtccatcgccgtaacagttttccggcgagcgtgctcggtgtaagtaacggcgtcacgaatcacgttctcgagaaagatcttgagaacgccgcgagtctcttcatagatcaaaccactgatacgcttcacgcctcctcttctcgcgagacgacgaatcgcaggtttggtaatcccttggatgttgtctcggagaactttccgatgcctcttggctcctccctttcctaatccttttcctccctttcctcggcctgacatttttctcttgggaaattaaattcgaaccttagaaaatagtaaaaagactatttgattttaccaaattgtgttgattgatcgaaatgaaaattga

SEQ ID NO: 151109 - DNA, 199 bp, Arabidopsis thaliana landsberg
aacaatctcatcgctcagtgacaaattcagatgaccagtgtctccgtcgccgtcgtagctcctccgcatcgttgcccattctctagtcatctgaatctgaacaagctttctcttcaagtcagtctctttctctctcttctatctatctcactctctcagtgtgtctctccataggtctcatcttcccagggtaccgagc

SEQ ID NO: 151110 - DNA, 181 bp, Arabidopsis thaliana landsberg
atattcctgctttcttccttgaaatgttttcactttattaaatttttataatttgctaaaaatatcggcatgattaaaagtaaagtattaattaattaggaattagtaatctttagttaagtacttttatatttctcctctgtaatcctctgttctgaattaatcagatgaaatttcgaca

SEQ ID NO: 151111 - DNA, 638 bp, Arabidopsis thaliana landsberg
gtgtagtgcacaggacaattgaatttcaagttagttcgatgattccctttataaggttttcctccatggttaattagtaaatgtttgagctttgtttttggtccgtatcgaacaatgaggggtggtattcgttattcagtatcgtgaattgttgggttatgtgattcagggttaaaagatgataagcctgtgttggagcttgtgcgtagagtaacaaggggtgtgttttgtgctgttcatgtggggatcatgttgtttgccttgttggtttctgcgtttatgattagtggttttgtgattacctatttggctcatgaaccacttgttatcaaagagagcttgaattttgattacaccaagagtagtcctgaagcttatgtgcccataagttcatgtgctggtgttgcctttggtttgagtggcaaggagagtattgaaactgggaaggtcaaagggttgaaagacaggacagagataactgtgtcaatgacattgcctgagtccgagtacaatagaaatctcgggatgtttcaggttcgggtggacttcttatccgcgagtggtcatgtgcttgctagttcaaggcggccgtgtatggtaaaatttagtagcgagcctatacgtcttgtccagacttt

SEQ ID NO: 151112 - DNA, 466 bp, Arabidopsis thaliana landsberg
cccggtggaggttatggttcaagcggtggctttggatctagcggcaacacttatggggagggttcaagtgcaagtgcaggtgctgttggtgactacaatggaagtagtggttatggtagcgccaatacttatggtagcagcaatggtggattcgctggagacagccagtttggaggaagccctgttggcaacagctctcagttcggtggtgacaatacccagtttactgctggtggccaatttggcggtgaggatcaatttggaagcatggagaaaagtgaaacgaagatggaagatggaccaataggtggagaattcgaagatgttgccaaaagagcttgaaggaactagcaaaaaatgttgtcaagactgtcttttcatattaaatcctatgattagtagtagctagctattctacattgcttcctgaattaaacactttatcaagaaacaatctgcttttgct

SEQ ID NO: 151113 - DNA, 131 bp, Arabidopsis thaliana landsberg
atttcatctaattatatatatttgctaattcatcatgtttctgtgtttctatattatatatgtattaaggaaaagttgttataattgtaaaattattgaaaagtctagatcgctgagaatggaagctagaa

SEQ ID NO: 151114 - DNA, 345 bp, Arabidopsis thaliana landsberg
aaccaagcattaccttattattaaaatcttacaaaacaagagtttagctttgtaaaccattgttgaaaaaagacacgaccaaatctatttcagtctttttcaaacacattccaatctcaacgccacctgactcatcacgtctctctgccattgagatcgcttctccttggtcaatggagacaatatcaactttagcgggtcttccccacccgaaatccgcctcgtatactcccaaccgggttgacccggctatcgtcccaaactgtgtactccaactctgaaaactaaacccttcaacgaaagtgtccgcaatggtatctatctttcttgaactcaaccctttca

SEQ ID NO: 151115 - DNA, 346 bp, Arabidopsis thaliana landsberg
cattagagattttctttgtttcatatcattttgttcttgatggacctaattacatgagagagcaataacaactactagtgtttaccaaaagagagagagctaaactatttacccaaactttttaagccgcggaatgattaaaacatgtgacccgcgcagatatttgttagtctattaaaggagatttagctgatgcagttaaggatcagtgtttctggcttctttggtcttccacttggcaagccttcttcattcctgttgctgcctgaacgaatcccacaataacctgaagctcatccatttgctgtaaacaagaacatgtctcagactaatccaaaatcagaag

SEQ ID NO: 151116 - DNA, 97 bp, Arabidopsis thaliana landsberg
cgtctctctctctctctctctatctctttctctcatcttcttcttatctccctccaaagacggcgactgtataatctatcatttcttcacagtgacg

SEQ ID NO: 151117 - DNA, 341 bp, Arabidopsis thaliana landsberg
gttgtggttgtgattctttctgctattggggttgcttttaattgaactgttgatgttcataagatgttgggtaagactgctgattatttgaccagaggtggtgagactggaatcttctctccgatgcatatgattctctgtagaaaaccagagaaagcttctgaatgaatgattgagaatcttcttccttgttctcgtttttcttcttctttctttctaagttcatgttttgccccttaagaatctctttgtcgtcgtattaatgttatcactttgttgtttattgtatttttttttttcaatttgatttgtttaaattgatgatggatcactggaaatta

SEQ ID NO: 151118 - DNA, 117 bp, Arabidopsis thaliana landsberg
aaatatagacttcacacaagaaggccagcagcaacatccgtggcggtacaaagtaccgggaaccagcaacaaccgcaatttgtggtggttggaggcatatgggtaccatcgtcacaa

SEQ ID NO: 151119 - DNA, 301 bp, Arabidopsis thaliana landsberg
ttaccattggataaaaacagatatacactctgttattagctataaatagaaagacgattctcaaataagaatcttgtaatgttataagacagagcttatatatatatataagccatgagactgtattttcacaagatgttttctcatgattcgtaacttaataacacttacaaattacagatgcatagacattaatatagtgcgaaacccgcttcttgtttgatcagtccacgcattttttcggcctgtaaaatgagcaaaaaaaggggagacaggaatctgatatgtataaacagggatc

SEQ ID NO: 151120 - DNA, 264 bp, Arabidopsis thaliana landsberg
gttttcttctaagctgtatttgaaagggtatatatttcacacacaaaacagatcagaagctaaaaggtaataatataatggcggatttgagggacgaaaaaggtaacccaatccatctaaccgacacacagggaaacccaattgtcgacctgactgatgagcacggtaaccccatgtacctaaccggtgttgttagctccactcctcagcataaggagagtactaccagcgacattgcagagcaccctactagcacccgtggag

SEQ ID NO: 151121 - DNA, 229 bp, Arabidopsis thaliana landsberg
  unsure (1)..(229): unsure at all n locations
gtctgagggcctcataaatgtncgttcgttctcaatgtggctaataaaattcgctttggaaatttcggtactctgaagataactccatttgaatctgtaattttcgtttgcttacatttaaattttgtaatgtggtaaagaactctgcttgtttaaacgattccctgcttcaagtatgggtgaatgttgttttcttgatttcattttcgttgcttcttcttccattaga

SEQ ID NO: 151122 - DNA, 415 bp, Arabidopsis thaliana landsberg
atcaaccaatcctctgggatggtgaaattacaaaacatataatatttttaaaaggtacaatgggatgattaaaacatactaaaatatggattttgaacaacaaacatcgttaaacaaaagattaacggttgatcttttgcagaacttgaagtctggcctttgcaatcaacttgctatgatcttccacactttcaccaacctccgtgattttctttgttaatttctctactttcttactgatctgagttaggacaattctcgtggccgcctcattatcttcatggtcaatagcattatctacaagtttcaacatatttttgatacggtcttctagcccgtcgactaaaatcgatacggtctccgtcgcttcttcgtttgtttttatacctttctccaccgattcttctatctcttc

SEQ ID NO: 151123 - DNA, 112 bp, Arabidopsis thaliana landsberg
atggatctttacattttatccgacgataaaaaaacgaaaattatataacacgatacagacagtaataaaaaattgcagtcttcttttttatgtttaaaaataaaattagcaa

SEQ ID NO: 151124 - DNA, 76 bp, Arabidopsis thaliana landsberg
  unsure (1)..(76): unsure at all n locations
ctcaaccggcgaatatagtgacatanaaatctacctcagtgaccatagtcttactttccaatcccacaaagtcatt

SEQ ID NO: 151125 - DNA, 1526 bp, Arabidopsis thaliana landsberg
  unsure (1)..(1526): unsure at all n locations
agaaaaagggaacaaccaaaccaaaccaaaaaaaaaaggaaccatctttctcctaaatctctacaatggctcgatctttatctccttcactttctctctctnnnnnnnnnnnnnnnnnnncttctcttcttctcccttcatctcaaaccattttcatccgatctcaatcctcgaatcgtcggtctaactctaaccatctcggagtaatctacgagattgatatcgctgcggatcctcttgtcaataagttggaagatgctgtccaccggattatggtacgccgatccgcacctgattggctcccttttgtccccggtgcttccttttgggttccacctcctagatcccagtctcatgggatcgctaagctcgttgagaagctggccaatccgatctctgatgaagaatctatttcaatctcatcggttcgaggatggccttgctctgattacttcatcaaaggtggtttttatatgattaactctaattgtctgatcgtatgtgtttcggttttgaaaaagctttggtttttacatttgcagtatctataatctgcataggtattgctacattcttagatgcacttaggcaattcttggcttatcgttatatagttgttgaaaattctttacaggttcagatgtcagttatggaaatgggtgaccatcatcagtaataacatagagagtctttcctttatagggttgaaaagattgtagtgtttattaatcttgttgcttttgcttcttgtcgaataataatcactctgttttataatagattgtggtgtttgcattcttcagtggcaaatgttgcagcgtcaaaatatgtttttttgttaggtacagtgtttctttaacgtttggtcttttgagcgtttcttaacacttggtctgtttttgattataggtgtaaagcctcaatcagttgagacggagatgacttcaaatactgcatatcactccgaggacgaggaataaaccccaaaactcgtcagggtaagctataagatggtcgcaacagtcgtatataactttctattgatttcacgagctgaaagcagggaaatttgaagagcaaatgaacttaagaaaaaactctgctagagtgttgggcagtaaagccttctttagctagcataagataatatggactaaaagtatctaaaatttgccttggctatagacacttcaagattttctttgacctctaatgaaacaaatttcaaaactttgcaggctcttgctcttcaagatttgtagatttatgaacacgaatcaacgaagattcgaatcaccaagagcagctgcaaagacatggtttagacttttagataaggtagagtaaagcaaaccttttacagactgatcagatcctatccagtcttagtgaaattaaataaggaaaaggtgctgttgctttaccctctgttttcttgtaatctcccttataacagtttgttgaatcgtgtgtatatatatttccgcataagctcgcagattcggttctcataccacatttgcaga

SEQ ID NO: 151126 - DNA, 171 bp, Arabidopsis thaliana landsberg
gttcctcgaccagctctacggtccgctcatgagctttggccacccagtccctaacttcttcgtctatgatagcaccggttttgttgctgtatggtttagagaagtcgtagccatcatcccttggtggaaacgagagtagcccaaccttgtcactgagaccatacacagcta

SEQ ID NO: 151127 - DNA, 86 bp, Arabidopsis thaliana landsberg
gactacctcgagacattgtagccatttatcgcttttaccaagctcttcaaagagtaagaaacaatggtcacatcttacgaccttca

SEQ ID NO: 151128 - DNA, 914 bp, Arabidopsis thaliana landsberg
cctcattcttcttaattccgatttttgagtgatggctatggcctctgcttctggttctgctctttgcttcactgatgcatctagctctcttgctttaagacgcgattgtggagctctttgcttgcctcctaggacagttacgtttggatttgtcgataaacctcttgtcaatctcgagcgattaaggtttttgttttttggctatctcttgatgccttcttgagaatttgaattcgagcttcttttggattgctttttcgattgtgatcttagttttgtgctgattcgagtttcatgaagtaaatactgtttccgaaacaaattcttttgtagtgaattttctccacagatctctaaatccttaaaaagcatctgatacctttttttaacgattatcagaattttgtgttccgagttgctaatctttttaaaatgtccaaatgattttattgctggttataaattcgtatcttttgctggaattcgattcaaagcacagattgttttgagctgatcttctacggattcaaatacttcaattcaattcttttttttttttttcttcagattatccactttgaagattagagcatcaaatgctactgctgtggaggtatgaaaatgaaatgattacacaaggacactagtaatttgaatagactttttaaagtttatatgtttttgtttttgattttgaagaatggaaagcaagaaggaagtgctgctgattctgataaagttccaactccagttgttataatcgaccaagattctgaccctgatgcaaccgttcttgaagttacattcggagatcgtcttggagctttacttgacactgtaaggaaggataccttcttcttactcacttgttgctagctctgcataatcgaccaacattcacaaaagcttcttac

SEQ ID NO: 151129 - DNA, 503 bp, Arabidopsis thaliana landsberg
gttaagagctaccagaaaaatcaagttcgtcattttcacacctttttttttttttttttaaatttctcatcgatcaatttgtatggtttacgattacgtgccctctaagctttctctgtatttcatgtgattttaattgacaacttacaagctttaagtttccagtttttcttcatgtgattatattttccttttctcaaacatcgtaaccatacacttatagctttttcaacgtttttatgttgatctattagctaataattaacattttacgtgaaaaatgaagggtttaaggaaatttcagcaaatggccaacgatcagaagaatagtgagtcttttccagcgaaggaagatcataagaaggatgatgcggcagcttcagcagaagtagaccataatgatgaattctgggcctcacagacacattcggtcgaaaacatagtattagttgggcgtacaggggacggcaaaagcgccacggcgaacagcatcgtcagatcaa

SEQ ID NO: 151130 - DNA, 1081 bp, Arabidopsis thaliana landsberg
ttttatggatgtatcaattgatggagatccagctgagactatggtttttgaggtacaatagtgtttggctatgttaatgttcactttcttgtatttttcctgatctagcgaaagtgttaaaaatcttaacattgtttctttagcttttccctgaagtcgctcccaaaacatcagagaatttccgtgcactatgcacaggtttgttttctgtccggctaagcttgttgctttcttgctgtttattaatttgactgttggttttccttgtctttaacacttatttccccttataaaatctatataggggagaaaggcatcggacccagaagcggaaaacctttgcattataaaggatcctttttccatagaataatgaaaggttcctcagcacaggtttctatctgcatctttcatttattgatatgacgtttcattcttatacttttggttttttttttctttttttttttttttaattatcgacattggttggattttggtctttttagtcgttgctgttctctatgctgtaggatacaggtctgatcgcaacacctgcttttcatgtgatatagttttaaggttgtactactagttgtttatgctcaaacgttaggccttctcatgcaaagagtacagtttatgtaccaacctattcaatgtccctcctagtctaacaatctttttttgaccttttttcaggccggtgactttgtgaatcgaaatggtatgtacacttattcttcagctcctgaaatacatcaaatacagccatcagttaaatttattgattcccgccttttctgatcttctatctatggcgcacagtttgtagcttattaactgtgcttgagaaactatatttcattcatgtaatcatagtcgtctgaaaataccatttaactgagattagctatttggtgcatgggactgcattcattagattcctgtggaggttattggatcattagatagtgctcaataggttccgcagtcaacattagcaaattcattatcataaaacagaaattgtatatttcttccactttccaggtactgctggggaaagcatatatccgaa

SEQ ID NO: 151131 - DNA, 422 bp, Arabidopsis thaliana landsberg
attgaagggacatgtggaatcagtcgcaaagctaaagggattggacattgatacagcaggacatcactacactgtgtagttggagttgcacaacaacacatacatttaccgaaaaccaaccccatcatgactcatcttttgttttgtcttcacaaatctctctttaaaagtcattacagtagagggaagagaactcttgtgtattgccataactcttccaaaactcttttttctttttgttattgttagtcattgttcttaaaactcctactcgatatgagctttgcaaatttgcctttgaagaaacaaggccctttgcctttgaagagacaaggcactttgctttttaatggcctaatgtgattattctatcactcttttgtctgtttgatcaatttcatcttgaagataatatttaaatt

SEQ ID NO: 151132 - DNA, 368 bp, Arabidopsis thaliana landsberg
ccccgatcgaacatcaaacaaaacatgggtccaatacaagaaagaaaagagtgagcattacaaataccaaaataaaaggggtctatagggaagtagcacaaccaaaggacttattacatagtaatgcaaacactaaacttagttttttttaaaaggcgggaaataaggaaacaacaaaaaaactgaaatctgtcaggtttggttttaacattttgacaacaatgttaatcatcaatccttgaagacaagctcgacagcttcaaagaacagaggtgccaaaaaaaaaaatcttattaatacattaaatgagaatcaatacattttttgggtttaatgaacaatgtgatagaagtaagaatcttaaagct

SEQ ID NO: 151133 - DNA, 355 bp, Arabidopsis thaliana landsberg
acagaaactgggcagagtacttgaacctctctcgcgcttgaaagacgtgattgtgagaagtaacccacaagcttctctcgtaaggagtggctcctccagtgaggtctagagacgaactatgatgtttgttgattcgacaatctcacacaagcataggtaagtacaaacttggtcttgagttacatgtgtgcgtgattgtctaaagctatttactttcttgggagcctatgttgcttcattatcttgtactattagaatggagatccagttgccttcttacaaagcaatctctttaggtgtcaaaagcgcttgtactagtgtggaaactggaaaatatacacatacacttcttttt

SEQ ID NO: 151134 - DNA, 154 bp, Arabidopsis thaliana landsberg
agttccacttgcatacctcttgagcttgggaatgtacatgctggatcttattggaatcccaagtgcgttggataccattggtaaagtccattttgcaagagatttactgcagaacttcactaagagtatcgtcggtattcccaccatgactcta

SEQ ID NO: 151135 - DNA, 138 bp, Arabidopsis thaliana landsberg
gtggttgtacctttggcgaatgtagcgacggtgaatccggtggtggtgaaagagactccacctgagaagtatattcagttgacgacggtggatggtcatgacttctggttcatgggttttgtgaattatgagaaggct

SEQ ID NO: 151136 - DNA, 907 bp, Arabidopsis thaliana landsberg
aaatttaaggcaaggttagaaaaagttgaagcaaatacacaaacaaaaagagatactacagattcaacaaatatatacatagatgctaagacaagaggtttgatgacaaagtttagagttaaatacaacgacatagcaaacttaaataagctaaaatctggtctctctctctctctctctctctctcttttgctaacttcatccaatgctactactaggcataacccatccagcatcatgaccaacaacaacactatctccatttccaaacactcctcgttgtctcttcttcatcaacgcagctgataccggacttcctacagtgctggaagtcagagagctctctgctgaacagttgttcttatgctctattgctactgcaagctcggataaggatggaatcatcattttggttgtgtcgaaggtgcttgttgttccttggcacccattggtgatggaggcctttatggctagctctgaaagctcttctctagctgcctccaacccagcaaaggcaacagcttgctcctctatagccttgcaagctttctctagaattgattgtaggtacttcccttgtgcctcgatccttagctggagtcgcctttgcacctgcgtatactaatggaccttattaaatgtggaaccatggctcagacattagtatatgcggtttctatggttctaactttcatcaaaagatttcctaagtagtatcgttctgataagctttaacgaaattcaaaggcacaagtcttagctatagaggtttctatatagtctctcattaaccaaagtctctcaggtatttggtgaattcgaagaagaaactagcctctaattgctcgtgtagtcttctttggacttccatctgggcacgcaaagcttcagtgacctggtaactcct

SEQ ID NO: 151137 - DNA, 611 bp, Arabidopsis thaliana landsberg
tttacatgtatacgtataaacgtttatttttcttttgaatataatttaacattagattcaaaaaaacaaaatagacagaaaaagcgttctggtttatacgataagcataccatatgtttttcttcaagctcatctacaaactgatgcgaataactggcagaagctcaagaggaactttcttatcaacagtgagatcaccagcttcttccatgtccatatctttcttctcctcaggcatattccaatcaaagaagtagagcaaattcaagagccccaattcaatggttgcgatcgccatagctattcctggacaaattctccgaccagaaccaaatggtaacaactcaaagctatgtcctttgtaatccacatgacaatcaataaacctctccgggttaaactcttcaggatttttccaggattccggatctcgtcctagagaccatgcattaacaagaagagctgttttccgaggaatgtcgtagccttgaatcttgatatcagccattgtttttcgtggaagtaaaagaggagctgctgggtgtagacttagaggtttctttcaccacaagcttcaagtattgaagcttatcaagatcttcttccatgat

SEQ ID NO: 151138 - DNA, 514 bp, Arabidopsis thaliana landsberg
aacagaaaactgatgatcttataggacataactacttaatacattctacatctatagattatgtatgtgtccgtattatacataaaatctcatgtatctttacatcaaacttcaaatctaaatacaaaaacaaaaagaacatcactagagatggatctctcgtcggacaaaaccccgaagtttcgtctttcacggtcaactttagtcaaactccgatccgaatcaaaccaaaaaggggttttcattcatcgatcatagtcatcatctcctttttagacaaaagattctcagcttctctggatcataaggaagagtctagagcaggagcgtcggatcccttcatgattcggagtctcttacaagaagaagagaacatgtcccatggaacatcaccacccaacatccagtcaccatctcttatcttcgtacgttggtacaaatccagatcctttgtatccttctctctcacaatattcaccaatcatgacttcaacctattctctacgctttaaag

SEQ ID NO: 151139 - DNA, 55 bp, Arabidopsis thaliana landsberg
ttgccgatatttttccactcaaataaattgaaattggcgttccctttggattacc

SEQ ID NO: 151140 - DNA, 493 bp, Arabidopsis thaliana landsberg
ctttgaacctaaatcatggcgtatagaagaaggcaggggatcggaaagtttgcgactttcaaggaggaggttgatcggcttcccccggaaagcatcaccgccgtcaaggatagatcaccgccagctcgatcctcccctgcttttgaccaacccagatctaaggtttctcctttatctcaactgagagtccactttatgtttttgcatttacatgatccgctcttaggatatccttagtgaccaatctttgacgacttttgactgtcttaagttaatgctaaactttctgatcagattcagctgtgaggtcgaatctagtggttttgttacaagttgtgatcatgagatctttcttctgccattgatcctatgttttctggggatgtataactgcagaattttacgaccgagccaaagggcttgtggggagtcatagcccagaaagcaaaatctgttattgaagatgattaacatagtgatcggtctggatcaa

SEQ ID NO: 151141 - DNA, 523 bp, Arabidopsis thaliana landsberg
ctgattaagctttcgtcgtctcctccattgcaaaatctagctcgatctgtgaaggttttctctgagttcttcaaaaatctcttctagagaaagacttcattagctcaattttagcaacttcctccacctccttttactcacactgtgcttcgatttcaacttcgcatttcacaatgatccccaacggagaattgagattacctgctctcaaggtccgtgaagaccgcgtgtcaccctcagctcctattccggtcaccagaaccctagtggctgatactgacgtcacttccgatgacgatatgagtacaaattccgaggatgtctctctcgattcgtctcccgagaacagtagagtttccagtgccgttggtcgcagctacgggagaaattcttcttattatacttactccgaggtgagctcatcaagagagactttggtcggtgcgcgcgaacagacgggacctagatttgatggtgatacggaggaagatgaatccaccgattcagcttctagcacgcaatt

SEQ ID NO: 151142 - DNA, 137 bp, Arabidopsis thaliana landsberg
tgatctttttctaagataggagaagtaacccaaccattttagactactgattttctagttttttgtattaagaaagaacaacgaaaaaattagatgtacggtgattgtctcaagtgtttggtttagttttccttgaa

SEQ ID NO: 151143 - DNA, 77 bp, Arabidopsis thaliana landsberg
agataagacttacactgtttctggaaaagattcttcttcggaatctctttatagaacctgaagaagttgttcttgta

SEQ ID NO: 151144 - DNA, 483 bp, Arabidopsis thaliana landsberg
gaaatggttccatacaagatttgggtgatgtctttcatcatagcaggttcaacttttaaaaacttattcctctcctcaatttggttagcaattacacaatcagaaatttaatcaaattttgtgtttcattgttttgaaaaatccactaggagctattttaggaggaataatccctggagttactacaacaaagacagcgttcgcgtgtcctctctattgcttacaagtagagtacatgacatgaccttcctctggcgctgacaagcttcctccaagatgcaactgttgtcttgctcccaaaaattgtactctccatctctctgattctactactatccattgtagcaaatgattatatctagtaagaaatacctgatggtatccctccttcgaatcccatccattcctcccactcgtcgatctcacccatttctgtaatcccatttcttcttcttctttctcaaacttttgcatcaaacactg

SEQ ID NO: 151145 - DNA, 190 bp, Arabidopsis thaliana landsberg
agatttggaacctctttcttgttgtgttcatcgacagcgaaacgagcgaggctctcaacctcaccactgttctgattagcagggacatcgccaacacctccgactaaagccatctcttcgttgcagaagcctaaatcactggcgatcagagaggaaatgaagagggatagagagaagaaaacaatgaaga

SEQ ID NO: 151146 - DNA, 994 bp, Arabidopsis thaliana landsberg
ctgattgtttttatttgggtcttccagggttagcaggtggaatgataccaagatattttctgatgtatacgcggacagtgaggacagtgacggagacgacatggatgcggagtctcatggccgcagcaaggcttcctctttgttaaaatccaaggcatccgctttgaggttggttgttatatacacattttggcactaatcttgtatcgctatgcttttggatctacttaaccgacgtgttgatgacatattacagatccaagaaaagtcggaaccagagtcatcttgaagtggatgagtcagatgatgaaccgcttgacttaatggatcagcacaaaacaagattagctcttcggtcaagtgaacttcgcaaacggaaagctgactcggatgaagaagcagagtttgatgtggaagggcggctagttattcgtgaaggagagaggtctaaaaggaaggaactatctgatgcagattcagatgccaaaagtagcaaaggcagccgtttctctggaaactcatccaagaagaaccaaaagcggatgaagacatcagagtctggatacgcttacacaggcaaagagtatgcaagcaaaaaggcaagtggcgatcttaagaagaaagataaacttgaaccatatgcctattggccactcgatcgcaagatgatgagccgtagaccagagcaacgggcagttgcagtgagagggatgtcaagtgtggtcaagatggcaaagaaaatggaaggcaagagcgctgcagaagcacttgccaccaccaagttcaaaaaattcaagaggagtggtcagaagaaatcagctgggaagaaaaaaaacaagtaaacaagtggcataagctcctcacctatgttttaagataccagaggaaaaatagcttatttaaaacacattttttgactgctaaaactttaaacacctttgtccattttgtattgtaatcagattttgaaatatggtttcagagttgatacttc

SEQ ID NO: 151147 - DNA, 215 bp, Arabidopsis thaliana landsberg
ttatttattgccatatacatagaaatgaagaatcttttttcttcggtgcttcattatcatcaacttggtcttctgtgcatctctcttatttcttcctacttcaatctccatattggttgcataaatctagcacaaactgatatcagttcataagctaagcaaacttttgattacggacaatttcggatttggcaggtttgtgatgggagagaatc

SEQ ID NO: 151148 - DNA, 476 bp, Arabidopsis thaliana landsberg
gtcctagtcctgttggtactttgaatgtatcatacgcaggtgacatgaaaggtgactgcaaatctagtccagattctgttttggctgttacagatgcttctatattcaagggtgacgatgatggttcttcccatcacattaaaaagggttcacttattgaagttctttctgaagatagtggcatcagaggctgttggtttaaggctctggtattaaagaaacacatagattaggttaaggtccagtactcaagatattcaggatgcagacgatgaatctaaaaagctagaggtacacattttaaaacccttgctttggtttcgtacctactgtccagtttgattacatgtttttgctgcaggaatggattttgacatcttgtggttgctgctggtgatcatctgggggatcttataatcaaaggacggaaagatgtgagaccaatgctgcagcccatcaaagaaaatgatgtatgt

SEQ ID NO: 151149 - DNA, 286 bp, Arabidopsis thaliana landsberg
aagagtctacgatgagaaagagaaggcagccacctcaagaagaagtgcctaaccacgtggctacaaggaagccgtacagagggatacggaggaggaagtggggcaagtgggtggctgagattcgtgagcctaacaaacgctcacggctttggcttggctcttacacaaccgatatcgccgccgctagagcctacgacgtggccgtcttctacctccgtggcccctccgcacgtctcaacttccctgatcttctcttgcaagaagaggaccatctctcagccgccac

SEQ ID NO: 151150 - DNA, 292 bp, Arabidopsis thaliana landsberg
aacgttaaaggtatcaaatcacttcaccatgaaggagcaggactcaaggtttttattctttccctactcccatctttttaaaagcctttttgtttgtgtttcaaccgaatctctagtaatgatcctcttggtgttgttcttgttttctgaattgtcactatggttttggatgcagggggaggataaattagggagaacgccattaatcttagcttgtacgaacgacgatctatatgatgtagcaaaaactctgcttgagttgggctccaatgtcaatgcttatcgttctggt

SEQ ID NO: 151151 - DNA, 285 bp, Arabidopsis thaliana landsberg
gttatttttgtagcaaatccattggttcttgatgatgatgttaagacagctctcgaggttgctagagatgaaggttacagtaatgtcgtacgcgcaatcgaggtatatgcttgtaacacttatttgatatttactgctattagacgagtcatgagctttttataacttttagactgttgattcttgtagagtcatatctgcttgttctctggttgtatgcgtgagtattctggctccaggttgcttaatttatttgctcctcagcttctttcaagaaaagtgtga

SEQ ID NO: 151152 - DNA, 851 bp, Arabidopsis thaliana landsberg
gcggacgaagctctctctctttagcttcgatctctccctcgcttcgatctctctctcgactgctactcctggttagttctctgtcaaatattcgttcatgtgactctcgtcgatttttgtcttgatgcaacttcatcgctttgttcttcgctattcgttgttattgttgattccgcatatgcttcctttgatttcagcttgtaggtttgtccaaatttcacttgctctgttcttattgttgttgccaaccaagtgtttgatgaaatgcctcacagaatcagtggttgttttttttttggtagagcttgtaatcacttgtgctttgtttatttttggatatgtatgctgcttggagccacattagattattcttgattcattgtttttatgaactctagtagtgttttttaactgattcttaatacctctattatcttgtgtatgagaaacaagtttattaactcgattctgtactttattgttctttatgattccaaagattacttttgtttatatcattcgattattttctacttaatgatgtttttcaattttctctactacaggaatgtacatttgttgatggaagtttcttcagaattgatttcaaaatctctggtaagtcacttgaagcaaactgcaataataatgttgaatggaaacgtttactaggaaaggcttttactttgaatttgattatgttttgagaagataataggattcaactgaatcagtatagttaatggtagtagtaattgagatatatggactaaataattacagagctgaagattcttgacttggaacaaatatgcctcacagaacaagggcggtaacggacactacttttc

SEQ ID NO: 151153 - DNA, 371 bp, Arabidopsis thaliana landsberg
tattgatacaaatatgtgaatttaaatcatttagaaagtgatacaaaatttaaatcaataataaccgatgctaattaaagatttagcatcagttgcactaactgatataattgtttattcaatttgtttacataccacatatctcccacagaagaaaaaaaaacctccataatttttttatatatagtgattctggttttagatggtgtccaaagagtgtaaagttactatcccaactaaatttaagtgttcgcttaatattaattaataaagatatttgtttcataagaactaatttagtattattttataagttattataattaatataaacacttaacattatttattttaaatgttgtaaatattaa

SEQ ID NO: 151154 - DNA, 95 bp, Arabidopsis thaliana landsberg
ttttgacaacataacaaataatttttgaatagtttagttgttttggatatttaggtccaaaattaattgacttatttagatttataattataatc

SEQ ID NO: 151155 - DNA, 357 bp, Arabidopsis thaliana landsberg
atttcgccgcttaattgattgctgaaggtgataatcttgtgaagttttcttctgtagcgcaaatacggcggcaattcaccgcagaatctgtttgtcgagacatcgaattcagagatttctgagaatttcccgagattccttggtaacgtccccgtgaaactgttgttgaagattttgaattcaacgagattaggattcaaagctacgacatctggtaatcctccggtgaagaaattatcattgagattgaaagagataagttgcagagcagcgatcttttccggtagttcaccggttagattattccgcccgacatcaaaattcctcaattcggttaaaaaaaaaatactctccggt

SEQ ID NO: 151156 - DNA, 493 bp, Arabidopsis thaliana landsberg
gcctacattacgttcagatcaatgataactttgccaagttatcagaggccctctatgtagctgagcatatgcaatataggctgcttcaatgcgttccaaggtgcaaaatgagatggtgatgaaggacaaggaaaggaaagagcaggaattgagggctcttgcccaaaaagctcgctccgaaagaaccggcgctgctatgagtatgcctgtctcatctgacaggggtaggagtgaaagtgttgacccaagaggtgattatgacaactatgaccaggatagaggaagggaaagagaaagggaagagcctcaagagacgagggaggagagggaaaaaaggattcagagagaaatgatacgagaagagcgtcgcagggaaagagagagggagagaaggttggatgccaaagatgctgccatggggaagaagagcaagatcaccttagacattataccgtgacatcagtgagaaagttgctcttggaatggcatctac

SEQ ID NO: 151157 - DNA, 651 bp, Arabidopsis thaliana landsberg
aacataaagcttccatccgatttagccattgtcgatcgctattgtaagatctggtctgggtcctcgatttggtgagaattggcgggtggaacaaaactctttcttaaaggctctgcagaaattaattctctgctctggctggatctgatagtgattttacagattgttcaggtgctttattgggctgtgtttcttcgttagtaaagctttttgctttcctttagtttagtgaaatcttaaaaatgtttaactttgcggctttacttcaattgccttatacactgtgcaggtcagaaatgggcaatccgggatcagacacagagagaaacaagagaaatgtggtctcaagtgtgtttgatcctgcactctctcgattcgttggattttcccagaaactccaaactcgtcttaaggtcatgctctgattccacacattgcttttcaataccttgtgatgtttttgatctttagaggagctgaaaaaggaagcattttgttctctttgtcacagtcccagctgaagaatttgacagatgataagcatgggattggttcttcatggaggcaagataaaggaaactcatcgatctccatgcaaattgatctggagccacagctagattgttggagggaaaacccttaatggaatga

SEQ ID NO: 151158 - DNA, 736 bp, Arabidopsis thaliana landsberg
gcgtttcttcaccaaccctacacgaaccaagatagatagaaaccttctccttcttctgcttcttttatcatcgaagaattcgaatcttcttttcctctttttgagattctctaattatccttttggaagaggtaattcgctatcttcttcttattcttcttaccaagtcgcataaatttctcttttttgggtctttccccgtatttatctgtaaattttgtttttagggttcgatttcatgccgattagattgtgttaacggatttttcggagtttattgatagttatttcagtttgaaatccattttaggggttacgatcgttgacttgtgttaagtctatttcaccaaatgtatcatttcttagtgtctcgatttttatcgaattatgctctcgtaatgaaacttcatcatcatgtagatgaaggattttactcttctgatacaaaaatttgttttttgtgaaaaaaaatctgtttccttttttgttctgcttaaaccctataattagaaactttcgtcgagcatttctctataagtttgtacagtttgctctatttcatttggggaagaaattagttacttctaaattttcgtatgttataaagtcttgttctgcaacaccattactgacgtttttgcgttatgaatatactgatacagtttcgtgtgagagagaagcgtaatgggctgctttggttgttgtggtggtggtgaagatattcgtagagtttctg

SEQ ID NO: 151159 - DNA, 433 bp, Arabidopsis thaliana landsberg
aacccaagctcaaagctgccgacttgacctctccaacgagctattcggtggcgtcaacgaagcttgcggaagaaaccttgaccggagtcgatgttgccctgttttagcagcttggctcttcgcagctcacgctcgctctgctctccagttaccagctcctgctccgactccggaatcttctgatcccgacgaacccatgaagcctgacgattctcagaagtgcgtcaacacattgcaaagcgctctcttgactaaacaaatcaagatccctcagcctaactctagctgcgatgcaatcctctgcttctgtggtattcgtctccaccagattagctcactctcttgtcccgccgctttcaatgtctcctccggcttcaaaaacgcaactccgaccgccgccgtgaagaatcttgaaaaagaatgccagaactct

SEQ ID NO: 151160 - DNA, 218 bp, Arabidopsis thaliana landsberg
aatgattccaaggttaattcacagatggtctgccttgtgcaccattagaatcttgaggattattgttaccagtgcctcccattgatcctccaaacatctgcatcattgatcgtaatgcacccgataaatcttccggcatttgctctgtgcctccgagatctatgttgatatttccgcctacatgtatctcaggctcatctgcaccatttctggtacca

SEQ ID NO: 151161 - DNA, 417 bp, Arabidopsis thaliana landsberg
cccaacgatgttccatgcgtgccggaacctatagaatctcgttgtatttgtgttaagtcttttcttggagaaggggcttggttaaattcaatatatatagtccaatctattgaagtactagtacaccagctctaataagctgatgtgggtaagtcgttcaatagattggactatgtatattaaatttgactaagagataaactagagaatgggaataaagaatgagaaacggtattagaaagttctttgaggaaatttagatgtattttaaattgaagatgcatttagctataaacatagtggctacgttcctcttagagatgaggagagaattatattctattattatttggtttcttttcttcgattgtgtatggattcaatacttaattgtcaaaagcatcctatagttcagtt

SEQ ID NO: 151162 - DNA, 594 bp, Arabidopsis thaliana landsberg
aaacccacacctccagaagaaaccaaggcttctcagcctatagctgaaattcatggtgatgatatgacagtagggaatggctcagatggtgcaattaataacgaaagcaatgacagccactcaagtgcctctaacagttcaagcacccatgaagaagagtggctcccaggagaccagtctctacctaactcaaactcagcaagtagcagcccgggaaataccaaggtcttggcatacagcagaagaggaagaggccgaggtagaggaagaggcagaggaggtcgaggcaaaggacgggccaaataaactttgtaagatgagctgtacacaacaaacacaatgcagtaggagagtattatgatgaggtaggattatgtgacatctcttttagatttgaatcccactctgtttgtgtttggtctttggtcacttcgttatctttttaggttatcttgtagtatttgagttaggaggatttgtcttgtcgagttatgtggaattgtgtctctgttgtttctttcatttgtctgaaatctctaatgtttaatgttgtaagtttgaagcttggtttcgttccagctgacgaagctttgt

SEQ ID NO: 151163 - DNA, 202 bp, Arabidopsis thaliana landsberg
ggcaagacgacgatttggaaaacgaaattaggttcggagtttagactaatctgaaaccgatattctttcaatttcaatattctagttcgatttcccaaaatcccctcttcggttattttggatcacaggtaaacgatggaggagatatttgctctgatagtctcaatgattctcatagttgcggtgattcctatgatcttta

SEQ ID NO: 151164 - DNA, 91 bp, Arabidopsis thaliana landsberg
gttctgagacatctgttgtacctaatgcgcatttcagagaagtctatccaaagacgagttgctcttgcccttgctcatctctgttcacccg

SEQ ID NO: 151165 - DNA, 362 bp, Arabidopsis thaliana landsberg
caagaaaaatactgcattgattttattatgtttatatataaaggaaaaataaaattgatatagttatgtaaccaagtaataaaaaaaaaagattgaatataacaagtataatttaaactcagtgacgtagatgcaatatttttcaaggcttccaggctttaggaggtggtggagtcggagagtagagaggaggaacactattgaacatcgtattcttatcaatttgctggccaccactgctggttaaggaaatgagagcagccacgaggcctgcgttaccagagagagtaggctcacttgcgttataattgtttcgcaagtcatgaaactcatcgaatttgtttggtccaccaaccatagct

SEQ ID NO: 151166 - DNA, 618 bp, Arabidopsis thaliana landsberg
tgagcaatggtggtttgagcattgatgagaaagaagggttgatagacaaagatgaagtcatgatccgtcgaatgaagaacagagaaagacaacgtaggtatcgagcaaggaaacggatgcgggaagaagaagcgggtaacgatgataatctttcgtttgagacaatgggaaaacaagaagaagaagaagaagaagacgagggactagagtttaatggacctagtggttatgttgagaactttgtgcggcgggtttattgcgatagaaattggaaaaaagaagctagaagagctcatttgattatgaacaaggctcaagatagttcttgtgagtcggttaaacggaagataaggccgcatcgtcgagattggaaagctgaagctagaaagaagaaaacttgattcttgaggattggtcaggctgctagaggatcttgagaggtgatcgaggaagagaatgcacaaacaaagcagatttcagattcaataatctcttcaagatttctattattgtagatattggaaatgatcaagacaaaagcaagtgatttgctttttcttgtctgtgactctgtctgtgtattcgaagatccatgtagtattatactaaggtttatgt

SEQ ID NO: 151167 - DNA, 346 bp, Arabidopsis thaliana landsberg
gaaaattttgactcaaatgagttgatgggtcaaatgggttgatgagtcaattggtttgatgagtaaaatgagttgggttgtaatggttaatggtttcaatggtttacccaattaacccatcaaattttgtaaaattgaattaaaccaattaaaatctctaaaccaatgccaatttaagtttaaccaacacatctaaaccaatttaataaaattaatatttttccaaatttcttaaatatacaagcgatgaaattaagaaaaaataaactcgtaatttttccaccaaaaaacataaacccgtgattttcccgccaaaaacgtaaacccgtgattttcccaccaaaaa

SEQ ID NO: 151168 - DNA, 791 bp, Arabidopsis thaliana landsberg
atagatttagttgaacccaatgtgacaagtttattattctctcaatcagtgctggattctccaaatcactttcaaaaacattgaattcgaatattgtaatacgaaaaacaaaaattgtggggaggggaaatagtcaaataaaagggtaatggtgtcaaagtcacgcaatcatcggttacatacattactcttacatatcgacatacttaacgttaatcaaatctcgtttgacaaatcatcatcaataaagagcacaagaacaaagaagaaggaaaaagtagagattttttgggaatcagaatcatcatcgatggtgaatccaaagcgtggcaataggtttttcaaatacagaattgtgtaaattgctctctatcttcttctctttcaaattctcttccttttgtaatattcaataactttttccccactttgatgggctgcaaccacatattcttcttctatctttaacttttcccaccaaacttctccttttttttctttttttttgggttctgggtctgcttttttgttgttgttgttgttgaatgaaggtccgtaagggaagaagacagatgattgcgaaagagcaagacgaatacaaattacgccaacaaggtcttgtttttcaaatggcttctcttttcctctctttcgattactccttactcttcttttggttgctcttccgcgttttcttatacgagaatcacgaacgaaaactccagattttctagcacacctcttctctcttcttctctctgcatcgccatcttgttttttcccccaaattt

SEQ ID NO: 151169 - DNA, 413 bp, Arabidopsis thaliana landsberg
acaaagataattttattcacaaagggaagcatgaaacggaaaatcaaaagtcaaaggttaagagacacgattaaggaactacatcagcaccacatataggacacgtggagcgataagagagaagattagaccttctctggcatgaggtgttggaacgactgttcacataaatctttgtccttagcttgggaagtctctagcactagatcgtctctgccaactgtggaacgaacagaagcagcttgtaaagagaaacttagagacatagatatggcccgccgaagtgtttgtcgtccatgagagaaaccgctcctgtagccctgcctcgaactcacggcttgaggtaagactatgtggcttctccttatcagattcaagctaactaattgtctttgtacctcctctggtaattg

SEQ ID NO: 151170 - DNA, 595 bp, Arabidopsis thaliana landsberg
aaaagttggcaaagtatcaattgttggctcgtcctctgctataaggtacaatgctggaacatttctccttagctattgattattatgatggaggttatattcaacttagagcaaaatatgtgaagtagatcttttgttgtttgaagaaatcaatgtaatatctaaattatgacatattcttacagtcttctgtgcctttcaatctgctacaatgctttcttcaactttgcagaaatctgtacacattctgattaatctttgacgttttcttaatcgcatatgaattaagtgttgtttcttctgtatcaaatccaggttagagaatgaaccgagcagccaaatcttcagaagttcagaaccacctagtccgaatcataatcagaatcaaaacagcaaggtgtggcagtggctccctaaggttagcatcaagatccaaacctagtaccttgagcatcatcaatctacagagttctccctccacattcagcggcattttcgtttgcttttatagtaaccactaagctcaatctactgaaacaaaatatctcgttgttgatgatattatacaaacaagtaaaatgtctatttgagcttc

SEQ ID NO: 151171 - DNA, 454 bp, Arabidopsis thaliana landsberg
ggacactacaatgctctaaacatttcaaacatcttcttggtaaatagttcattggtttgcatttcggatctgagttagtaaaattatatcaagtgaggtgaaatatttgaatagtttgtgacagagatccgcttgatgatatcataatcctggtataaggagctatatccctgaggtgaggtctgagaggagtcaccaccttacaagacattccgctcttgttacaaattctgtttagttttccaaaaaagatcatctttgtttttagtaagaatgtagtcactaagtcagatatcaatgacaaataccaaagaactagtgttttttgtgtttcatccatacatagatacttatcctgtgtcttttttagaaatttctttttgtatgacgtttcaaaattttgattgactattgttagtggtatatctttgagttaataaacgagatataatct

SEQ ID NO: 151172 - DNA, 1819 bp, Arabidopsis thaliana landsberg
agagaagatggtgaagaagcaagacactgatggacgacttatttctgctttctgttgtgcgccggcgttggcgtggggtacttggggactactagagggtaaaaaagtatgtgtgtagtgagtgatcagtatccaagaagttttcttttcttttgagtttgtattttggtgtataaatcacatacgttgcttgcaggctacatgttacccggtttttatggagaaactagcggcttgtgcgacagctgttgagtcaagagtggaaattgatgggaaaatagtgaccagtagagggcctggaactaccatggaattctctgtcacgcttgtggagcaacttcttgggaaagagaaagctgttgaagtctctggccccttggtatgtcttatccctgactcttctatcaaccttaatttggtctccaaataatcgacagatcttagaggccagtttctgttgagaagatggctctccgcaaagaaggatatatttagtagctgattcgaggggagcacttatttgatttaacactctttaaagcaccctagtattgttagttcatgtaaaaaaatacaaatacgttttttcgacctcactaatactgtgatttccttgaagcctaggcctgtggctgaatttttcagcattatttcccctgtccactgatcagtgactgttcttgtgagattacagacagttgaaagctatataggacactgaaaaatttaggtttccacaaagaaacaaccattccttggtagcataggctttattccatggtaacctcttagtctctattcttcccctttgcatatcaggtgatgcgtcccaaccctggtgatgagtatactattactgagcttaaccaagtcagctggtcattcgagggtaccccacaggtagctttcaattgcctgtctggcaaaatgaaaagaaaaaaaagactggcaaaacttttcacacttgctttactgagctcatgcgtctttcttaatcaatcttccgtacactgagagatcatgtttttccttttcagattcttgtacccattgcagatggctcggaggaaatggaagctgttgctatcattgatgtcctgaggcgggcaaaagcaaatgttgtcgtagctgcgcttggtaacagtttggaagtggtagcatctcggaaagtcaagctggtggcagatgtgcttctcgacgaggctgaaaagaattcgtacgatctgattgtgttgcctgtgagtgctaacttcttcaaattactaaagtttatagtgtcaagcaagttgaggccaacatgatgaacttctctttttatttacagggtggtctcggcggtgctgaagcatttgcaagttcggagaagctagtgaatatgttaaagaagcaggcggaatcaaacaaaccatatggagcaatttgtgcctctcctgctctggtgtttgagccacatggtttactcaaggtacgagagtaatcacaatagcacacacatttgcttagatgtgtaggatcattactatatatccgatggcatggagtattctgttatcaaaccgttatttttgcacttaaaactaagggaagggtcacaatttttaatggatttttttacagggtaagaaggcaacagcgtttccagcaatgtgcagcaaactgacggaccagagtcacatcgagcatcgagtcttggtggacggcaatctcataacgagcaggggtccaggaacctcattggagtttgcacttgcaattgtagagaagttttacgggcgcgagaaaggacttcagctctcaaaggcaacacttgtgtaaactc

SEQ ID NO: 151173 - DNA, 1465 bp, Arabidopsis thaliana landsberg
  unsure (1)..(1465): unsure at all n locations
ttgttttgtttgtctcaaaaattgtctatgtttcttcaggtatctcctacagcactgatgagtttggcttaagagaaggcttttagcaaatatggagaagttgttgatggtaactagctttctccctttaagttattgcacaaaactctaacctttgaagtattaaattccttttgctatatttttgtggttttactcttaacaactgactaatttttatcannnnnnnnnnnnnnnnnnnnnnnnnnnnnnnnaggcagatctaggggctttgctttcgtaacatttacttcgactgaggaggctagtaatgccatgcaattggatggacaggtatcacataaatgttccagcttcttgtgatactaagatgttgtgtggctttagtttattcctttgtcgtttcttttccttttctgaccaatattgttttgttttgaatgtttgacttctttcaaatcgatgtgccttgacgattcatttatttagaacacttaagttttgtggcctttcaaacgttggcaacataggtagggtagatgtttatcatctagcttgaaatactattaatctgttaagcaacgacttactctctcttaatgatgggtcgaatggtggagcaatctttctgtttgtggattgtatatcttgttactctctttttttttgcatataggaccttcatggtcgaagaattagggtgaattatgcaactgaaagaggaagtgggtttggaggaaggggattcggtggtcctggtggtggttatggtgcttcagatggtggttatggtgctccagctggtggttatggaggtggtgccggtggttacggaggcaactcttcttatggtggaaatgctgggggtggtggtggtaactcttcctatggtggaaatgctggtggttatggaggtaaccctccttatagtggcaatgctgttggtggtggtggtggctatggaagcaattttggcggcggcggtggatatggtgttgcaggtggtgttggtggaagtgaaaactttgcccaaggcagctccactaatgctggctttgatgacaagtttgagagcaaccaaccattaggcaatgatacggatcatcagactgaaagcggtttgggaggcgatgaacaatttggtggcagtgacaatcaatttggagatgcagagaacggtaacacagagaatggtccagttgggtttgatcaaactgacgatggcgatgttgccaagagagcctagtctccacgatgttgtgccgtgtatgtttacgtcatggaacttttgttttgcagtttcagtctaaaacttacgaactttcttaatctctctatttaacgtttgaggttgtttatcatgtagagagacctctttagttggtctgtttttcttaaaatgttggccaattaataaaaactgtaataacttctgagttctaacagagtcgttttttatatcgaa

SEQ ID NO: 151174 - DNA, 1155 bp, Arabidopsis thaliana landsberg
atcgatattcttgtttactactcagtaaacctctatcaacaagctaaaaagtgaatttttttgggggggaagttcaaattagactagacaaacaaaaaaaagttcattttcctcccttgcttgcatatgtatagataattcaaatatagatagatgcagatctatagagagtcttccatctttttgcatttcccgaaaattccctgttgttagatcaaatcctaatcaattttgtagaaatttgtaatggaagaaaaatttttctttattaatgactattaactattataagatattaagacaaaaagaataataaatctagcaaggggattatgatacatctagttgtagttgattttgaaagatgaataagtccatttatttagtttggatggagaatttagtggctccaaccacgcatacaaataaaaatggtctaacaattttggattattaacgaacaaaattctgatttcaggtttaaaacctccacctaattggtcttatagagactcttatgtaatgacaactccaaaatataatattttttcttgcaatccttaatcaaaaccacattgacccggtccaaaactaggatctgttaagttaatcttagacggttagacccatcacaagactctaatattataaagtagtatataaatttatttataaaactctatatatttagtgtaaccatccataaataccccaaaaccataactcagcatacccttcttcactatctcctcactcctctagcaaaccacaacaaaaacatagaagataacaaagaaaaccccatttcccaagggaatggcgattataaaccggagcaagctgacacaaacgactatgataaagcaaatcttgaagaggtgttcaagtttgggaaagaaacagagcagtgagtataacgatacacatgaacatgatggagactctcttcctctggatgttcccaaaggtcacttcgtggtctacgtaggagggaatcgggtcaggtacgtcttacccatttcgtttttgacccgacccgagtttcagcttcttctacaacaagctgaggaagagtttggcttcgatcacaacatgggtctcactatcccttgtgaggaaatagctttcaaatctctcatcacctctatgcttcag

SEQ ID NO: 151175 - DNA, 1041 bp, Arabidopsis thaliana landsberg
tcaggaacattaataaaggaaatgacaacggcgtgtccggcgaggacaagctcactaatggacgatctcttgggcctccttagaatccgtatcaaacgtggcgtcaatttagccgtccgtgacatcagtagcagcgatccttacgtcgtcgtcaagatgggcaaacaggttaatccattcatcattttacaacttcacatgcaatttcattacatcaaaaacattctcaaattatcatattaaatcttacagaaattgaagactcgtgtcattaacaaagatgttaatccagaatggaatgaagatttgactctctccgtcacagactccaatcttaccgtcctcttggtactttttacatactaaaacatacattaattttcttatcataagatgttgtttatattgataaaactatctaatgttatatgtagacggtgtatgatcacgacatgtttagcaaagacgacaagatgggcgatgctgagttcgagataaagccctatattgaggctttgaggatgcaactcgatggacttcctagtggaaccattgtgaccgcggttaagcctagtcgtcgtaactgtctagccgaggagtcacgtgtcacctgggtcgacggcaagctcgtccaggatctcgttctcagattgcgacatgtggaatgcggagaggtcgaagctcagcttcagtggattgacctccctggctccaagggtctatgaatcttttttcttttcttatttaccgttactttgagttgttttctttcaaattgaactaaaccaagtaacagcatgaaaaaaaaacaagtaatttcaatcttgaaggatatagtgaactagaaacacgtattaatccatggaaatataaggattaagaacgttgagggaagttttgttcccatatggtgatcgagtccaagtcgagtcgtggtggtggatatgtaaatgtggtgtattgttgatgtgtatgtatatttgggctagctatgccttaaataaggcatttacacgaacaactaatacagatattttattt

SEQ ID NO: 151176 - DNA, 1283 bp, Arabidopsis thaliana landsberg
agacaagggcagttacactcatttgttcttgtacttagggtttttgttttggctgccttaagtttcataggttgttcatagttaggttcattcgttttattgagctgtacaaaactacacttttcagaacagattgtgtggtcacaggattgtggaactagtatcaaataggaagttcaattattaattagcttcctttgattgatatatgcgcttcattgatgaaccctcgagtctgcttttgttatttgttcatgaggtttgcgtattttcgtttaagtaatgttgtttattatatactcgtgcagcatttttggttttggtggcgttgagacatcatcatgtctagcgcagaggatgtgaaagagcaaggaaacctcaccaacgaggcagagaagtcaatgccatcatcacagcaggaggtttccttttaattctcacactagatgttgatcaaataccgtaatgaatacaatatcgtgacctaactctttctttaattgcattgtgtaggaggctgttgtaaagaagaagtatggagggctcatgccaaagaaaccacctctcatttccaaggtaagtgaagtaactggtctaataagagattttggggtttcattcttggtttttctgagatgtgtttataatcaggatcatgagcgagcatactttgactcagctgattgggctcttggaaaggtaaactattattaaacttttaacccacgaatattgtctcttttgagttaccatataaaagctctctctaaggttcccactctgatagtgttattattaatgtctaaaacagcaaggtgttgcgaagccaaagggacccctggaagcccttcgtcccaagttacaggtaaatgagcttgaaccctgtttcagctgtgttttttttatgctgtttgtttccaattctaagatcttgtccttgttttgcagccaacgcagcagcagacacgttacaggaagtctccatgtgctccatctgagggtggtgaaggtaaatatcttcattttatcatctccatcccaaagcaagttacagacttattgatccatcctgttggatctgttattgttacagatggaggagctgctcaggccgagggaggttcaggcaactgaggcgtacagagacagagagatgtatgaaaactcttgtgtaagaagtctgttataatcggatattttctgtccatttgaaacatcagatatggctttcattaaaatcttaacttgatcgagaaattatagtttacccttttggtccggaa

SEQ ID NO: 151177 - DNA, 861 bp, Arabidopsis thaliana landsberg
atgcttactaaaagaacccatcccatgatcggaaagatatcggagctccttgtcggtgtcaaccgatccacggcggctcctttcttcgacgtcttgatgacgagccctaaaagcccactggatttcaagattctccctcagatatctcaaagaaacagttcaaagaggttctacgatgacaatcttggtggctctgttggtctagggattgtagccgcgctcgagaactcaaacactcgtcgaatcacgagcgtttgtagatcggaaccgaaccaacccggccggtctgatccggttcagttcatgagccatggtggaagcacggacggagaagacgaggagatgttcataatggacgaggaggattacacgttggtgacatgccaccatggaccaagtggatcttgtagtacaagggtttatgacaaagatgggtttgagtgtttctcaagtaagatcaacgatgatcgtcgggaaagacttttcgtggtcgatgtcgttacggaatctccagagaattcgccagagtttcagggtttgggtttcctcaattcatgttacttgtgcaggaagaaacttcatggtcaagacatatttatttacaggtataacttgggagcatatatataagtatttttatactatggtcgtatctttcgattgcttattgctttttatatgcagaggagaaaaagcattttgcagcacagagtgtcgatcgagtcatatagcaaatgatgaaaggaaagagagatgtagatcaaaattctcaacctctccttacaccgccggccaaattttctccaccggagttctagtgacttagccggagttcttctactgatgagtttatatatatat

SEQ ID NO: 151178 - DNA, 1348 bp, Arabidopsis thaliana landsberg
  unsure (1)..(1348): unsure at all n locations
agcgcatagggcttgaatatgtttttatgaatagtcaccttcttcgttagttgggctctcgacgctaccgtctattgccaggtagtctaccagttttgtatgtccccttttactttccattaagattcttatatctagatctgtccttactgttcaaatcctgattgtcggaattgtacttgtgaaaaaacaccgagcaacttagctttttgttcgaattagctaaaaaattaggaatggaacaattttcctttgtgttcgtcggttttgtactaaatacaattgacaattttttgggtccagagaggtttcattgtttatccttaatcttatgcttctaactcaaagttgttcttagttctgatttggattgtctgcaaggcttgtatatgatacttggtcaattgagacatatagttgattaattgcgagttatatactgtgaatgaatgaagttagatactactaccaatagtgtttactctcatactaactgcctctgctaatgattgaagcattgagattcctttttagtctattgatatcgtgtgtgattttgtaggttatctgcttaacggatttagaagctgattacttgaacccttttgaaacaagtacccgtatcaaccgattagtaatacctgagtttatcctccaagggtcactctgccttctcttcctcctcacatggcattgggtcttctttctggtcgccgtccctgtaacagtctatcacgcaatgttgtaagtatctatatccatccatattgcttatgattcttgattgacatgcgtggaaactaaatacgcgcctcccattgttcttcagatacaaagagcgacgttatctcatcgatgtcactgaagtgttccgtggtatcagctatgaaaagaagctccggtataccaagctncggttctacgtctttctcttcatcatggttgtctttaggtaaaaaaaactacagctttagctttcctattaagatcgggacttactttggttcttctactatgaacttacttaccgagtccataaaacatttttgcaggctcactctctctgcggtctatagcttcacggaagatgatgatctacttcatttgttttgatttatgcgcttgcgctctgcgttatcaaccactctctctttattttctgagtgtgttttagaaaattgtgacaggtttttattacgtccctgcttagaattagccattcagggattcatcatgtagctttatataacgtatgattaccgaaaactcatcacaaatcgtttgacatggagggtttcatcagttttgttttgcgcaatataatgttcagtctcatcattgaagtcat

SEQ ID NO: 151179 - DNA, 706 bp, Arabidopsis thaliana landsberg
ctttccttgaatgagatttgttaccagtagtgtaaatggcttaatgttccattatttttgcagttgatgtcaccaagaaagccgaccctaaggctaaggctttgaaagctgcgaaagcaatgaaatctggccaaatcgttaaaaagcctgcgaagaagatcaggacaaaggttactttccacaggccaaagacattgaccgttcctagaaagcctaagtacccaaagatcagtgctactccaaggaacaaattggatcattaccagatcctcaagtaccctctcactactgaatctgccatgaaaaagattgaagacaacaacaccttagtcttcattgttgacatccgtgctgacaagaaaaagatcaaagatgctgtcaagaagatgtatgacattcagaccaagaaagtcaacaccctcattaggtaaacactaaaacttcacttagatatgggtgtatgtaaacatggaatgatgagtgtatgtttgtatgcaggccccatggaacaaacaaggcgtatgtgaggttgactcctgattatgatgctttggatgtggctaacaaaatcgggatcatctaatctgatcattgtcgctctgtgatttcacatttggcattataacagacttctggtttttaaccgtccatagtcttcagttttgctagagactatcatctctatgttatgctctatctttgaatt

SEQ ID NO: 151180 - DNA, 1540 bp, Arabidopsis thaliana landsberg; identical to SEQ ID NO: 29838
  unsure (1)..(1540): unsure at all n locations

SEQ ID NO: 151181 - DNA, 1018 bp, Arabidopsis thaliana landsberg
cttgatagctcaaaatattatcttcctcttttgaccatattactatattttaacaacgcttatttgggggaatttgaataggttcaatgatggtggtcctgcagctaaagaattggctccaaagcttgatttggttaaggcacatttatcttctagattaggagtaacattgcccaaaatagaggtaatgacctggttatgatgttcttgtctcttgttcgcactctttaaaagtgtcgttttgtgacttggagaatgaatttttataggtgagacaattcgttgctactattattgccctgaaaggagtcggaggcttactctttgttatcggaaacatcttcggtgcttatcttctggttaggcttcttcttgttcatcttacaaataagggattcaaaaagcttgctatttgtatgatctcttacaatcttaatcttttttgtttcaggcttcctacttggtggttttcggtcctattctctatgatttctacaactacggacctcaggaacgtcatttctctcttctgttgacagagttcttgcaggtttgtccagaaacttattatcaattatcgtaatctcaagaaacgcagctttgcacctttaaagtttcagccttgtaaagccaagagatcatactgtttatcacaatggacaatatctcgataaaaatctcatgccttttgttattgcagagcgttgcactctttggagcgttactcttctttatcggaatgaagaactcgacacccgccaagaagaatttgaagaagaggacacgtaagccgaaagctgcctagtatcaatattagttttcttctggttttgccatgagcaagcaatacctttgccttttccttttttcccgacaaaatctttccttagaacttttgttttctttctgttttaggattcttagattagctcatgatcttatactgtggtttgaaaatggggaacttgaagttttggtttgttgaaactggacccatgccagagacagaacaatattt

SEQ ID NO: 151182 - DNA, 837 bp, Arabidopsis thaliana landsberg
tttagtcttcaaattatcaactttgtttcttttatcagctttgtcatcttgaaattatcaacgttttgactaaatttaaagaacagttgtgttcgttcgtgccattcttttgaatggttatacttacatatttcttcttgaaaagactttgaatccaagaacccgtgaggaagtaatcctagtgaagagaagacgacaaagaaaaaggttaggcacattttcccataatttttctcaaagaggagacattatttatctttgtatgggttttcttgataaagattagatattgaaggaatctttttttcattttctgtcttttaggagcctataaagatccaaagcttcccttgtctttagttctcatcaaaaactttgaaaaacgtttggagttattgagagagagagagatagagaaagatgttgggaaggcaaagcaatggtggaagattcagacatgccagtgaagatgcagatgcaagctatggcattttcttttcaagctcttgacctttttgatgtctttgactgtaaatccattgctggtcacatcaagaaggtattagtaattattttcttcaattctatttataagtcataaatacatcattatcatctatatataactacttggttaattttgtttgttctataatgaattttcaggagtttgatgagagatatgggagtggatggcaatgtgtggtgggatcaaattttgggtgtttcttcacacattctaaagggacttttatctattttcaattggagacacttaagttcctcatctttaaaggcgcttctactccttaattaccctaatcatggggatgtttt

SEQ ID NO: 151183 - DNA, 1498 bp, Arabidopsis thaliana landsberg
aagcattagccgtgaagtaatgtggccatgaaaaaaggattaaatggaacgcaattccctgggtggtagagttgtataaacacctgtttcttccacttagctccatggaacaatatgctactactgaaacatggaagaattgaaatcttagatcaaaacactatgtatggatggtatgaactgcctaaacaagaattcttgaacagcgaacaaccggagctattactcactacatcaaaaaaatttccattaataaaagatggaaatccattggaaaatcaaaaatacgcatgtcggattaaattgttgttgctatctgttccaataacgaatcaactgaataactaaataaaatagatagacctttctcttcgtctcaggtcgatagatcttctcaattggaagatcccctatatggataagacacattccagttgaccgagcctaattctaattgttttgttccgaagtaaagatatccacggagtggttcgccctattcagatattcacgaccaagaagtactggattctctttaggataggtcctgaaaggagaaggaaggctggaatgccgccaggcgtctattattgaattcacccgacccgatagtaccaattttggtaacgtccatccagtgccaaagtcactgaatgggtaagtcaccaatccctaaaacggactatgtaatgtacttgaatctgccgggttacggggggctttttaccagaggtttagattgtatcaatctacccttgtgtgattcctgttgaatcatatactgcggggcgcagggcgcgacgatttcaaagcggactccccctccccattcattagatagagaagagccgcctattgcgcaacggacaccacgacaatatgcgatgctattacaatcgcttgaccctaactccagctgtaccgctctcatagaggaaatgctgataacagaaaagatccatttcaccacctagacatcttcaaagtgaatagtattccatatatatgatatcgctctagtaaggtcttgaatatatgacaatagtggagtgctcaagaatttttattgatcggtcatgtcatataggcccgattcggacatccatcagcctagttgtgaattagccgcaatatggccctataaatgttttgtatccccttcaccacagagctgcgcaatcagcgttcactctttgatctatgagtgtccaccccatataggtaccgacttcttccaaggaatgtacaagctctagtttgcactcgtaattggttacgaggatctgaagatcataaagataatactctgtttcaactaattatataattaagtgaatttttacctaataatgaaatctttaaattgtaggtaccatcgaagtcaacgatgaaattggtaatgaagatggtagaaatgtagggagtacttcagcagtggagggttcaaggtacagagattcaagcgttcggtcaaacaatgatgatttggaatctagac

SEQ ID NO: 151184 - DNA, 1075 bp, Arabidopsis thaliana landsberg
caatcctctgctgctcaatctctcatcatcggcatcgctctctctaaaaatgtctcagatggatcccgacgctgtatctaaggccttcgtcgaacattactattccaccttcgacaccaaccgtgtcggtctcgctggtctctatcaggaagcttctatgctcaccttcgaaggtcaaaagatccaaggagtccagagcatcgtcgctaagctcacctctcttcctttccagcagtgcaagcatcacatctccaccgttgattgtcagccttctggtcctgcttccggtatgctcgttttcgtttccggtaatctccagctcgccggagaagaacacgctctcaagttcagccaggtatctctctctctttctcttcgatttccgattgatctatctttgtttggatttgtttgatttgcttgtgagtttagttattagatcgctagggttttagattagctgatggatctgtaaatctgactctttcaaggatgtagaattgcaaattcgttgcgacttgttatctgattcgttttgagctacaatgatcgatgatgttatgactcgtgtatagctcattgatgaaaaactttgcatcagtctctgtttagtctcgaagaacaagtttggctctgagttttgttgattagattgaagagaattgttttccctcgccacaattgatggatttcttgtccatgaatgagattgaataagctggttatgtcgatgttatgtattgtttgctttgttatctctgatcttttttttgttttttttggtatctttgatcttgttctaacacaactacaaaacgtttggtttcattgtgtgctacagatgtttcatttgatgccgacgccacaaggaagcttttacgtgttcaacgatatattcaggttgaactatgcctgaacagaaatcagattgttgttagcatacatcattgttgcatttctatactatttgagcaaatccttctatcaatttttctcgtctttttcttgttattcctagatgatttaccttgggaacagaggaatattgtctctcatcatgtatttggtttggatt

SEQ ID NO: 151185 - DNA, 4228 bp, Arabidopsis thaliana landsberg
  unsure (1)..(4228): unsure at all n locations
tgagtgttaattacgacctatctagtttctttagttttattgctaactgggtttagctacattgtctacttagattcttgaaaatgaaaccctctttagattagtactaattttttggagtttttgtttttgaacggaatcttgaaagttgaaacttacaacatttttgcttttgcagcccattggttacactcgtctatcctctgtaagtaaaaccaatctctctcatatatacatttgtgtgttaaatctgttgcatcagttgatagagattttattgtaagcaaaactcacatttttaggccaatctttagttcagattcatatgaacattagaaatttttgtggaaaaagaatcaaaaacttaaccttttgaaacatttgatcctctgtcattaaggaataattaaaaaagagtacgaatcttgacttagatagatgcacgtatatccacacacacccacttagaatccaagacacgaggcattacacttttgtatgtattcaattatttattacaaaaaaatctgagaaaactaattatgtttgtgaaaaaaatgaacagatatgcatcagtgaaagcaatagagacaagatcattaccagaagatgaacaatggcttacttactgggttctttacgcacttatttttttctttgaactaactttctccaaacctctcgagtggttagtgaattcattaacacttttaatatcttcttaacatgtattcatcattagtttttgtttttgttatcataaggtttccaatatggccatacatgaagttgtttgggatctgttggttagtgttaccacaatttaatggagcagaacatatctacaaacatttcattagaccattctacagagatcctcaaagagctaccaccaaaatttggtatgttcctcacaagaaattcaatttcttccctaaacgcgacgacgacgacattctcactgctgctgaaaaatacatggaacaacacggtactgaggcgtttgagcgaatgatcgttagggtaagtaaaattcacgttgacatttacataatcatattcatatgtaatgtacatttggtaatgaatgttgtgttttgtgaatgcagaaggatagttatgaaagaggtaggagtagtagaggattcaataatcacatgatctttgatgatgactataggtactaataagttcttaaaccggtttaattagctactttcagtttataagtttgctatgtgacaatatattgtctgtctctatggtttttataatttgcgtggattatgtgtaagcccttatttaggaactgcttatttttgtgaaaaatcaaataaacattttctctcctatgcgtgtgtaagcaaactttaagtcaaaattcgtgggcccagctctgtccagttttgcacttaaatgattagactattcaatgatttaacgagttgggcttataacaaaatgggccgggcttagataattattaatgatatgcgaattttgaaaggagctaagaatgatgaaataaaaatttgaataaacgggagcgaagcagaagcgtaggttctcaaatcacgaatagcctctcgaatcatcgccggcgatcgacggtggtactgcttctacgtccggcgaggaaattttctggattctgttctttcgcaattgattaaccatagagatttttcattgaggtttttcagattgattaggatttgcttcgtcttcgattatcaaaatcaggaggatttgaaaaatattggtgaacaacgatttggtgaagaagaattggagtatagattgtttgtttctgaggattattcagagtggattttgttgttgtttggttaatgtacattttggagttgagagtttgggggattttgaaatcttagattttgaaggaggaagctaaaagtagtagaatgggttagataagaattaggaatatgattggaacgagattcgagtgatgttaaacgatttggttgagaattatgattcgaaagggaattagctctttgcagcagcttcaatggctgattccttgagaactagtctctctgagagagacgttgaacaggtactttactcttttatcacctttcttctgttgaatcattggaagatggaaacttttgttcatatatgcttagaatacgcaattgctctgaagaatcacattgagtttgatgtgtttatataactcagtttctacacctaagtcattaaaaatgttatcttttgatgtgattcctttttagtgggtatggtattaagaagtgtgtctttcctattcaggccattacgtcacttaagaaagggtcttacttgttgaaatatggacgtagagggaagcctaagttttgtccattccagctcacaagtgtaaggttttcttggactcctatgtttctctttagagagagagaactttctgtattcttttggtttgctcaattatattacatgtgaatttgtcataggacgagtctgcattagtatggtactctggcaaagaagagaagcagattaagctgagtcaagtcctgagaattgttcctggacaacgcacggtgagtttctctctgcaatattcatgtatgctcataaacaagtacagttccttagttataagttagtgtctgacatatgtttctataccatttcaagttttcaactaagcaactttgtaagatggtcatgcttctttcttccgttctatttgtttcgacttaatcttactctcatcttagactcaacagctaaagtttgtttcagcctacatttaagagatatccacgccccgagaaagagtatcagtcattctccctcatatgtcctgacaggtcgttggatttggtgagttctcgtgccaccttaatgagaaataccattcaccaattgttgaatattcatcttgcccttgttgatggtgttttgggcagatatgtaaagacaaagatgaagcagaagtttgggttgttggtttgaagtcattgattactcgggtaaaagtctccaaatggaaaaccactattaaacctgagatcacttcagcggaatgtccaacccctcatgcacgaagagtgtctccatttgtaacaattcttgtgagtaacaccacgtttcatgtttttaggaatttgaacgaaaaccttatactttgcattatcttaccacaggatcaagttattcaaccctctaatgagacttctacacaaactcggttgggaaaagtgttttctgacattgttgcaataactgcaccccccagtaacaataatcaaacagaagccagtggcaacctcttctgtcctttttctccgactccagcaaacgtagaaaattcaaatttacgattctcgaccaatgacccaattcggctcagtctatctagcgctgtgagcacctctagccatggttcatatcacgaagactttgatgccttaggtgatgttttcgtctggggtgaatctattagtgatggtgtactttgcggtactggaaattcattgaactccacgacagaggatgctcttttaccaaaagcattagaatcaacaatagtacttgatgcccaaaacattgcatgtggtaaatgtcatgcggttttagttactaaacaaggagagatcttcagctggggtgagggaaaaggtggaaagctaggacatggcttagaaacagacgcccaaaaaccaaagtttattagtagtgtcagaggattgggtttcaaatctttagcctgcggagacttccatacatgcgctattactcaatctggtgatctttacagttggggtgatggcactcataatgttgatttgcttgggcatgggaatgaatccagctgctggattccaaagagagtgactggtgacttacagggactgtatgtatcatatgttgcttgcggtccctggcatacagcagtagttgcatcatcaggnnnnnnnnnnnnnnnnnnagatggaacttttggtgctctgggtcatggagaccggagaagcacaagtgttccacgtgaagttgaaagcctaattggactaatagtaacgaaggttgcttgtggcgtttggcatacagctgcagtggtagaagtgacaagtgaagcatctgaggcagaagttggctcttcacgcgggcaagtattaacatggggggatggcgagaaaggccagcttggtcatggtgacaatgatacaaaactacttcccgagtgtgc

SEQ ID NO: 151186 - DNA, 599 bp, Arabidopsis thaliana landsberg
taaactcagaaacaaacaaaagatcaagaagaaacatggtgatgatcaagaccacaatggtttccctttttgctctagcggcggttctcctaatgattctagccccggcggcagaagccgtgacgtgctcgccaatgcagctaagcccatgtgcaacggcgataacgtcgtcttctccaccatcggctttgtgctgtgcaaagctgaaggagcagaggccatgcttatgtggttacatgagaaaccctagcctccgtcgcttcgtcagcactcccaacgctcgtaaagtctctaaaagttgcaaactccccatcccaaggtgttaaaaagtcagaaaagtgtttgctgtttatgatcatcctatatatgtttgaatcctacttttggtgtgtgtttaaggatgtttatttatgaccactataagtagtagagttaaataagtaagtggtactcttggtgatgctttgtatgcatcttatttaaatttttgctatcttattctggttgttgttgatatatatatatatatacatgatggtgtaataactgagatgatataatatatgaaaattatatttcaaaaacacaaaagaatcaat

SEQ ID NO: 151187 - DNA, 681 bp, Arabidopsis thaliana landsberg
  unsure (1)..(681): unsure at all n locations
accaatcaagatgggagtgatgagtttgagcaagaccgatggtggtggtggtattacaggtgatgatattgttgggacaagagattggtaaagtgtcgtcgannnnnnnnnnnnnnnnngacttggacgcttggggcatcccaattgatgctaaagtctattccaaatggcccaaatctcactctttcaagatcggtgactccctctgtaagtcaatattctaactcttcttcttcttataatttcaaatctctctaaaatctaatcattggtttgtttttggttgctgcaaccaataaagtgttcttgtacccaccaagcgaagactcactgattcaagtgacgccctccaatttcaagagctgcaacaccaaagacccaatcttgtacatgaacgacggcaactctctcttcaacctcacccaaaacggaaccctatacttcacaagtgcaaaccccggccactgtaccaagtaccagaagctcctagtctccgtcggcacctactccgccgaagcagaggccttgtctccgtcttctgccgccgacgctccctcttaccaaaacgccttcgggtccattcctctctctcagaaatcgtctgcttcctcctcgctcatttctgctttctccactgtcgctgcttcgctggcttgcgctgttgtcggtgcaatcatgtga

SEQ ID NO: 151188 - DNA, 4236 bp, Arabidopsis thaliana landsberg
  unsure (1)..(4236): unsure at all n locations
atgtcaaataaagataaggaagagcatagcaatgcacaaaacaacaagttattgatggaagctataacatctactcttaccgcaactctcactgctaatatggctaagatgatggatgagagatttgatgctgcaaggtctaaccaaaaaagggagaacagaactatgagaaatatttctgatcaggaagcaacacttagcttctacagccaatcctctactcgcaatagtcataggaggcagagacgtggacaagaagaaagacaccctccaagagacaacttagctaatcttaagcttcgcatccctccattccatggtactaataatcctgatgattatttggagtgggagaagaagattgagttggtgtttgtttgtcaagagtatactgaagcaaacaaggttaaagtggcagccactgaattctatgattatgcactaagctggtgggatcaagttgttactactaaaaggcgtcttggagataatccgattgaaacgtggaatcagctaaagaatatcatgaagagaaggtttgtgcctaattattaccatagagagctgcaccaaaggttgaggaatttgattcaaggaaatagaacggttgagcagtacttcaaagaaatggaaacattgatgctaagggctaacgttcaagaagagtgtgaagcaacaatgtccatattcatgggaggcctcaatagagacatcatagaccgtttggaggtgatacattatgagaaccttgaagaattgtttcacaaggcagtcatgtttgagaaacagattaagagaaggagtgctaagcctagctacaattctagcaaacctagctaccaaagagaagagaaatccggttttcaaaaggagtttaagccgtttgtgaagcctaaggttgaagaaatcagttcaaaaaggaaagaaaaagtagttacgaggactagagatctcaagtgtttcaaatgccacggactttggcattatgctagtgaatgttccaacaaaagaattatgatgattagggacagtggagagattgagtccgaggatgagaaactagaagattctgatgttgaannnnnnnnnnnnnnnnnnnnnnnnnnnnnatgagggtcttaagtgttctaaataaagctgaagaacaagcacaaagagagaatctgttacatacaaggtgtttgattaagggaaaagtgtgtagtttgattattgatggtggaagctgcaccaattgcaagtgagactatggtccagaaacttggtttataggagtttctgcatcctacaccttataaactgcaatggctaaatgagagtggagaaatggctgttactaagcaagttcaagtgccgttagccattgagaagtatgaggatgagatcttatgtgatattctgcccttggaagctaatcacgttttgttaggaagaccttggcaatttgatcggagagtgatacatgatgggtttaccaacaaatatagctttgagtttaaaggaagaaaaaccattttggtacctatggcatctcatgaaatctacttggatcagcttagcatgaaaaaaaaggatctcaaactgttcaatccaagctaataataggtttttgagatcaattatcctaaaacactgataagtgtatattttgcatgttttgagcatccatttgccattattttagcatcatatcatcactgtttaatatcatttctcatcatttgtcatcactttgcatgtttaggacagttttgcatgcatgttgcatatttgtgttattttcatgtgattcagagcttttggcgagctaattggaagaagcggacctgatcactgcaaaacactcgcaaccctggtcgagtagatgggtccacgacttcaacaaaccactcgaccccctggttgagtagatggcctcatcacttcacaacaccactcgaccccctggtcgagtaccgccaagataatcactcgatcacattactcgaccccctggtcgagtatcatcatgtccaccacatcaccttcactcgatcactctactcgaccacatggtcgagtaccttcatcaccttcactcgatcactccacaaccaagccgagtaccaccaaatctataagtcgactacatactcgactgccagcttcagaatcttcttcattccgcactcaaccagacactcgagcacaaggaagaaaaaaagactctagcttatcactcgactactcactcgaccacttgggtcgagcaccgttcttaatccgtcctaattctacatcgttttagtattagggtttcagaatatttcgctataagtagcatgtactttacattttcgtttatctaagtttaatttcgcatacactgtgttcttgaccttttgtaatccggatttctcttcatccattcagtattcaatatttgcttttgatttcgtttaccgttgttcatcctgttatcatcttgctattactcagttgatatcatgttttcattttattcaacgtttatgttctcttctatgatgtctgagtagtgaataggtttcttaggataggttagagtagtttagaattctcagtatgctaggcggttgagtttgattgatagatcccttctggatttgttgttcttaatgcatattgctttctgatcaactggaatttgagcccagacatttccgcgcccaaaaggtgttcgaggaaatgtctgaaccactaattccagagatttgtggccatgtaccaaggtattggttttattgagcgttttggctttaacttgtttgattcgtggtgcctgttaggttagctctcgtcaatggtgattgagtctgggactagtttaacttgagggtctctgttgcagtggcacttagatttggttaccgaacttgttggctagggataatttattgagcatgtcaattacctgtaaactgaggaaacgaaactactcaattaccccatcctcgggaattctttatctgattgatttctttgtttactctgctgttgtttactgcatcttattacctgttgtttagtttttgcatttctcttttgttactcgacctgatactcgaccactcagttgtctgactgtgcagtcgagtatctctgttacattttctatctgttactcgatttgtcattcgatcacacccaatgcttggcaacaagctgtgttggtcgagtgtttctattgttctgcttaaatttctgtctgtttctgcatcttcacttaggactgctagaacacaccaaaacctgttattgcttggcttgactctgtgaactttgattgcatcttaattgctagcatcacacccatttcgattgacaaccttcagtactacaacgacattattggtgttttaggataattgaaaaaagacatagtatcaatttggcgccgttgtcattgggtttttgtttgttacatttgagatttcagacttgcatagatcaagtattttttcaatttttatttctgttactgactttgtgattgatttccttgttgtcttcttgatccaggtacacctccattgtatgcgaactcgatcaacaggcaatcagaacctccttctcaacgacaacatcgaccacatagctcgcgaactcagagaaaggagaaacacagtcaaccttgtacctcagcaaccactcgaaatggctgaagaacaaaatcaacaaaatggccctgccaacattggtgctggagatgcaccacgtgatccctgtcagaggaaaggaattgcacctcctgctatccagaacaacaacttcgagattaagagtggtctcatctcgatgattcaggggaacaaattccatggtctgccaatggaggatccactcgaccaccttgatgaattcgataggctctacaacctaacgaagatcaatggtgttagtgaagacggattcaagctccgtttgtttcctttctccttgggcgacaaagcacacatctgggagaagaatctgccccatgactcaatcaccacctgggatgattgcaagaaagcttttctatcaaatttcttctccaatgccagaactgcaagactcagaaatgagatttctggtttctcacagaagactggtgaaagcttctgtaaagcatgggagcgtttcaagggttacaccaaccaatgccctcatcatggctttaccaaagcctctctgctcagcacactttatagaggagtcctaccacgcatcagaatg

SEQ ID NO: 151189 - DNA, 637 bp, Arabidopsis thaliana landsberg
ccagaatgtcgtcttcttcttcttcttctccttcttcgtcttcccttaaacccattaattcaatttcctgataaacgagcagagagagatctgtcaaaatcacaaaccgtgaattcgggaagaataagccgatgatgcttcgtattgttcaaatcgcgtttctatgtctcgttctcgtcgccgggatctcgatctccacggcgatatcagagactgagactatatacgagatcctcctggcaaacggattaccttcggggatattcccgaaaggtgtcagagaattcaccttcgacgtcgaaacgggacgattctcggtttatttgaatcaggcatgcgaggctaaatacgagactgagatacattacgacgccaatattacggggactataggttctgctcaaatctctgatttgtctggaatctcggcgcaagagctattcttgtggtttccggttaaaggaatccgagtcgacgtgccgagttctggtcttatatacttcgacgttggtgttgttcgaaagcaatattctttgtctttgttcgagactccgagagattgtgtcgcggttcgtggcgatgccgagtttattggtgaaaacaaggtatgagaaattttctgtttttgaattgttca

SEQ ID NO: 151190 - DNA, 840 bp, Arabidopsis thaliana landsberg
atgattcgcaagctctgttcttcattctctcgctccatcatcttccccaacaaacccatcttcatctcccgctcttttcctcaaccactccgtcactcttctgctctctcctactcctccttgaaaatgaccgatacccatatcccaaggaaccctaattcgtcccaaatccaatctcccaccaaacccttgcttcgttccctcgaatttcaattgggttcttctttcaccgtcgatccaatcatcccgccgccgaatcagatcgtcatcgttattagcggtccaagcggagttggtaaagacgcagtgatcaacaagcttcgtgaggttcgtgaaggtcttcattttgttgttaccgccactagtcgtccgattcgacctggtgaagttgatggtaaagactatttctttgtctcgagagatcagttcttgtcaatggtggagaacgaagagcttcttgaatacgcacttgtttatggagaatacaaagggattccaaagaagcagattcaggaatttatggccaaaggggaagacattgttcttagagttgatattcaaggagctcagacgttaaggaggatacttggtaactctgctgtgtttatattccttgtggcggagagtgagcttgctatggtggagaggttgattgatcggaagacggagagtcaagaggagttgcttgttagagttgctacggcgagagaagaggttaggcatctaaagaactttgattacgttgtggtgaatgccaaagggaggcttgatgatgcggttaaccgcgtggaatcgattatcgatgctgagaaatctaaagttcatcaaaggattgtcagg

SEQ ID NO: 151191 - DNA, 1512 bp, Arabidopsis thaliana landsberg
gagctcgtatatataaagcttatacgctcctccttcaccttcgtactactactaccaccacatttctttagctcaaccttcattactaatctccttttaaggtatgttcacttttcttcgattcatactttctcaagattcctgcatttctgtagaatttgaaccaagtgtcgatttttgtttgagagaagtgttgatttatagatctggttattgaatctagattccaatttttaattgattcgagtttgttatgtgtgtttatactacttctcattgatcttgtttgatttctctgctctgtattaggtttctttcgtgaatcagatcggaaaaatggaatcttttttgttcacatctgaatccgtcaacgagggacattccgacaagctttgtgatcagatctccgacgctttcctcgatgcttgccttgaacaagaccctgagagcaaagttgcttgtgagacttgtaccaagactaacatggtcatggtttttggagaaattaccaccaaggctaacgttgattacgagcagattgttcgtaaaacatgccgtgagattggattcgtatctgctgatgttggtctagatgctgacaattgcaaggttctggttaacattgagcaacagagtcctgacattgcacaaggtgttcatggtcatctcaccaagaagccagaggaggttggagctggtgaccaaggtcacatgtttgggtatgctactgatgagactcctgagctcatgcctcttactcacgttctcgctactaagcttggagctaaactcactgaagttcgcaagaatggaacttgcccttggttgaggccagatggtaagactcaagtcactattgagtacatcaacgaaagcggagccatggttcctgtacgtgtccacactgttctcatctcaacacagcatgacgagactgtgactaacgatgagatcgcagctgatcttaaggagcatgtgatcaagccagtgatcccagagaaataccttgatgagaaaaccatcttccatctcaacccatctggtcgttttgttatcggaggtcctcatggagatgcagggcttaccggccgtaagatcatcatcgatacttatggtggttggggtgcacacggaggtggtgctttctctggaaaggacccaaccaaggttgacaggagtggggcttacatcgttaggcaagcagctaagagcattgtagccagtgggctagcgaggcgggtcattgtgcaagtctcgtatgccattggtgtccctgagccattgtctgtgttcgtggacagttatggaacaggaaagataccagacaaggagattcttgagattgtgaaggagagttttgatttcaggccaggtatgatctccattaacttggatctgaagagaggaggtaatggtaggttcttgaagactgctgcctatggtcactttggaagggacgatgctgatttcacctgggaggtagtcaagccactcaagtctaacaaggtccaa

SEQ ID NO: 151192 - DNA, 907 bp, Arabidopsis thaliana landsberg
tgagctcagtcagagagatatcgccgagagcactacaatttcaaaaccctcggagaagttataatcagaaaatgtcagtcgaggaagacgccaccgttagagagccactcgatctgattcggttgagtatcgaagagaggatctatgtcaagctccgatctgaccgtgaactccgcggcaagcttcacgtacgttcttaaccactcggattccagaaaccagtaaccagatgtgatctttttcgattttgagctcctttttgaattccttattcgttgaatttaacactagttttatactttcacaaatatcaaaatttggacccattttgttgagtttcagtttcgaaagcctcagcgagctaattggcgtagaaaacctcataatcttgttaaattctaagactctcacttttgttgttgtttttgtggtgtaggcttttgatcagcatttgaatatgattctgggtgatgttgaagaggttattacgactatagaaatcgacgacgagacatatgaagagattgttcgggtatgtaattctcttagctcaataagatttattaatctatgtaggctttagtaatcagataaacgtttttgggttcaaaatatttcagctatcacagtatctattgtctatgtcttagtttgagttaaaaggagagcttgattcatgtagaagttaacagtgctggttacatagagagtgttcattaccaatatagtaactctgtttagtttctcaaacttgaattttgttgtttgcgctccaaatgtgatgtgctaacttctcattagactagtgtagaatcatatgttcttctcctgctgatgtaacttggttctgtcagacaacgaagcgaactgtaccgtttctattcgtgagaggagatggagtgatatt

SEQ ID NO: 151193 - DNA, 493 bp, Arabidopsis thaliana landsberg
caaacacacagtttaatccaaaaaaaaatcaaaagatgaatgccacaaagttttctgtgcttctcgtgattggcgttttgtgtgccattgtcaccgcaaggcaggtcgaagaagtgtccaaagagaccaaattaggtatctctactccaaaaactactatccaaggcgttggagctcagctttctactaggggcagaactttcagcaactctgggggctctagctttgctagagctactcatggtcgcaaaggtccagaagctgatgcatccgaaggtggcttcacaagtaccggcgcagaaatcattgccaagggtcgcaagacaaaagtttcttctaaaagtgcttcagtctcacaaggaggctctaaagctgcagcgaatcgcaaagctgctgctgcctctgcaggtggtgccacaggttccgaatccagggtgaagggttcctctgagaagaagaagggcaaaggaaaaaaggattgagcgtgaggtca

SEQ ID NO: 151194 - DNA, 1080 bp, Arabidopsis thaliana landsberg
  unsure (1)..(1080): unsure at all n locations
cacgatctagcttaaagttcaataacctaagcgataatcacttagctactccaagtttcttcttaatttttctctcacaagtagttctaagctttagaaatggcaacagcatcgttcaacatgcaatcagtcttcgccggtggattaaccactcgcaagatcaacaccaacaagcttttctccgccggtagcttccctaacctcaagaggaattatccggtgggagtgagatgcatggctgaggtacgttattctccacttccctgatacaacggccattcatcatgtgactatgaaatcctgaccgtctgattatttgactttttcagggaggacccacgaatgaagactcttcaccagcaccatctaccnnnnnnnnnnnnnnnnnnnnnnnnnnnnnatctcctcctcctcctatgaaacctaaggtataattttagaagttttgataaacaagaatttgttttttaattaatcgggtcttagatattaagaacatacaatcttgaaaattcattaaacaagctttatttgtgaatctttgttaataacttttggggtggtgaatataggtgagcacaaagtttagcgacttgctagcgtttagcggtccagcaccagagaggattacggacgtttagcgatggttggattcgttgcggcgttggctgtcgagctatccaagggtgaaaacgttttagctcagatctccgacggtggcgtctcatggttcctcggtacaacagcgatcttgacacttgcgtcgcttgtgccgcttttcaagggcataagcgttgagtccaagtccaaaggtatcatgacgtcagacgctgagctttggaacggacgtttcgcgatgctcggtttggtcgcgttggcgttcactgagttcgtcaaaggtgggacactcgtctaaggaaaagagagcacgttatggggaggatgttttaatacgattttgcccatgtaatttctctgtaaaggaatctgtgttaggcctactgtgtgttttatacatgtgtactaagtgacattttgaaacttcgggttaaaaacactttaaaattagtggtgttctat

SEQ ID NO: 151195 - DNA, 1609 bp, Arabidopsis thaliana landsberg
gcaaattcatctatccatcatatttctctgctgctctctgctttcttcttcttcttcttcttcttcttctcagagatagtttgattcaaaaaatctccttcctcttcttactttatctcgtattatccattaatcctaaaccctttagtctctccatcttccgcttcaacagtcagaatttgggtttggcgaaagatgctaactttgaaagtgagactagtcgtttgagtaaaaaaaaccatgcgaattttgtgtgatgcttgtgagagcgccgccgctatcgtcttttgcgccgccgacgaagctgccctctgttgctcctgcgacgaaaaagtaaccacctttacctgaaaaaaatctcatttttcttagattaacacttttatctcaacaaatgcaaaaagtttgaaattttgagacaatatctggttgaagtgctaaatttatagattttgaggttattataactcgaacatggccaaagtagtaccaaaagttgtgttttgattgttaaagaaacattctagtgattttagcttgtcataataatttgaactttgcatatagcattatctctggtgacacactttatttacagttacagtcactctattgaagctggaagagctatgagaatttttgttatctgcaatggctttgattgaggaagtggttagatataagttataagaaagaaacatttttctttgtgtgtttaggttcataagtgcaacaagctggctagtcggcatcttcgtgtaggcttagctgatccgagtaatgcaccaagctgtgacatatgcgaaaatgcacccggtatagatatgattcctctttcttttgtgtataagaggaagcggaagtttcagtttttgacatgtttgttttgttgttgatcgatgaacagcattcttttactgtgagatagatggtagttccctttgtctacaatgtgatatggtggtacatgttggtgggaagagaacacataggcggtttctattactgagacagagaattgaggtttgaattaactaattgtttctttctcacgcagacacacaatcatttggagtcgattttcttagatttaatagtcatcttgtgtttatcgtttcttgtagtttccaggggataagcctaaagaaaacaatccgagggtcattttgcagagcctcatgagtctctgcaaatggaaatggtgaagccaatgggaagattgatgacgaaatgattgatctaaatgctaatccacaaagagtacatgagccatcatcaaataacaacgtatatgaatccctctatccaacatattctcaatctttgtttttgtattctcaattcgaatgtttctcaatgagcaggggattgatgtaaataacgagaacaatcacgagcctgcaggccttgtaccagttggaccctttaaacgagagtctgagaagtgataaggtgagagagagagagaaagagactctttactctgattcaaaaaatcagtttaagaagaagattgtaaaaagtttcaagaactggagatttcatgtccgttttttttccttccttctgattcttagatcgttgctggtgtaaccgagctttgttgttg

SEQ ID NO: 151196 - DNA, 790 bp, Arabidopsis thaliana landsberg; identical to SEQ ID NO: 39060

SEQ ID NO: 151197 - DNA, 699 bp, Arabidopsis thaliana landsberg
acaaaatcgagccgacactttcccaattgcactgaatctactgaaatcgattcacgagagctcagatttggtgttagcatcactcactaagcaagattgttgagtgtaatttgtatttgagatcgagatgaaggaggacgatgcattgccgacgacgacgacgactggtacggcgacgggaacagctatggcgaattcgaagaaggaaagctctgacacggtcttgtttggaagaggtcgatataagttctgggcgtttgctgcgattttgcttttggctttttggtcgatgtttactggcaccgtcactctccggttatctaccgggaatctgaaccggttatcggaagatctagggattccgaactacgataatctcgacgttctggttgtttactctctctgtttctatttcggttgatttggtgtgtaatttgattgtagtctggtttttgaggttttggaatttgtggtattttttaggaaatggaggagagggagaaagtggtgaagcacatgtgggatgtgtataacaatggccgtcgtatcagattacctaggttttggcaagaggccttcgaggctgcttacgaggagcttaccagtgatgtacctgatgtggttgaggctgccatttccgagatcgctaggatgtctattcgctccattgttatagatccgcctccgcttcattccacg

SEQ ID NO: 151198 - DNA, 1292 bp, Arabidopsis thaliana landsberg
tcttcgtacgcatttgggccgtacaaaatcgatccccgtgaagtgttctacgcaacgcctctctcttatgccatggttaatctccgtccgcttcttcctggtatgcctcattcctctctaattattcatcgaacctcttcaactttcttctgaccttctttttcatctattttttgcaggtcatatccttcttttttttgtgtgttcttcatttttcggttttgttttgtaaattgagttctattggatgactttaaccagacgagcacatgttcttgtctgcccgagacgccttgtgccacgatttactgatcttacagctgatgagaccagtgacctgtggcttactgctcagaaggttggctctaagcttgagaccttccataatgcgtcttctctcacattagccatccaagtaaactaaacatctcctttctttcgtcattgtttcttgcgtctaaatcttaatggattggaattgaaacgatctaactttggtttcatgaaaatggcttaggatggccctcaagcgggacagactgttccccatgtacacattcatatcttgcctcgtaaaggtggtgactttgagaagaatgatgaaatctatgatgctgtaagttgttgcattttgatcacattcctaggtttggttttatacaaatcttatggtggtatcttcttgtagcttgatgagaaggagaaggaactgaagcagaagcttgatctagataaagaccgggttgataggagcattcaggagatggctgacgaggcttcccaatacagatctcttttcgattgctagttatcatttatcaatatcaaatcaaaccaagctatccagtagctttaataaggaccattgtgacaagtgactttcagtttgaaattttatgtcagagactttgattcaaatttgtaatttctttctaatgtcgcccaatctgggtataaactaagagttatagctttggttgacactacttagtgagattagaatcaactccttcatgttataaagaaaaattcccacttgctaccatcctctcatgcctcattttacacaatgaacactaaatacttgaactaaacaatagcagagatgtataaataaatactgtcccataagatcagtgcgctttggatactaaataacaagctaagaagcttttgatggttcttcccctggagcgtcatcctcatcatgatagatgttttcagccatttgccatatttggagtatgttgtcctcagcaacactggaaataacccaatcttcacaagggttc

SEQ ID NO: 151199 - DNA, 1030 bp, Arabidopsis thaliana landsberg
gaaattttgatatgtgactcgctttttttttttatcttattagaattgcaacgagaacatacaagtcgaaaatcatacataagccggcggataaacaaaaatccctagagacaaagaccaaaaggaggaaaactaatccctaaaaaccagacttctaaattaccaagaaaagtaaaaacaacaagataaactcgcaaaaggaagagattgagagttgagaccaaagcactaagctcaccaactgctccatagaggttctcactaagctttccaaaagaacacgtgaagcagcaataagactggtaatgccacaaaattaagacatctttctgaagtcaaaccgccaggaacgaaagcaagaaccaaatgatactagagagacaacaatcacaccataccaaggcacacgagaagatgaaaataaactaggaacaagggaagcccttgagaatcgccaaatgacaagccaaataagacaaacacctcttgcacgcgggcattcgccaacccagttttagccaaatacctgcaccggaagacaacctaaaccgcctccaaacagccaccagtaacagaaccaccacccaaaaataaccaccacccagacgagccgtcgcctagtccacaacaagaacgtcacataccagatcaaaacccatcaccagaggcatccaccaactcaaaacgacttcatcttcaacttcaaacacatagaacacgacgggggaagacaaaaggaaacaattccatatcgagacaaacactgacatagcttcaactgacaaaaccagatcaagatctggaaatcaatcaaaaccccagccatatagagccaaaattgaaacagagcctcaaaaccggagctgccaacaacacagagaccaacctccgaaacagatatagaagagaaattggtccccgcactccccaacaccatcaaccctacaaccatatcaccataaaaacgagaaggaagaaatctacagacgaaattaaacaaagacgcacaaggccagaatcagtgctaagg

SEQ ID NO: 151200 - DNA, 246 bp, Arabidopsis thaliana landsberg
atggcgaagcctttgggaacaaccggcgaatttttccggcgaagagatgaatggaggaagcatccgatgctttcgaatcaaatgagacacgctcttcccggacttggaatcggcgtcgccgccttctgcgtttatctcgtcggtgagcagatctacaacaaagctttggctccttccaaatcatctcaccaccaccaggaacagactgctccgtctcactgaagagcatctttcttcttcgatgag

SEQ ID NO: 151201 - DNA, 1611 bp, Arabidopsis thaliana landsberg
atgaagacaaagctcatgataacaatcttcacttgcttactactttggtcgatgttgttgttactatcattctccaacatcttcaaacaccagcttcttggtgctacaatcaacggtatgatcaatcaccttttgggttccttattcagaaatgatccttttgacttaattttttcattttcttgcagtaagttcaaaggattctgtaaaaccgagggatagactgttaggaggacttttaaccgctgatttcgatgaagattcttgcttgagtaggtatcagtcttccttgtatcgcaaaccttcgccttacagaacttctgaatatctaatctctaagcttagaaactatgagatgcttcacaagcgttgcggtccaggcactgatgcttacaagagagcaacagagaagcttggtcatgatcatgagaatgttggagatagctctgatggtgaatgcaaatacattgtgtgggtggctgtttatgggcttggaaacagaatacttactcttgcttctgtgttcctctacgctctcttgacagagagaatcattcttgtggaccaacgcaaggatattagtgatctcttctgtgagccttatcctggtacttcatggttacttcctcttgattttccattgatgggtcagatagatagtttcaaccgggaatactcgcattgttacggaacaatgttgaagaatcataccattaactcgacaacaatcccatcacatctctatcttcatcttctccatgattacagggatcaagacaagatgttcttttgccaaaaggatcagtctttagtcgacaaagtcccttggctggttgacaaatccaacctttactttattccatctctatggctgaatcctagttttcaaaccgaactaatcaagctattcccgcagaaagacaccgtcttctaccatctcgctcggtatctttttcacccgacgaatcaagtctggggcttgatcacaagatcctacaatgcctacttatcaagagcagacgagacgcttggtattcagatacgggtattcagcgatcgagctggatattttcagcatgtaatggatcaggtcgtagcttgtacacgaagagagaaccttttgcctgaaccagctgcacaagaagaaccaaaagtcaatatatcaagaagccagaaacttaaagctgttcttgtcacatctttgtatccagagtactctgaaaccttaaagaacatgtattgggaacgaccgagttcaacaggggagatcattgaagtttatcagccaagtggagaaagggttcaacaaacagacaagaagctacacgaccaaaaggcgctcgccgagatgtatcttctaagtctaactgataaaatacgccacaacgcgcaaggtctacatttggatatgttgcttatagtcttggaggattaaagccatggttactttatctgccaaatgataacaaagctcctgatccgccgtgtgttcgatccacgtcgatggagccttgtttccttactcctccgactcatggatgtgaacctgacgcctggggaactgaatcggggaaagttgttccttttgttaggtattgtgaggatatatgg

SEQ ID NO: 151202 - DNA, 515 bp, Arabidopsis thaliana landsberg
atggctgggcacaagatagcacacgcaactttaaaaggcccaagtgttgtgaaggagttagttattggtctcacactgggactagcggctggtgggctatggaagatgcatcactggaacgagcagaggaaaacaagagtcttctatgatttgcttgagagaggcgagattggtgttgttgttaccgaggaatagtagagagatcttaattctccaacaataagttcaaaaattgtagtgcttgttgttagttacttcaatgtaatagggttataaacccagacatcgtttgacctcattagttctagcttcaggcgatgatttcaagcatcccattacccaaaagagacaattattatgtctacatgacacaaaataagatttataattacacaaaaccagagacaaatgacacaattatctattaaccaaattcagatttatttgtgaaggaacaagtgttttcaacgaaaaagaaagacagagagacacagaagacgaaggaggaaagtaca

SEQ ID NO: 151203 - DNA, 1727 bp, Arabidopsis thaliana landsberg
  unsure (1)..(1727): unsure at all n locations
ggaaagtgtttacgcaatcggttctttggttgagtgcttactgcttcagcaggaagaagatgttgggtttgggaattttactcataaagaaactttaaatttggtaccaaaaagacgcttttatcccccggttaggttgcgtcagccagctctacccacatgggcattgctgcagatattacagtttgtatttgttaacaagtattaaactttgtactaatcttatctacaatataattgatttattgaatcaatgtaaaagttgttttcattcatgcttaatacattaattgatcaaagttgccaactaagtatttggtgatgccgatgagtgtaaaggacagcctaagacaaaagtgtatgtctaattatgatttgggagtatgggattccaattattaatgtcgttgacccaaatgatttatcttcttcttgctgcttttttcttaataaacaaacaaatccacattattagcatttagcaatatgtttaattacattaccattgtttttaatctaggcccatatctcttaagaatattcaaacttggtccaggttaaacttatgacaaagcccaaatgttcctactctttctcctaaatcattattccaaacaccggttacgcattaaccggttcaggtccactggtaatttggaaatagatagaactcatctaactgaaatcatgatatgtggtcattataacaagcgaatcaatcacacgcttcttccttcctcttccatcttcttcatatctcccttagtcacctctactctattctgcaggcaaaaatagttatggcgacttcttcgatcactatcccgaccattagaactccgattcatcgatcaaaatttctaggccaaacacatcaattttcaactgtaaaccggtcggttttcccgcctccaaaacagcaatcaaaactgtatcaagtaaaggccatgggtaaattcaatctatgggaagtgatgggaggaagaggattatgcaacggagagaaaggtattgagaaggagctccagaggaacattgaagacgagcaagagacatcaaaggctgagaacaacgagacagagagagagagcgatgacagtaacttgtcttttaaagtacctgaagatggtttcgagaaagagatgatgggtctcacaggaggatttcccggtggcgaaaagggtttaaaaacgtttatcgaaaaaaatccaccacctcctccaccaccaccacctgcaaaacaaggaagcgatgcatccgcggttgctacagataagaagccgaaagcgcccaagctaccccttctcatgccggggatgattgctatagtcaagaaccagaacagtccgtatcacatgtattgtggaattgtgcagaggannnnnnnnnnnnnnnnnnntgtcttgttcgaaggaggaaactgggaccgtctcattactttcaggcttgaagagcttgaacgaagagaaaaaggtccaccgggtaagaatccaaagtcttgtattctcgagcctcttatcgaacagatgcaaaaggaagaggcagcaccataagtgatcttctcttctctgtatgtaagttcctgtgaatgtatatgtaacgtacctttgcgttttaggctacaatatttctgactggttctaaaagagcttcatcatgtgatataaaaaaaagaataaacgatgaatttcaatcataaagcacttaataatagagattcaaatgca

SEQ ID NO: 151204 - DNA, 424 bp, Arabidopsis thaliana landsberg
gagaaagaccgagaagagagtgacaatggggaaatgtatgtagccattaaaagccgtgagccttagacaaggacgatacgccggtaaaaaggcggagatcgagaaatccttcgatgacgggaccgttgagaagaagtacggtcactgtctcgtcgccggattgaagaagtacccaagcaaagtcattcgcaaggattcggcaaagaagacggctaagaaatcgcgcgtgaaatgcttcttcaaggtcatcaatgaccagcacgtgatgcctacgcgctacactcttgatttggatctgaagaacgttggctgcgccgacgcgatctcgtccaaggataagaaagtgacggctcttaaggaagcgaaggcgaaggttgaagagagggttaagactggcaagaacagatgggtctgcaccaagctt

SEQ ID NO: 151205 - DNA, 938 bp, Arabidopsis thaliana landsberg
  unsure (1)..(938): unsure at all n locations
tgcttttggcacaaactatttgttcttgttgttcttgaacttctaatatttcgggtttttgtaaaaccatggcaggccctaatttagagcttccagcacatttctccccaatttatttcccgatgggaaacgcagccacaggattctttgtgatattcgcgttgctagcgggagtagttggagcagcttccacaatctcaggccttagccacattcgttcgtggaccgtgggaagcttaccagcagcagccacagctgcaaccattgcctggaccctcacagtcnnnnnnnnnnnnnnnnnnnnnntgtttcacaagcaaactcatcatttttaaagacatcgatagtaaaactaatcatggcttttcaacagtttcgcttggaaagaaatcgagctacaagggagaaatgcaaaactggtgagacttttctctatttcgaaccttatagacaaatttggaaatcccaccattgttgccttcatgacacgtccattttctgtcatttttctatgtagagaaccatggaggcgttcttgatcatactctcagtcacccagcttatttacatcgcagcagttcatggcgtgaggagaccttaaggaatcattcatgggcgtcgggtttcttttcttcctattgtggcaatcatccgaaactcgggattgtgtgtgtgagcgtttgtatttgtgtgagtgtgctttattttcttcataggaagcttaagataaattcatgcattctttatgtacaaaaggattagatcttgttttgtgtgttgtcgctttgtgttcatggaataaaatcgaactttgaggcttggttccggtcatccctctatatataatctaacgaactacagaaagatgataatagatagaaaagctaagaatgtatttcaaagaataatctcatgttctaaaatccatttgatgaaca

SEQ ID NO: 151206 - DNA, 2368 bp, Arabidopsis thaliana landsberg
  unsure (1)..(2368): unsure at all n locations
attaatttatgtgagttcatatcttctcgcaggcgcgcatgttcaccgccgacgaaaagattactgtatctctaatcgtcttccagaatgctgacgaaaaccaacgacagccgtttgattgaccggagctccggcttcgatcaacggacaggaatctatcacagtcttcgtccctctctttctctacctcctatagatcaacctctctccgccgccgaattcgcgctttctctcctactcaaatcctcaccacctgccaccgccgggaaaaacattgaagccttaacctacctagttaactcgagctctggtgataacctcacttatggagagcttcttcgtagagttcgttctcttgctgtatctctccgggagcgatttccttctcttgcctccagaaatgtcgcttttatcctctctccttcttcgttggacataccagtgctttacttagctttgatgtcgatcggtgttgttgtttcaccggcgaacccaatcggatctgaatcggaggtgagtcatcaagtcgaagtcagtgaaccagtaattgcgttcgcgacatcgcagacggttaagaagcttcaatcctcttctttgcctctcggaactgttctgatggactcgactgagtttctctcctggttaaatcgatcggattcttcatcggttaatccatttcaggttcaggtcaaccaatccgaccctgccgctatcctcttttcctctggaacaaccgggcgggtcaaaggcgttttgctcactcaccgtaacctaatcgcctcgaccgccgtatctcaccaacggactctccaagatccggttaattacgatcgcgttggactgttctcgcttccgctcttccacgtgtttggtttcatgatgatgattcgagccatctcgcttggagagacattggtgcttttagggagatttgaactcgaggcgatgtttaaggcggtggagaaatataaggttactggtatgcctgtctctcctccgttgattgtagcgttggtcaaatcggagctcacgaagaagtacgatctccggtcgttgcgttcccttggctacgcaggagctccactcggcaaagacatcgcagaaaggaataagcagaaattcccagatgtagatattgtacaggtaataactgataagacagttagtgtcaaaatatgactttgtatataggactgtgtccagtttcatgatacttggttttcatcaagattttgaatcatttatatgacttttaactttctggtttnnnnnnnnnnnnnnnnnnnnnnnnnnnncagagagctcgggaccagctgcctcaacgtttggacctgaagagatggtaaaatatggctcagttggtcgtatctctgagaatatggaagccaaaattgttgatccatccaccggagaatccttgccaccgggaaaaactggtgaactctggctccgaggaccagtcatcatgaaaggtatcataaaacatatgcaatagttgaggaacatgcaatgtgctgagctggtgtaaactaaatgactttgcatataagaatctaggactgtcaaattatatcaagactttgaccattaatgtgactttgcatataagaatctaggactgtgtcaaattaaatcgagacttgtgactttgcatagaagaatctaggactgtgtaacaaatgcaatagtttgaggaacattcaagagctttcactaaatgacttagcatataagaagaaatctaggactcagtcggatttcatgatccttgaagtctaatgtcttcatcaagattttgatcattgatgtgactataaacctgtgattaatgggcacaggttatgtgggaaacgagaaagcgagtgcggagacagtagacaaagaagggtggttaaagactggtgatctctgttattttgattcggaagattttctatatattgttgatcggctaaaggagctaatcaaatacaaggcttatcaggtaaattttacgagtcagaagaagaagatatagtctttagagtttaatattaatcaaaagcgtcatcttataggttccaccggtagagttggagcagattcttcactcgaatccagatgtgattgatgctgcagttgttccgtgagtcttttaaactcaaatttgtaacttcttgaaatgtgtttctgatactgacatggatcatgaattcaaggttccctgacgaggatgcaggagagattccaatggctttcatagtgagaaaaccaggaagcaatctcaacgaagcgcaaatcattgatttcgtagctaaacaagtaatgctcattgctctagaatgttggttatatgtaatttttagtacaagtagacagaacagttaga

SEQ ID NO: 151207 - DNA, 1915 bp, Arabidopsis thaliana landsberg
  unsure (1)..(1915): unsure at all n locations
gttggtttcgagtaactcacagactacgggagatacttcgagtttggaagctgctgatgtatatgttgttgattcggaaatacagacaaacccggttactcataagcagagatctgtttctccttcgcctcagatggctgttcccgatgtgtttaaggaagcgaggtctgagcgtaagagattttctactccacatccaagaagagtggaatcggaaaagggaatgaagcctaagttatctcataaaaactcctttgacaagagatcatttaacttgcggtctccttcaggtcctatcagagatcttggcacnnnnnnnnnnnnnnnnnnnnnnnnnnnnnnnnaggacactggatggtctaagctttttgataatactggtcgtagagtgagtgctgtggaagcttctgaagagttccgtgttgatatgtcaaagctgttctttgggcttaagtttgctcatggtttatacagccggctatatcatggtaagtatgaagataaagctgttgccgtgaagcttatcactgtacctgatgatgacgataatggatgcttgggagctcgtttagagaaacagtttaccaaggaagtgacccttttgtctcgattgacccatccaaatgttataaaggtgatttctcctctctcgttatgttctcttggttaatcgttatgtcagtctagatggaatgatttacggtttttgttaacttctcttctcttatttatgtgctaaaaacagtttgttggagcgtacaaagatccgcctgtatattgtgtcctcacgcagtatttacctgaaggatctttaagatcttttctgcacaagcctgagaataggtctcttcctttgaaaaagcttatagagtttgctatagatattgctagagggatggaatatattcactcacgacgcataattcatcgggatcttaagccagaaaatgtattgatcgacgaagaattccatttgaagatcgctgactttggcatagcgtgcgaggaggagtactgtgacatgttggctgatgaccccggaacatataggtggatggcacctgaaatgataaaacggaaaccacatggacgtaaggccgatgtatacagctttggactcgttttatgggaaatggtagctggagcaatcccatatgaggacatgaatcctattcaagctgctttcgcagtcgtacataaggtaaaatattctgtgcgtctccttactatttcattattgtaatcttccgtagagtttatgccacaagaactgtctaatggttacggttaaagccttagaatttaacagacaaaaatcttccggcacaagtatattttaggtcttttattgttcagttgattcaaccatttgagatatgaaaaatgttgatctttggttcagaacattaggccagctatcccgggagattgtccagtagccatgaaagctctgatagagcagtgttggtcggttgcaccagataagagacccgagttctggcagatagtgaaagtgcttgaacagtttgcgatatcactggaacgtgaagggaacctgaatctgtcttcgagcaagatctgtaaggacccaaggaaaggtctgaaacactggatccagaagcttggaccagtccacgcaggaggaggcggtggcagcagcagcagcggccttggtggctcagccttgccgaagcctaaattcgcttgagagacaggaaagagtctcttttgtaaatttatatataatacaaaaagaagggttttgtgtttgtgttgtatcctttttttttgtggattgttgttgttagtgatctttcatcgtcaatgtcatcttctctggatttgatgtgtaatgactgccaactggggaatggttgtgatttgatgtttatgggattcaaatatcgtttctact

SEQ ID NO: 151208 - DNA, 1062 bp, Arabidopsis thaliana landsberg
caaagaacacaacaaacgaactagcttaaggcaatatacaagccaagcgctcagcaatggcgatcacacgctcctccttggccatttgcctcatcctctctttggttaccataaccaccgccgattactactctccctcatctcctccggtttacaaatcaccggaacacaaacccacgctcccgtctccggtttacactccacccgtttacaagcctaccctctcacctccagtctacactaagccaactatcccacctccggtttacaccccacgggtttacaagcatacaccctcaccttcggtttacactaagccaactatgccacccccagtgtacactccaccggtttacaagccaactctctcacctacggtttacactaaaccaactatcccacctcccgtttacaccccaccggtttacaagccaactccggattacactaagccaaccatcccacctccggtttacactccaccggtttacaagcctactccctctcccccggtctacaaaaagtctccaagctattcgtctcctcctcctccatacgtaccaaaaccaacctacactccaaccaccaagccatacgtgccagagattcttaaggccgttgatggcatcattctatgcaaaaacggctacgaaacctaccctattctaggtatatatacatacttaactaagcctccctgattaaataaatttattataacaacagcattgctaatttctaaaaccttccgtttattaaattcatgcaggagcaaagatacaaattgtgtgttccgacccagcatcatacggtaaaagcaacaccgaggttgtgatctacagtaatccaaccgactctaagggatacttccacgtgtcgttgaccagtatcaaggatctagcttactgtcgtgtcaagctctacttatctccggtcgagacttgcaagaacccgaccaatgttaacaagggtctcacaagaagttcccttggcgttgtacggataccgtttctacccggacaagaacttggagctctttaacgcggacctttctactacact

SEQ ID NO: 151209 - DNA, 1382 bp, Arabidopsis thaliana landsberg
atacttttaccaattcactgttgccactcacactatttcgtagtcattgtagctctcttgtgacaacaatatgactaataaacttcgctcagaagaaacaatcacgtccctttcttctttcatggctagtacacttagcattgcgtcaccctctccttgttctattccattgtcggtcacaaaggtctcgcctttaaagagaaagagacctacccacttaaatatccctgacctcaatcctcaacaaccgatttcaactgattacttccgtttcagagagggtgacgcaaaggtctcgcctttaaagagaaagagacctgcccacctaaatatccctgacctcaatcctcaacaaccgattcgaactgattacttcagtttcacagactttgctcaccaaaacggcaccgtaagcttcggtggcaatggttttggtgtcgtctccagaaacggtaagaagaagtttatggaagatactcacagaattgttccttgtttggttggtaactccaaaaaggtatctttttttcttcctcttcattgaattaataggtttgagatcttaagtgtgttttgtggttgatgggtttgttatcgttttttgtagagtttctttggagtgtgtgatggtcatggaggtgctaaagctgcagaatttgcggctgagaatttgcacaaatatgttgttgagatgatggagaattgtaaggggaaggaggagaaagttgaagcctttaaggctgcttttttgaggactgatcgtgatttcctagaaaaggtaataaaggaacaatctttgaaggttacctgtaagaaagattacaatctattttgaacttactggttgcataaaaatattagggtgttgtgagtggtgcttgctgtgttactgctgtgatacaagatcaggagatgattgtatcaaatttgggagattgtagagctgtcctgtgtagagcaggtgttgctgaggctcttactgatgatcacaaaccaggaagggatgatgaaaaggaaagaattgagagtcatgtaatgttgtcaagtgtcaagaagtttgtatttttgctgattgtgtgttgagagagtagagtttgatacctttcatgacatttggtttacagggaggtcatgtcgataatcatcaaggggcttggcgagttcatgctatacttgcggtttccagaagcattggggatgcacacttaaagaactgggtggttgctgaacctgagacgagagtactataactggaacaagatacggagtgtcttgtcttagctcctgatggactttgggatgtggttagcaatcaagaagctgttgataccgagttgcatgttctagctcagagaaagacacctaaagaatgtgaggaggag

SEQ ID NO: 151210 - DNA, 1582 bp, Arabidopsis thaliana landsberg
  unsure (1)..(1582): unsure at all n locations
atcaatcaactttttttttctttctgagaaaaatgaaccgcaagaatccgagtggagtggtgccattcgctgttctccaatccaaatacgccaaatcttcccaaaaataaagaaacctttccttttttttctcttcactctgttcccatatctacagtgactcttctctctctgtatattactcttccttcactatctctctctctttactgggtcttcttcagcttctgagtcttctcctctctctctatctctcaagtgggctttgctttgctgtttttgtcttccttcgacgactcacttttgcagattctcataaattcttcaaagctttgagtcttttttcagattcgaaggtcggttttatatatgcttcaaatctcttacccaaatcaggttcttgattccctcagtatacgattcttcatttttccttcccttttgtttttcttcttctttgattcctactatattatcattaaaccttatatataaaagcttccattatttccttatatcacaaatctatcttttaagcttcctccacacatagagcaagaaaatggacttttttgagctgtgtttgtagttgaaacttattcttccctttttttgtttttaggtatggagactctgcatccattctctcacctacctatctctgaccaccggttcgttgttcaagagatggtgagcttacacagctcgagtagcggtagctggactaaagaagagaacaagatgttcgaacgagctcttgcgatatacgctgaagactcgcctgatcgctggtttaaagttgcttccatgatccctggaaagactgtttttgatgttatgaagcaatatagtaagcttgaagaagacgttttcgatattgaagcaggacgtgttcccattcctggttatcctgcagcttcttctcccttggggtttgacacggacatgtgtcgtaaacggcctagtggagctagaggatctgatcaagatcgaaagaaaggagtcccttggacagaggaagaacacaggttaagacactctttcatctctacagaattctttccatataagtcactcttcctaggttccttgcaacgcaagtcatcccctttttcttagggttttcaatgctctgtttcttgttccttgcaggagattcttgttaggcctactcaagtacggtaaaggagattggagaaacatatcgagaaacnnnnnnnnnnnnnnnnnnnnnnnnnaagtgggagccacgcccaaaagtattaccagagacagctctccggagccaaggacaaacgcaggccaagtatccatgacatcacaaccggcaatcttctcaatgccaatctcaaccgttccttttccgatcatagagatattctccctgatttagggtttatcgataaggatgatacggaggagggagtaatatttatgggtcagaatctctcttcagaaaatctgttttctccatcaccaacttcattcgaagctgccattaacttcgccggagaaaatgtcttcagtgccggagcttaaggcaacatagaatccccaaactcagcgttcttaagaatctgag

SEQ ID NO: 151211 - DNA, 337 bp, Arabidopsis thaliana landsberg
atggcgtttactccgaagatcatcacatgcctcattgtccttacgatctacatggcatccccaacagagtcaaccatccagtgtgggacagtgacgagcacactggcacagtgcgtgacctacttgaccaacagtggtccattgccatcacaatgctgcgtgggagtcaagtcattgtaccaattggctcagaccacaccggaccgtaaacaagtatgtgagtgccttaaactagcgggtaaagaaatcaagggcctcaacaccgaccttgtggccgcacttcctaccacttgtggtgtttcaattccctaccccatcagttttagcaccaattgcg

SEQ ID NO: 151212 - DNA, 123 bp, Arabidopsis thaliana landsberg
ccctaatacgccccctcgagatgatggctcttctagccattgatttcgatatatttgggcatggatcggcgagccaagtattggaccggaccgatgtggatcgggttgagtatgtgcggatcg

SEQ ID NO: 151213 - DNA, 1689 bp, Arabidopsis thaliana landsberg
caaggatacagtttactaaggaattggtgagttaaactcatacaagtgataatttctccggggagggttcaatggactatcttcgtctaccctgacggtaaaaatccagaggataactcttcttacgtcctgtgttcatcgttttggctagtgaatgtactgaagttagagcgctttttgagctttctcttgttgatcaaagtggtaaagggaagcataaggttcatagccattttaatcgttcacttgatggtggtccttatacgcttaagtacagaggaagtatgtggtatggcttgaaagtcttttcagtatcttcaatggcatatattattatttttacactcgttttgctgctatattgaactgccttctcaggctcagagccctctaattcttgtttcttttctttggattttgaataggggatacaagcgtttcttcagacggtccttgcttgagacatctgactatcttaaagacgattgcttgaaaattaattgtacagttggagttgtcgtttcagaaatgcattgcccacggttactctcgattcatgtcccagactcagaacttggatcacattttggaaagttgctggatactttacaaggctcggatgtcacatttgacgttgccggtgagaagtttcaagctcataaattggttttggctgcacgatctcagtttttcagatcaatgttttacaatactctagcagagaacaacagcgacgtagtgatcagcgatttggaacctaaggttttcaaggtacaaatttcgagtttatagcttctcgtaatatttttctcgtattgtttgttggtacttatccaagtcgatggtccaccttatacaggccttgttacacttcatgtataaagattccctcccaggagatgtggaaccattaacggctcattcatttgacctattaaggccgtccgaaatagatgatacactgattgtaaagcttctggcagctgcggaaatgtacaatctgagtaggctcagattattgtgtgaatctcacatctgcaaaggcatatctatcagctccgtgtccaagatcttagctttatccgacaaatataatgcatccgaactaaaaagcgtttccttaaaattcactgcagaaaacctagcaggtacgatcaagatccagtttatgagatcacgttgatagataatcttcttcaagtttgatttttttactgtcttggaaattatagctgttctgcagacaaaagcatatgaagatctgaaggatgactgtccaaacctccagtctgagctactaaaggcggtcgctggttatgacgacacaagtagcagcggaggaggaaagtctcagagtgtttgggctcaactctctaacggtggtgagaccagtagccgaagggtcaggcagcgaaccacttagaagagcttcttcacatgttgttaacaaactacttttgcttaccactcgtaaacagataaaccggtttatctagtatgtaccgaatgaaagggaagcggagccagaaatcttgtaccacaagagaagagctatgcggctgtgcactagtcttgacacttctcggtgattaaccggtgcttcacctttcagttccttcacgtctctgtggatttttgttgttgagtctttttttcaaattcttttcccagcttccaattactagcaac

SEQ ID NO: 151214 - DNA, 3455 bp, Arabidopsis thaliana landsberg
accctaaatgcattactaaaaactaaactattacgagtaagtgaagaaatgataaactaataaaagttggtatagaaagagagtgaaattggaagtggctaatagaaaagtaagaaaaagatgaataaaatatgaaagaagaggtcaaaagtgtaggtccactaaaaagcagcagatcttagcacacccacatgtcccatatattctatttctactgtacactctcttcttcttcacttcactaaaagctcactactcttcttcgcaatctcatttttaacattttcactttcttctaaactttgcattacaaaaaacaatgtatttccaagttgttctctctattcttcattagatcccttgaggtacattaccatgtcctaatttttctattggttttgtatttgttgatatttatattatgtgtagttgttgttttgatcagtagctcaagtaacagcgacagtgaagaattaaagatattaaaacaaaacatttcttgtttactcttcttgttttaactgtctctcaagtagatcatcttgtttactcttcttttattgtatcccgtttaaagaaaatttttttttttttttctctctttctaaaatgttcactttcgagttttgtttggatcagcctagaagaaagctaagagaggttgctctaatttttttgaagaaaaagttatatacattttcttggggaatctctttattttaaggaaaatgtttgtctttggtagattggtagctgcttgtttggtgagaaaactccaacaagagtcctaaataacatttaaaagtttaccatttccacttttataaacattttcacagtgcttatattattattttcagtagagtgtagatctcaaactccttcattcattcgatttttattcgagagatgtctatgttactaatatgttgtagccattgtaggtaaactgttaaaatctctctgatccatttgctgctgtgttttgtttctttttaccagaagggttgtcttagataacagaaccaagcagcttcccctgaaactgcttcttcttacaagttcttggatctttgccatataattgcaagaagttttcaagattcagacaagatgcagaaaccagggcaaaatatagattttgcactgaaggaaacttcaccaaagattggtgcaggttctgtgacaggtgataaactctgcagcacttatgatttggttgagcagatgcattacctctacgtacgggtcgttaaggcgaaggagttaccggggaaagatgtgaccggtagttgtgatccatatgtggaagtgaagctcggaaactacagagggatgactaagcatttcgagaagaggtcgaatccggagtggaagcaagtgtttgcgttttcaaaggagaggatccaagcatcaatcttggaggttgtcgttaaagacaaagatgtggtgttagatgatttgattggtagaatcatgtttgatctcaatgagattcctaaacgggtaccgcctgatagtccattggctcctcagtggtataggttggaggatcgacatgggcgtaaggttaaaggagagcttatgttagctgtttggatggggacacaagcagatgaagctttttctgatgcttggcattcagatgcagccacggtcggacctgagggtgtgacacatatccgttcaaaggtttatctttcgccaaagctttggtatgtcagggtcaatgtaattgaggctcaagatttgatacctcatgataaaaccaagttccctgaggtttacgtgaaagcaatgctcggaaaccagactctgagaacacgtatttctcagaccaaaacattgaatccgatgtggaatgaagatctgatgtttgttgttgctgagccttttgaggaagctttgattctcgcggtggaagatagggttgcaccgaataaagatgaaacgttaggccggtgtgcaatcccgttgcagaacgtccaaagaaggttagaccataggccgcttaactcgaggtggttcaacctggagaaacatattatggtggaaggagagaaaaaagagatcaaattcgcaagcagaattcatctaagaatctttcttgaaggtgggtaccatgttcttgatgaatcaactcactacagcagcgacctaaggccaaccgcaaaacagctatggaaaccgagtatcggactgcttgaagtagggatcataagtgcacacgggctgatgccaatgaagtcaaaagacgggaaggggacaacagatgcatattgcgtggctaagtatgggcagaaatggattagaacaagaacaatcgtggatagttttacgcctaaatggaatgagcagtacacatgggaagtgtttgacacctgcactgtcataacttttggagcattcgacaacggacacattccaggaggaagcggaaaagacttgagaatcgggaaagtgagaatccggctctctacccttgaagctgaccgtatctacactcattcatatccgctactcgtctttcatccttctgggatcaagaagacaggtgaaatacagttagctgtgcggttcacttgcctatctctcatcaacatgcttcatatgtattctcagccattactacccaaaatgcattacatccatccgttatcggttctccagctggacagcctgagacaccaggcgatgaacattgtctcggcaaggctgaaccgcgcagagccgcctcttcgcaaagagattgtggagtacatgctcgatgttgactcccatatgtggagcatgaggaggagtaaagctaacttcttcagaatcatgaatgttctgagtggtctcattgctgttggaaaatggtttgatcagatctgcaactggagaaacccaataaccacaattctcattcatgttcttttcattatcttagttctttacccggaattaatcctcccaacggttttcttgtaccttttcttgattgggatctggaatttccggtggagaccaaggcacccgccacacatggacacacggttgtctcatgcagacgctgttcaccccgacgagcttgatgaagagtttgatactttcccgacttcccgatcctctgagattgtgcggatgcgatatgaccggctcagaagcataggaggacgggttcagaccgtgataggcgatctagcaacacagggagagcggtttttatcgctgctgagctggagagacccgagggcaaccacattgtttgtgcttttctgtctcatagctgctatcgtgttgtatgttacgccgtttcaggttgttgcacttcttgctgggatctatgtgctgaggcatccaaggttcaggcacaagctaccctctgtgccgctcaatctcttcaggaggctacctgcaagatctgacagtctattatagataaatttatctgcatcagcggggatggtcta

SEQ ID NO: 151215 - DNA, 2018 bp, Arabidopsis thaliana landsberg
tggaatatgattccccagcatcagattaaggaacaacataatgcgttggtgatgaataagaagatcatgtccatccttgctgagagagacgctgctgtacatgaaagaaatcaagctgtctctgctaaaaaggaagctgtcgctgctcgggacgaagcgcttcagcaacgtgacaaagctctttctgagagagataaagctttgatagagagagataatgcttatgctgctcttcaacaccatgaaaatagtctcaactttgctttgtctggtgggaagtgtgttgatggagatgattgttttggtattggggaaccccacaaacttgaagtcttccctttgtcaactattccgcctgaggttacaaacacgaaggtggtgaacaaaaggaagaaagagaacaagcagggactatcaaaggtgaaaaaagtgggtgaagatctgaaccgtcgagttcctgctcctggaaagaaatctagaacagattgggacagtcaagatgtcggtttgaacttagtcaccttcgatgagacgacaatgcctgtacccatgtgttcgtgcacaggctctacgcgtcagtgttacaaatggggaaatggcggctggcaatcgtcttgctgcacaaccaccttatcccagtatccattaccgcagatgccaaacaagaggcattctcggatgggcggtaggaaaatgagcggaaacgttttctcgagattactcagccgtttatcagcagaaggatatgatctctcgtgtcctgttgatcttaaagactattgggctaggcacgggacaaaccgctacatcactatcaagtaaccaagatttatgagccagtagccactatatatcaagtattgctctctcgtcatcccttttgattttttttttgtcgctttagatttaacaattaggatcaaaagtcgaatgaaagatgaagttaggctcgttattgcttttactgtcgatagttccgttaaaaggcaaatatctagtagtactgttttgacttggttttgttgttttatgtaaatagttacattatcatctactttgtattattgtaatttcaaaattcgaaatctcacccattaaatcgcaagaatttgaacaacttcaacaaataaaaaggaaaaaaattaataatctccttatattagagtcaagcttcaacgacttatgtagtctcttcatctcaagcttactctcaaagttccacttaaagaaaagaaaataaagcatggaccaaaagctaaagaccaccaacactagtccaccgccgcaaccaccaaagcgttggcttaaccacatcaagacatttttcgacgttcctaacccgagaatcgttagaatcttttttataggcagttttgccacatttttctccggaattgcttttgcttttgaatgggcattaaatggcaagaaccatagcggattccaatggatcatctactacgccttgtccctgatcattcttcctattctcatctggctaggtctcggtattgtcatgattttctcgtcaagccacggttcaatgcaagttgctagcttcatggtggaagaagaacagtgtgtcgacggttctgccgagaagagtgggaaaaaagaaactaaagataacaattgtgagagtttggcgattgtggttaattcggccgatcagaaaaagtgcatggagaagatatttgagaacaaaacggcaaagctaaaacgcacagtttcattcccattgcatagccaagtgcgatcatgtcggactaggtgagtgtttcattcaattaccatggatcattccatcttccaagtaacggttctttcttgttagatctgattattttatccgccgcaactataagcttataatttgttacgttacattttcatttataataagaaataatttgttttgtttttctacttttttttttttggtcaaagtcgaagctttgctaaatgtcaagataagcaaacttcgattctctctaattcctggaaattgccacgtcatg

SEQ ID NO: 151216 - DNA, 5148 bp, Arabidopsis thaliana landsberg
  unsure (1)..(5148): unsure at all n locations
catttatattctgaatatataatctatcttagctaaagagaaagctgctcaagagaaggctgccaaagaggttgctgaagatgttgcagaagcaaataaaaagagacacttgaatgttgtgttcattgggcatgttggtatgactatctacttaatgatttttatttttatttttatgggcatgtttttgttaaagctggaggttgcaagataattgccttgtgtagacacagggtttcagagcttatgtaatacagatttgaaatccccattggccatgacctttctgtctgtgtacttttaagtttataatggctgacttctggcttcaatttttttcaattatagatgctggtaagtccacaattggaggacagattctttttcttagtggtcaggtggatgatcgacaaatccaaaagtatgagaaggaagcaaaagacaaaagtagagaaagctggtgagtgttcctgattggtcaaacctgaaatgagtgctttgctttctaactagttatgaaacttttatttcctgtatgttaggtatatggcatatataatggatacaaatgaagaagagaggcttaaggtacttcatgtgttttggtcaatgtttgttcttttgcttaaaatgcatgtatttgatgataatttgtttatggaaatcccatcaaggttattgttgaatatatgtttgctaagtgctatgaataatttgcttaatttgacagggcaaaacagttgaagttggaagggctcactttgaaacggagagcactagattcactattttagatgctccggtaagggatcaatctaaactaatcgttttccatttatttttgttttatgcggggaatctgggttgcagaatatttgttggatgagttttctgttctaattcttgtgtgcttttctggacttataggggcacaagagttacgtacccaatatgattagtggagcatctcaagcggacattggtgtgctggttagtcagcttataagttaatttgttttctgttgatttagcttctccagtaggaagcttattaacttccctacccacgcctctctgatataggtgatttcagctcgaaaaggtgaatttgaaacaggatatgagaggggtgggcagacacgtgaacatgttcaacttgccaaaacattgggtgtctctaaactgattgttgttgtgaacaagatggatgacccaactgtgaactggtcgaaagaaaggtaattagaagaccttttgattccttgtcaatgatgattttcgtatcttcttctgtacatccttgtaattatgtaaatcctatgcaggtacgatgaaatagaacaaaaaatggtaccgttcctgaaagcctctggctacaacacaaagaaaggtatgcactgaactgtaaacattgcagtttaactatggtcaaacagcatttttaatttcttctcttacttttttgttgttaagatgttgtcttcttgcctatatctggtctaatgggcaaaaatatggaccagaggatgggtcaagaaatttgtccttggtggagtggccctagcttttttgaagtacttgattctattgaaattccgccacgcgatcctaatggtccattcaggtgaaccgccgctgcccactttttgttttctctctttttattccggttgttctttgttattaattattggtcgttgcatttcaggaaatcaattacttgtgtataatcatgttttaaatggattaacacatctctgtgcattgttttatatatcacatgcaacttctacaactttggcatgtcttttactgtaaaccaatctctgtatgttgtagactgttaaccggaatcgattttatgaattgtaggatgccaattattgataagttcaaggacatgggaactgttgttatgggaaaagtagaatctggcagcattcgggagggtgattccttggttgttatgccgaacaaggtgctttcagatgtttttttctttctcagttcatatttcattgccagtttattgttttcctgatgactttcatgaatcaatgtaggaacaagtgaaagttgttgctatatattgcgatgaggataaagttaagcgtgcaggaccgggtgagaatttgagagttcgtattcctggcattgaagatgaggacatcctttctggttttgttttatccagcattggtgagtataatgctttcagattgccttcacaataaatgatttgcattgccatttttttttttggcttaatatccgaacccttactcttctcttagctgttttttctttgttttctgttacagtaaaccctgtccctgctgttaccgagtttgatgccaaactacnaatccttgagctgcttgacaacgtaaggcacacgttctagaatgttatttgtttgagtatatacagttttaaataatcttcattattttgctgctcgtgtaggctatttttacagctggttacaaggcaattctccacatccatgcggttgtcgaggagtgtgagattatcgaattgaaaagccaaattgatctcaagacaaggaaaccaatgaaaaagaaagttttgtttgtgaagaatggtgctgctgttgtgtgccgcatccaggtttgtctcctcctaactaccgtttcctgtttctcttatacacgtattcatagccagaagttttaagttacttatatttatatatttatatttcgcaaattattatttctcaacccttgctgtatcacttgcaggttacgaattcaatttgtattgaaaaattctcagatttccctcaacttggaagattcactctacgaactgaaggtaagaagagatttcagagatatcaaatgcaatgcttaatgcatttagttttactcatcctaattatctgagatacggtacaggaaaaacaattgctgttggaaaggttaccgagctcttaagttctgtctcaagcgcttgatccaaattttgtgagagaaaaggtgaggagtcttatgatttcaattatttttaagccaccatatggaagaattaactttagaaaatggccaatctaaacctgggttctgtttctttggaaagcaggagacggctttcgggttgcaccaggagggagattaggaaaacgcttcatgaatgattcggactaagaaatctgagttccctaaaacccaagtcctaatacctgtttttttcagtgcacagttgagatttacaagctgcggagaggtgttacctgagaccgatttccttatatttcaaagctagagagaattatgatgaacgtgagtgagagtttacttttctttcaaattaaattaacagttaatacgactacctcccttttggctggcgagtatgtttttggctatttggagattgatatttcatagttgaagaaactctattcgttccttaatacttgtcagacaagtattggtttctagctcattctagctttttgcttcatacgacaagttatttcgttgtttcggtcaggttaatccataaataacctcgtgcatccaagttcactcgaaatggattggattttgtctatagaacataagctgcaattatgaaaccgaattggatcaagttaaacacgatggaaatttattgaaattttatactggctataaaactttaacatacaacaattcttaaaattggaaggattcggtccgaggacattgaggtaaaggtcgacacaaacaatatacaactgaaagcttttctcaaccaaataaaacttgtggattacaatgaaacgacgagctctagtgtgtttttgtttttggtttgtctgaaaaagtgatgtggaagaaaaaacaagaatgatgaagagggaaaaaaagtgaggagcttctcagagacgatgatggtctcactagcttcatgtgtttcgtccccatcttcttcgtctctgttctttagtcgtcgggagagattacatttggtgaaagccacggtggatggcaggaaccagattgtcccaccggcaaaagatcaaatccctaacaaagtaagcagcacccttcttcatttcgattgtgtttgaaaagatagtgttagaccgatgaagagtcgtttcataacgaactccttcagagaaattcagttgaggagtacaaagcttatccaagttactttctggtcaaatttatattttgggactcttcgcataagtgttatgtgtttacttctagctctaggagatagaatttcatggaaccaaggtggttattagagttttggttgaatcgaatggaaattacatgaattctaactaactttaagattctgaatatatctaggcaactagtttttacttgattgtgaaatgattttgaaatgtagcaagtaacggagagtgtgaatgtattaaaaacggctgcaaaaactcggaaagttgcagcagatgagattttagctgctttctctgctatcgaaaaggctaagattgatccatccactttccttgaaacgcttggtggtcccgagtatcctggacgaacatggatgcttatcttcgccgccgaggtaccattagatattcaattagcctttacatgtttttataaatattgcagtcttgattgatccattcaaatcattgacttgggatcttatatgccataaatgcagaagaaactgacgaaaggtcgttatttccctctagctgctgttcaaaaatttgatgctgcggtaagtctctaaactggttctagtactgctttagggtctgattggtaaaagtgttgaggcactttaaaatcctgaaagccgatattttggaagtaacaaaacaattcttgtgcttgatttttcaaccagggaaaaagaatagagaatggggtgtatcttggtccatttggagcattaacattcgaaggaaggttttcatggaagaatcggatactagcttttgtcttcgaacagatccgcataaagattggaccattagatcctctagagttcagcttggggaagaaagacgctgtggaagagcctagtaataaagaccctttcttcatttggttctacatcgatgaagaaatagccgttgctcgaggtagaagtggcggtacagctttctggtgtcgttgtcgtcgcattgcttcctaa

SEQ ID NO: 151217 - DNA, 720 bp, Arabidopsis thaliana landsberg
tcatcatcttcattgcagattcgttggagaaatggactctctcgcaaccgatccagctttcattgattcggatgtatacctcaggttaggacttattattgagggcaaacgattgaaaaagccaccgactgttctctcacgcctctcttcttctctggagagatctctgttactcaatcatgatgacaagattctgcttggatcgccagactctgttaccgtgtttgacgggagatctccccctgagatcagtattgcacactacttggatcgcattttcaagtactcttgctgcagtccctcctgcttcgtcattgcgcatatctacattgatcactttctccataagacccgagcccttctcaaaccccttaatgtccaccgccttatcattacaactgtcatgttagctgctaaagtcttcgatgataggtatgttactcactaaacctggtatcaaattcaacacgcaaataagtcttcaatcatagattcattgatctctggtgttgtgcaggtatttcaacaatgcatactacgcaagagtgggaggtgtgactacgagagagttaaacagattggagatggagttgttgtttacccttgacttcaagcttcaggtagatcctcagacgtttcacacacactgttgtcagttagaaaagcagaacagcgacggcttccagatcgagtggcccataaaagaagcatgccgagcca

SEQ ID NO: 151218 - DNA, 2465 bp, Arabidopsis thaliana landsberg
  unsure (1)..(2465): unsure at all n locations
atgaatgtgcgaatttatctccattcaaaattactgaatttgtaataataacaaaatcagatattcaaaaatgcttcaagaaatataaaccacagacgagaatagtaaaaatgagatatgtccggtcagagatcaacaagcaagacaagtataaaaaccccttcaaggcttcttcatttcttccatttttaaaagtaaataagatagtaatattaacacttagtttttcttctccttttcattattttcttttattttggaacagaaataaaagaaaataaaagaaaataaaaagatgggttacatttcaatgtccgtggttgcattccttgttgtttatgcttcgccggtggttctagccaccgatacagatccgattccagaaagcagagcccaaatcccgcaatggttcaaagcaaacgttaacccatattcccagagaaagggcacgctagaccccgccctctaagctgctgaaacagcgcgacaaattatcgccgtaattactataatctgatttttgatttggttcggttcatatcgatttgaccgaattaagtaggcgttgttaaaattttgcttatatgaatagtttacaaatgtatgttaactcgagtgaaaaatgaaaatctcattgnnnnnnnnnnnnnnnnnnnnnnnnaaattcaagacattaaacgaagctatcaagagcattccgacaggaaacaagaaccgtgtgatcatcaagttggctcctggtgtatacaatgagaaggtcacaatcgacatagctcgaccattcattacattgcttggtcaacctggtgcggaaacggtcttgacttaccacgggacagccgctcagtacggaaccgttgagagtgcaactcttatcgtctgggctgaatatttccaggcagctcacctcaccattaaagtatgagaaacatatctatatatatattcgttatacgttactacattactttaatgattaatcgctactaatttatttttttgttatactatagaacactgctccaatgccgaaaccaggttcacagggacaagctctagcaatgaggatcaacgctgataaggcagctttctatagttgtagattccatggttttcaagatactctctgtgacgacaagggcaaccatttcttcaaggattgttacatcgaaggaacttatgattttatctttggaagaggagcttccttgtacttggtaaccttaaaattaaatattagacatcttttaacatgatacacacacatatatatatatatatatatatatatagcattttttgatattaatagtacatatatttgtatgtaaactcgatagaatacgcaattgcacgctgttggagatggattaagagtgatcacagctcaaggtagacaaagtgcaaccgaacaaaacggatacacgttcgtgcattgcaaagtcactggaaccggaaccggaatctatttgggcaggtcttggatgagccaccctaaagtcgtctatgctttcacagagatgaccagcgtggtcaacccatctggctggagggagaacctcaaccgcggatatgacaagtacgtaacatttcatatcatctcatttacatatagaactacatttagttatatagatttgattataaactgaatatgatattgtgtgttgtataaatacaggacggtgttctatggagaatacaagtgtttcggaccagggtcacacttaaagaagagagtgccttacacacaagatattgacaaaaacgaagttacgcctttcctcactcttggttacattaagggctccacatggctacttcctcctcctaaatactgaaatttttcttaagacaacttatttgttgtaacaccgttctttaatttataattgaaatgttcccatctttttagtttctttatttttttttttgtattgcttaagatatgaattgatcaatattttttctacatatataaatcttccaattcattcatttctatatataccggatgtttgtggtgtttttgttttcctttatttagaaattcctataggatatatatacaaaatttgtttttgtaaaatatcataattatgttcacacactattgagttaatgatttgtttttgtttttcttatgataaacgttcatggtatatatgtttaaagtaccaacaaaaagaaagagtcaatgtctatccatgatatatatgcttttattaaacattttgattattttaaccaaaaaaaagtagaacacacacattttctagatctcatcattttaatagttctagttgcaaatgttaaacttcaatatttttcgtatatatatgaatcagcttcttctttctttaattttctcggcgaattagtatattttaatccataagagatgcatgcataaattttattgaattaagtgaagacccaatggtcaaaagaaaaaaaaaatatag

SEQ ID NO: 151219 - DNA, 1767 bp, Arabidopsis thaliana landsberg
  unsure (1)..(1767): unsure at all n locations
cctgcggcttcgagggagagctttgcggtacatggtggagctgttaaggaagccgagacagtcaactgtagccaagcctcacaggacagacgtggcaggaaaaccagcatggtatcttacactaaaccatataaactctctctacgtttttcaactttttagttatttgctgaaagaaactgacatggttcttgtgattgttattcctacaggtgagggagcctattctgcagtactccaagcgtcagaaatctcaagctaattgaagataccacctctatcagacaccataaccaccttcctcagtggtgatgatattaacctgatacactcgctttttattgctttatttctcctctgcattcagactattttcatactccatgcttgttattatctctcttaaagtatcatatcttatcgcacttttgggaagataatttattgcatatcaaactttaacacttattagttattactgtgagtattattcactaatgctctacattcttttatggaacaagtatgaagtataggactatcttcgttttaaattcccctgtcgatcactttaatccaaaaactttaacgcttatacgttcactactcaatggaaagtatacacgtgttcgtacaagaatcccctagaatattttcgtcattccgagcccacagcttaaaagtccagaaacatccacacacgacacgcctttctagaaacgattctttttttaataccccacacaccctcagatctattatcaaccgttggattacgtggacaagtacaatgccactcgtatttttaaccattcctcacactcctcaacgtgatgtgaagatactttgctgtttcataacgtcataaagaacagagacaggcgaaatttctcaagaaagcaaatcagaagaactcacaaaaaaaactaaggtaagagattattatcatcacttttgttcttccttcactcaaaactacgatcaaaatcgtgatttcatcgtctttggtgtagatggagacagacaagaaaaatagcaaggaggtagcgctaaaacacctagcgtgcgtgagaattgcaacgatccatattctggcttccgtctcaaatctctacgaatacgctaaacaaaactccggtcctctcaaatccgccgcggaaaaggtcgaaggagccgtcaccaccgtcgacacccctgtatatcagaaattcaaagatgttcctgattctctcctcgtctttctagatcagaaggtataacccaaatttgaatttctcatagatttattctttgttggatctgatgacctaatttagaaaccagatcgtgtttaagtttaagatttcctttctttatttactaggtgggtgaagtttcgtacaagtttgatgagcatgctcctccaatggctaagaaagtggtgaatcgagcacatgtattgatctacaaggcaacagagaaagctcaaagctttgtgaaagaggctcnnnnnnnnnnnnnnnnnnnnnnnnnnnnnnnnnnnnnnnnnnngtacaagcttttcgttgtgaccaactcggttaaagtctgggctaaacttaaccagtataaaccaatccatgcaatgggtgacaaagctttgcctgtggctgcacacttttccagtcggtacaacgatttggtgactgatatgactaatatgggttactctttggttggttatcttccgttggttcctgttgatgacattgttaaggcttataaaaggaaaatgcaaggagaagcttt

SEQ ID NO: 151220 - DNA, 1343 bp, Arabidopsis thaliana landsberg
atgtctggtggaaaaaaatcacatactcagagggagtgtatcacttgccttgattatcctcattcttttggtgactttactcctggtttctgaggaaaacccgcttcatgattctctttttgatgtataacgtcagttttcatcttcttcaggtatttatatgctctccacagcttttagtattcatttttttttggctatgtcttctactatttagtaagtttatgatccaaagtttttgaatctcaagatattatagtctggttttgtgatgcattttggtttcctattcagtttgtaactctgcaaagggaaaatgggttgaagaccggaagagaccattgtattctggttttgaatgtaaacaatggtcatcttccatgtggaatgggcagacccgatttctcatttgatgccagaaggttgcaacatgccacagtttgacagattcactttcttgacaaggtatgtaagtttttctccaatgacacattcttcttatacatggtccttctctgtatattggattttatgagaatatgtggtagcagagcaagtttctgaaaatatctcaaatttgcttactgccactttgcttttgttttttagaatgcagaacaagacgatagcatttataggagactcattggggcggcaacagtttcaatccctaatgtgtatggccagtggtggtgaagatagcccagaggttcaaaacccgggatgggagtacggtttggtgaaacgccaaaggagctctccgtcctgatggtagggcttatcgattcccgaccacaaacacgacgatcttgtattattggtcagctagcttatcagatttggtacccatgaacaatacagatccacctagtcttactgcaatgcatctagatcgtccaccagcattcatgagaaactaccttcaccgtttcgatgtattggttctaaacactggtcaccattggaacagaggtaagattgaaggaaaccattgggtgatgcatgtaaatggaacacaggtcgaaggcgaatatctcaaagatatcagaaacgccaaggattttacaatacacagcgttgcgaagtggctcgatgcacagcttccattgcatccgcggttgaaagctttctttaggacaatttctccgaggcattttaaaaacggagattggaatacaggtggaaactgtaacaacacggttcctttgtctagaggcagcgaaatcacaggggatgatggatcgatcgcccccccagttgagagtgctgtgaacgggacaaggaaaaagattcttgacataactgcactttctgagctaagagacgaagcgcagtatctcagg

SEQ ID NO: 151221 - DNA, 791 bp, Arabidopsis thaliana landsberg
aactttctttgcttcctctttcaaagcaacacaaaatattaaatctcaagaaacaaagtaaagaaaaatgaagaacgaatctaccttcattgatgtccctgcagaatccagctcagccatgaaaggcaaagctcctctaatcggtgtagcaagagaccacactactagtggctcaggtggatacaacagaggactcgccatctttgacttcctcctccgtttagctgccattgttgcagctttagctgctgccgccacgatgggaacaagcgacgagactcttcccttcttcacacagttcttacagttcgaagctagctacgacgatctaccaactttccagtacgactcatagatgcttgattgatcaaacagatgcttgtgtttttcttgagaaacacgtcacctaattaggtcatattttttcttcaggttctttgtgattgccatggcccttgtaggaggatatctcgttctgtctcttccaatctccgtcgtcacaatccttcgccctctcgccaccgccccaagactcctcttgctcgttcttgacactgtatacactcaaaactcttcaaattatattgctttaaaataagtctttagtatcaagtaaaatactaagaattgtgttgggaacagggggtcctggcgttgaacacggaggatgcatcatcggcggcagcaatatcatatctagcacacagtggtaaccagaacacgaactggcaccccaaatgccaacagtttggagacttcatgtcaaaaatccagcggagcatgttgactct

SEQ ID NO: 151222 - DNA, 1600 bp, Arabidopsis thaliana landsberg
  unsure (1)..(1600): unsure at all n locations
gactacagatattaaaacaactacccaaacaaaactttagatctgaaaatctcagctttgaaatggaggaaatcggaatagttatcgtcggcggcggaatcgctggtctcgccacttccattgctcttcataggtttgttattaatttattttgtaatgagactcaaactttatgaattccatatgtaaattaatttttggtgtgtatatttttttttaaaaatgtaggaaaggaataaagagtgtggtgttggagagagcagagaaagtgagatcggaaggagctggaatcggaactctctccaatggttggagagcccttgatcagcttggcgttggtgatcgccttcgtctcaattcttctcttattcacaagtaagtaatattattcttttttaaccataactttattattcattatatgtttgttttagaattttgatttatggacctttcttggatatgaacagggcacggaccatgttgattgagaatggaaaaaaacgagaattcgtttcaaatatagtgtaagtcacaattttcctatccttaaaattgaagatgataaatataaaaactatagagttaatttgagtattttgatttagtttttaatgcagtttattctattgatttgttgtaatctttgttattgatttgaatatttaatactttgaataaaacagagacgaagctcgttgtattaaaaggaacgatcttgttgaggccttatccgatgcccttccggaaggaaccatccggttcggttctcatattgtttctattgagcaggacaaaactacgttgtttccggttgttcacttagccaatggaaatagcatcaaagccaaggtaaatatcagtattgtttatttagacattaattgttcaaaggcaaatattacatttggcttttgcatttactgaagaatttatttttgtatgttttcaatagtataaaataaattatgcaatataatgtttttcttctctcataggtcctgattggatgcgatggtgccaattctatcgtcagtgattatttgcagttaaacccgaaaaaggcgtttgcttgtcgtgcggtgagagggtttactaagtacccaaacggccatggatttccacaagaggttctaaggataaagcaaggaaatgtcttaataggaaggcttcctttgacggataatcaagtcttttggtttctagtacatatgcaagacaataatcacaatggtaaagatcaagaatcaattgcgaatctgtgtcgaaaatgggccgatgacttgtctgaagattggaaagaaatggtaaaaatatgcaatgtggannnnnnnnnnnnnnnnnnnnnnnnnnnnnnnnnnnnnnnngaaatcatgttagggaaatttcgtcgtgggacagtgactgtagccggtgatgcgatgcatgtgatgggtccgttcttggcacagggcggctcagcggcgctagaggatgcggttgttttagctagatgtctagctaggaaagttggtccggacacggagacttgttaaaggattgttcgatgaaaaacattgaagaagctattgatgagtatgtggatgacgtaggatgagat

SEQ ID NO: 151223 - DNA, 1194 bp, Arabidopsis thaliana landsberg
atacacactctctgctttttttgagatctctctcagcacaaagcaatcacaaatcaaagctttcagagatccaaaaatgggatctcttccaccgccatcgctagatttctcatcaatcgatcacaattccctcaaaaatggcggatccagccaccaagagatctctcatgataatctcctcaacctcttcaaatcccagcaagatcttctcaatcacttcttcaaacatctcgatctctctcaaaccctagatttctcacgcattctcctttccaccaccggtaccgttttcttcaccggcgtcggtaaatccgctttcgtagctaacaaggtttcacagacgctcgtttccttaagcttccgttcctctttcctctcccctctcgatgcgcttcatggtgacattggcgctctttcgccacgcgatgttctcgttttcttcagcaaatctggcgccaccgaggagcttctccgtcttgtcccttgcgctagagctaaaggagcctttctggtgtctcttacctctgtttctgggaatccactcgctggtgtttgtgatatgaatgtgcatttacctcttcagagagaattgtgtccgtttaatctcgctccggtgacttctacggcgattcagatggtgtttggtgataccattgccgttgctctcatggcggctagaaatctctccaaggaagagtatgcagctaatcatcccgccggtagaatcggcaagagcttaatcttcaaggtatggctaaactatacataagcttaagaaccagtaggattgataaatacaacaatggggatgaatatgaatgtattggctgtgttttgtaggtgaaagatgttatgaaaaagcaagaagagcttcctgtgtgtaaagaaggagacttgataatggatcaattagtggagctaaccagcaaaggatgtggttgtttgcttgtggttgatgaacattctcgtttgatcggtacattcacagatggagatcttcgtcggactctcaaggctagtggagaagcaatattcaaactcagtgttggagaaatgtgcaacaggtgaggaaaacaactctggttttagatcatgtcaacattggtgtttgtgttgatgattttgagtcatttgttgataacagggaagccgaggacaattggaccggaaacaatggcagttgaagctatgaag

SEQ ID NO: 151224 - DNA, 540 bp, Arabidopsis thaliana landsberg
atgagcaacagaagaagaaccggagacgatgacaaaggattgctctggaaacttccccaagttaggatcagagacattggaaaagttggtccagcttttggactcggtgtcggttgcggatttggtttcggcgccggtcttatcggaggtaaatttctaatttctcccaattttgatcgcagactcgcgaatcgctcgaagctatttatagatagttttggtttaagagagtagagattggtttgatgaaaacaggtgtaggattcggaccaggagttcctggattacaatttggtcttggatttggagctggttgtggaattggtgtaggttttggctatggtgttggaagaggagctgcttatgatcactctcgttcttattataacgttggaaaaccatctctgtgagtatttttctgcaattagattttaagtgattcaggatttgaagaagaagaagaggattttgacaaagtgctttgttgacaggaatgaagttgattcaaaaaaatagtacgcttgttgttagaccgaaaaa

SEQ ID NO: 151225 - DNA, 1208 bp, Arabidopsis thaliana landsberg
atggcgcggttcagtctggttgtagtcgtggctcttagccttgccatctctatgttccctgacacaaccactgctcaactcaaaaccaatttctacggaaactcatgtccgaatgttgaacaaatcgtgaaaaaagtcgtccaagaaaaaatcaaacagaccttcgtcaccatcccagctactctccgcctcttcttccacgattgcttcgtcaatgtaatgctcaaacttttgttgatttttgtattagaaaccttttatgcaatgatttcttaaaaattttggttggtatgtataaatagggatgtgatgcgtcggtcatgattcaatcaacgcctaccaacaaagccgagaaggatcatccagacaatatttctttggccggagatggatttgacgttgtgatcaaagccaagaaagctcttgacgctatcccaagttgcaaaaacaaagtctcttgtgctgatattcttgctttagccacccgtgatgttgttgtcgccgtaagttatatatttcattttcttccaatcagtataaaagtgtttttggggaaaagaaataaaaaccatatgttaaatattaaaacatgtgttatctattatacaacaatgattaagtggtgtacgtgtacgcaattttcaaaaaaaagttcggatgtgtgtaggccggaggaccgtcctatgaagttgaactcggtaggttcgatggtttggtatcaaccgcgactagtgtcgaagggaacttaccaggaccttcggacaatgtagacaaacttaacgctcttttcacgaaaaacaaacttacccaagaagatatgatcgctctttcaggtaaaccaaaatttaaaacaaaacatcttatatgcatatatatcatcaaaatgtatcgatatctaaaccgatagattcataatgtagcggctcacacccttggattcgcacattgcggtaaggtctttaaaagaatccacaaattcaacggcatcaactccgtggacccaactctaaacaaggcttacgctattgagcttcaaaaggcttgtcctaagaatgtggacccaagaattgcaatcaacatggacccagtcacgcccaagacgtttgacaacacttacttcaacaatcttcaacaaggcaaaggtctcttcacctccaatcaagttctcttcacggatggtcgctctaggcccaccgttaatgcttggc

SEQ ID NO: 151226 - DNA, 640 bp, Arabidopsis thaliana landsberg
caaccaaagtagctgcgtatttgcagccaggaatgtgtcgagagcttctctgcaaatttttcagatttctctgcttttggattcgactactggcagagctctctttggtctcctctcttgcctcgaaattacgccagtgcttcagatctagactccgacagttgcgttagcgagaatcttacgctaggggagctccaagttggcgggaagaagaagatgaagatgatgtcaatgaagaagaacaagaagaagagtaaattactgtaactatacataccttcaatgaagaatgatgattcttctcctaaaattggctgttttcctcttcctaccaaggtatgttatatcatataacatagataatgttctcagttttgttttggtcaatgtttataatagatgttgttaattgtttagggatggaatggtgtgttaaaggcagcttcaaaacatttcaagaaatcgaaaaagaagagagattcattcgctgatgccaagcttctcgacttcaaatactaaagattatagcaacttcaattgcttttcattgtattcaataattactagacctttgatgaattgtgaagttgagctgtttctattatggtcatcatgtaatcatttggagtgtttgatcata

SEQ ID NO: 151227 - DNA, 2535 bp, Arabidopsis thaliana landsberg
ggtaatcggtttgctgatatttgttgaatgatgacagatgtgaatagaacaggtcctcttgttgagtatgatgagaagattcagtaatggtgaactcatgactggtgatatctgccaagtatgataaaaataatagccactcttttttacttcattgaagcttttgagctataagattaaatgtgattcgtgttacttgcggcttaaggttgtgtttgaaatgttgtagattagtgcattgagagagcttcagagactatatgatgagcttgtggattcagtagatacatgtcgtttagatcggtataatacttctgataaatcctcaaggtgattgttctgttctcttagccttgacacctttccttctctgtttaggattgagaacttgagtctcacacaactgtgtttttgtgtaatacagaagtcgttggttttggtctcggctcatgccacagacttcttactcacccgtcaaaggattatacctttatggaggtgtaggtacaggaaaaaccatgttgatggacttattctttgatcaactgtaagtttgtatgatcaaattcttatccttttttttcgagcattgcggtttcatgacaattctcttgtttcattaggccttgtacttggaagaagcagaggatacatttccatgatttcatgttgagtgttcatagccgcttgcaagtatggataattgagtttccattgtttctctattgattttagtaggaaaagctttagccttttgagatacattgtttgatttcggttcataatgtttgcagaagcacaagggtttatcagatccacttgaagttgttgcccaagagatagctcatgatgcaatcttactatgtctagatgagttcatggtatgtacactatttcatatatttattttcttgaaagtgatcatctttggatcaacacatcttgattttttcggctactgtttctgttattataggtaactgatgttgcagatgctctaatactaaaccgactctttggacatctgtttagcaatggtgttgtaagtgtcatctttacttacattatgctgctacaatcatcttaaaactgacttttgtccatgcttgctatataaaatatagattcatgttgctacatcgaatcggaatcctgataaactctatgaaggaggactccaaagagatctgttcctacctttcatttcttcattgaaggtagtctaatctactatcattagtccactttcagtacctttttaattcaaagactgcatcaagatttccattttcgcaggaacgaagtgtggttcatgagatcggttcagcggttgattaccggaaactaacttcggtattgctcttaatcccattaaaaactccctagactggcttcaaggtagagctgagttcaataactgggacacttcttcatttttgcaggctgagcaaggattctacttcattggtaaagatctttcgacccttttgaaacagaagttccgacaattgattggagacaatgttgttgcccgtccacaggtagtagaagtggtgatgggaagaaaattacaggtacagtttattataccaatctctgtgtaactccaacaacacttgtgttgtctgtatataagttcttcatcagaccaaatgctgcttcatgaacagattccattaggtgccaatggatgtgcatactttccttttgaagagctatgtgaccgacctcttggagctgcggattacttcggtttgttcagtaagatactttactttgtctctctctcatctgcaaatcttgtctctaaacagtgcttcttcttcttcttgatgttgcagagaagtttcatactcttgccttggacgaaattccagtgtttgggcttcataaccgtactgctgcatatagattcgtcacgctagtcgatgtatgcaattcctggttcttgttttgttcttataagatggcactaccaaaccatttcatcaaaatctgataatgatggtttaagaattgcaggtaatgtatgagaacagagcgaggttgttgtgtacagctgaagcaaatcctcaagaacttttggaaaagattataacaatctcagaggcgaaatcgatgggtccaagaacatcatcaagatcaagaaagaacgatgttactgagctctgcgtggataacgaattaggtttcgcaaaagacagaaccatcagtaggtaatgtaataacagactctgtgattaacaactaaaatctattagtttcattggttactcatcaagcggttatgtttattgtgtagattaacagagatgaacagcaaagaatacttggagcaccatgccataacacacaatctgtaacactcatactagacccttgatgattcttcatgggattcttcaattaaatcctataatagcttattgtattttctgtatcacaccaacagattgatccgaaccatgaaaaggaaattgtttttccattgttgtaacattgaattttcgatttactgctatattaaatctaatg

SEQ ID NO: 151228 - DNA, 3707 bp, Arabidopsis thaliana landsberg
ctcattatgtagatgttgatggtgttctgaaaacgaagatcttatctttctgtgctttcccgcctccacattctggagtagctatagcaatgaagcttagtgagctgttgaaagattggggaattgagaagaaagtttttactttaactgtagataatgcttctgcaaatgatactatgcaaagcattttaaagagaaagctacaaaaacattttgtctgcagcggagaattctttcatgtgagatgttcagcacatatcctaaacttgatagttcaagatggtttggaagtgatatctggagctttggagaaaattagagagactgtgaagtatgtgaaaggatctgagactcgagaaaatttatttcagaactgtatggatacaattggaattcaaactgaggcaagtttagtttttagatgtctcaacccgctggaactccacttatcatatgctctcacgagcaattcagtttaaggatgtattgcatagtcttgcagaagtagataggggttataagagtttcccatctgctgtggagtgggaaagagcagaactgatatgtgaccttttgaaaccatttgctgagattacaaagctgatttcgggttcgtcttatccgacagcaaacgtgtattttatgcaagtatgggcgattaaatgttggctgggagatcatgatgattctcatgatagggttattcgtgaaatggtggaagatatgacggagaaatatgataaatattgggaagatttcagcgacattcttgcgatggctgcagttcttgatccaagattgaaattctcagctttagaatattgttataatattctgaatccattgaccagtaaggaaaacttgactcatgtgcgtgataagatggttcaactatttggagcttataaaagaaccacatgcaacgttgcagcaagcacttctcaatcttcacgaaaggatatcccatttggatatgatgtaagttgctaattttgtgtgtttacagtattgttcttgtatgtttgtttgttgtgatagttagtggctatgaaaatgcattcttatacttatacttttagtgacttccattgaaaaggaaatatatttgtgtatgcgacttttctgagtatatcatctcttgaacttcaaaagtttctactccttttagttgctagtttaccattttacagtgtacctctctctatttttggtctttgtttgtttttgatacttattattttaatgcctttggttctgcataatcatttgcaaatcttctaactagaatttgggttatgccatctactgggtctgttcgagctttagagaggcattgttgaattatagctgcaaaatattttagtttctttcctatgactttgcttttattgaaactatgctttgatacggctggtcattttttgctctgtgatctaggtgacaggtaaggtggaagcaaggcaaagcgctgttgcgacacttgtgaaccaagtagctgttctccaaaagaaattctcatattgccaaccatcacttttgacaagaaatgatgttaagtttgtcttcaagctcgcaagagatgctattgtgtctcaaatcaagtggcctgaggaaactagtgatggcaagacgttcaaagaaacttgtgtgatttgttacgaaggcatcactgttgacaagatcttctcgatagatggttgtttccaccgtttctgcttttcctgcatgaaacagcatgtggaagtgaagctactaggagggcaaactgctagttgtccgagcgacggatgcaaatcagaagtaaagatcgagcgctgtgcaacatttttggatcctaagcttgttaatgtgatgatccaacgtaagaaagaaggctcgattggtgtttcagataaagtttactgcccatatcccaagtgttcagagctgatggtcaaagccgaagtcttggaatataccaaacagttgttcattggtgctgaccaatctggagcaagaaaatgcatgaaatgtgggctgcttttctgcacccattgcaaggtaccgtggcaccataacgtcacctgcaatgaattcagaaaaacaaagggctatcagaatgctggtgatggaatgctgaagtctctggcacagagcaagcggtggagacaatgcattaagtgtaacaatatggttgagcttgtctggggatgctaccatataacttgcaggtacgtcattctaacttattagattgatcagtcttctttcaaaagaattggactgcattaaaaattccagttactggataaagaaaagagagaaccttatttggtcatatgttactatcattgattcaatgtttttttttgcggcttgtaggtgcggatatgagttttgttacacatgtggagctgaatggaagaacaagaaagcaacatgtttgtgcccgatctgggatgagcgcaacataatccgtgaaaggaatgcgaaccctcctaggaggtgactgtttcttctgttgcgttcaaaggttaatagagtagtaggagtaacgaatggttctggaatctaaagaccagttatggttagcttgggtttctttggtttttggagattgatcccaggtttcggtgttttttttgtttctatcttctatttcggtttattgatgctaggaaaaaatatgacatttttaacttgaatgttcaagatccgaggtttaagtgaaacttgtcatctccggatgaagttgaaatggccttgttcaagacttaatgtctcgcaggtattctcagatatgttggtttggtttgctcagattaaaatttggtttagttttgattcaattttatcggtttggaactggatccttccagttttttagttgaagatgcgaaaatggtgtcgttttagtaattaatgaaaagtaaaccggtagattaattaaggtaataataaaataacacgagagttgaaccaaaaaacaaattgaaataaagagtaaaacgtgtacttccaaaacggcgtcgctttacgtcgataacgattcctttatgggcattaccatctgatctccgtcgcaagatctgtcggccgagatgatttcgcagttttctttctcagaggcggctcatggcgacactgtgctttctcccatcggcttgatttcattgtgattttctaaattgaggatatgattttctgagccatgggaagggagagaagaaagcttagcttgagcttgaattatgattcatctgaaaaatgcaggcaaatgttgatgcacatctcctgttgttcaagtaaactctttgtgattcgccactacagtatcttgtccgttcaatttctgtctgattgatggcttttttcgttcaaaaccattgtttggtgttgatgagaacacgggagctgcaaatcataggtttcaaatgccaaagacgaggacttggcgtgaacatgatggacttgactttggattcagcttggtatgaatattgttacaagttttagtgcatctatctagtttggactctaattgcttctttattaggttgtatttgcttaatacctgaagatatattggatttaagaagaagccagtggatatacttatttaactagagattctggttttagtattgtgggcttgctcttgatgatagtggagaatattctttgaaccagggtatgttatagaggtctcagtttttatttctatatag

SEQ ID NO: 151229 - DNA, 3907 bp, Arabidopsis thaliana landsberg
gatattggtaggtgcgcgatggtgtcaatcgatttccttgcacctgttgatcgacacccggctgggtggattagaaattggggaccacctgacaatcgcgccgtcacatcggtcgagaaagattatccatggtatgctgacattgttaattacctagctgcagatgtggagcctgatagtttcacaaattacaacaagaaaagattcctaagagagattaggcgatatcattgggatgagccttatctctataagcatcgttttgatagaatttacaggagatgcattgctgcaacagaggttcctgatatactatcgcattggcacagctctagctatggtggtcattttgcaactttcaaaacagtatccaaaattcttcaagcagacttttggtggcctacaatcttttgggatactcagaagttcatatcgcaatgtgacccgtgtcagagaaggggaaagatcagcaagcgtaatgagatgcctcagaaatttatcctcgaagtcgaagtcttcgattgttggggtatagatttcatgggacccttcccaccttccaacaagaatctctacatcctagtagctgtggattatgtccccaaatgggtagaagttatagctagtctgaagaacaattcagcggttgtcatgaaactcttcaactctatcatcttccctcattttggagtgccatgcatagtcattagtgatggaggtaagcatttcaataacaagattcttgcaaaattgcttttacagtatggagttcaacatcgagttgctactccttaccatccacaaacgagcggtcaagttgaagtttccaacacacaaatcaaagagattcttgagaaaacagtgggtaaagcgaaaaaggagtggtcttacaagttagatgatgcattgtgggtttacaggacagctttcaaaactccgcttgggatcacaccttttcatcttctatatggtaaagcttgtcatcttctagtggaattagagcacaaagtagcttggacagtcaagatgatgaatttcgatatcaaataagctggagaaaggagacttattcagttgaatgagcttgatgagatacgaattcatgcctatgacaattcgaagcactacaaggaacgcacaaaagcttaccacgacatgaaaatccttactcggacctttgtgcctaatgaccaggtatttcattatgattctagattgacaatatttcctggaaaattgtcttctcgttggtcaggtccctacacagtccactcggttagaccatatggaacagtcattcttaaaaacaacaatggaaaaccatttgccgtgaatggacaaagagtcaaacactactaggctgaagccgagattccagtagaaaagcctttggatcttcaagacccacctgttgactgagcaattgtagagtcaagctattgactgtaaacaagcgcttagtgggaggcaacccactggtaagtatttctcttttttattatttcattcatttgattttaaacttaggatttttgattgtataggatttttgattgtataggatttttgatttagatttagaaaaaaaaggacgcgtcgaccaaacgctatggtgtcgatcgacaccctcattttccaggtaagtcgacttaacctaaaaatttcatcttcttcatttcactttcttccaaaccaccgaattcaccattttctctctagaatcttcgattcttcaccgtttcttgtgatttcaggctctaaactcatcaaaattccatcctctatcttccccaagtatcaattctatcaatctgcaagatgactgggcagaaaaagaaggcaaggaagagctttcctccatcctcctcctccgtcgcccctcaccacgcctgcgcttatccactgctgtcgtctccgcccatcccaaccgatatcccaagttgcagctcctcaacctcctgtttatcgatttccatggccaaagcttccaaaagagagaattccttctcaaagggtttgggagaaagatgtcaacagggaattcactaaaggtggctatatcaatcgccatttttctccagattaggatgattatgatactctgttctataatgcctagatgagtgtagaaattttgcctactcggtttgcgaatttcggtttgatgcagcgtttgcagatagagaaatctgttttaggactgctagatgacataggtttgggaatcatctattgtaggcagtacgatttgtatcctgagctggtttgacaattcatggcttctgttagggtttcttatgtgaatgacaggaaacacaacgctcaggaaggagctcttatcttcttcgtttgcggtgtcagatacagtctaccactgagagatttgtgtgacatctatggggtttgacaatgatctcactagagtttccctgcctggtcagtttaaggattctcagattttctggagcaggtttggtaatggaatctatgattccaaggacgaagtacactcagagatccgtcaccttgttctgcaatatttggttaggttgattagtagcacactgttgtgcaagattgagcctggcaagatgagactttctgagttgttcttgctctatcacgctcttcatgacttctttccagaaaaccttggatttgagcaggttgaccgtaatgtcaactttggtgctgtgttcgctcatcacttggtgtcactcaagaccaagctctttacaggtagaggacagaaatctgagagagttggcagtcttctcactcccatattcgagcattttcgcatcagctttgagggcgaagaagtcaacaccacgcgtgtcactatggatgagacttacctgaagaactctcactggcttaaaggcaacttactgtggtgcttcaaagatgatacatggcagcacatgattcagttacctcgccctgcacatacaaagattacaggagagcatgaggagataggctttcatcccgatccctcccttctgcatgtcgcaccacgcaccaggcgacagagaggttctgcttcaagatctgcgcctacacagaccgaggacgagttcattgaccctggtgggggtccgagagttggatcttcctcgtctgctcttccatatcagctgccttctcctccacccatcccgatggagccacatgtctttcaacagtacgtcgtgggcagtttcaagagcgtctagaatgccatagctacactttctcgctgcggttgtgttgctcccactcgtcgtcgtcgtcgctctcccgcacccacctctggctcagagcatgaggactagccatcctccctatcttgctttgttttctgactttgtttttgctttatttcagactattggttatttgttttgaaacttgttacacttattttcctatgctttgttggaactattgatgtgtgttttagtgatttaacagtctaactggaggatccatgtgaaaacactaaccaagggtctacaacaatgagcagaattcacaaaggtaagcgaaacgaccagagtgtcgatcgacaccaacatggtatcgatcgacaccaacatggtatcgatcgacaccactctcaggtggcaactcacgttttctaacttttaacttttgattatttctctttcgattcctctagtttactaactatggggacagtgttatctaagtctgggggattcagttactaacttcatcttttcttttcctatgagtcagttgtgtcattttaacttagatagtcgttttattgagtcaaaacttttgtctgaaattatgatctatctctcgagtttattgcctggattgcttaagtactgcagatttaaatcaatcctactaatggaaaatccagaaagccaatcaacaaacttaaggacag

SEQ ID NO: 151230 - DNA, 408 bp, Arabidopsis thaliana landsberg
ataaactatgtttgtgcagtgaggcactatgaggtggtttacttgattcatgaaaaacatgctgaggaggttgaaagcattaaccagaaagtacaaggtgaagctttttgacttcttattctctgatgttctgctcactagatttcaagcaattaagtttatttagtgattgcggtagtgaaactccttgtatgtaattaagtttgttgttgatattcagattacctgaaggagaagaaggggaaagtttggaggtttagtgattggggaatgcgtagactggcttacaaaatacagaaggcagagaatgcgcactatatactgatgacctttcagatagaggcaaaatacttgaacgaaaacaagagattgttagatagtgatgagagggtgattaggcatcttgtg

SEQ ID NO: 151231 - DNA, 3053 bp, Arabidopsis thaliana landsberg; identical to SEQ ID NO: 33294

SEQ ID NO: 151232 - DNA, 1681 bp, Arabidopsis thaliana landsberg
ggaagggcccctcctgcggtaagctatgtgctgatctcacgtgtttacatttttctagaaacaacttctctgggcctttaccggccaacattagcaccttgactccacttgttacgattctagacctctcctataatagcttctctggtgaaatccctatgttgatctccaacattacctttttgaacactcttatgcttcagcataaccagttcacgggtactcttcctccccagctagcgcaacttggacggctcaaaacattctctgtgtctgacaatcgtctcgttggtcctatcccaaatttcaaccaaaccttgcagtttaagcaggaattgtttgctaataacctggatctgtgtggtaagcctctagatgactgtaagagtgcttctagctctcgtggtaaagttgttattatagcggcagttggtggattgactgcggcagcattagtcgttggggttgctttgttcttctatttccgtaaattgggtgttgttcggaagaagcaggatgatcctgaaggaaacagatgggcaaagagcttgaaaggacagaaaggtgttaaggtaaaaacatcattgatttgaattttgctgtatgtggttatgttctaaatttatgatatatgtttggtgcttttgtgaatgttcaggttttcatgtttaagaaatcggtttcaaagatgaaattaagcgatcttatgaaggcaacagaggaattcaagaaagataatatcattgcaacaggaagaacaggaactatgtacaaaggtaggcttgaagacgggtctctacttatgataaagaggttgcaggattctcaacgctctgagaaagagtttgatgcagagatgaagactttgggctctgttaaaaacagaaacttagtccctctcttgggctattgtgttgccaataaggagaggcttctaatgtacgagtacatggcaaacggttacctttatgatcagttacatcctgcagatgaagaatccttcaagcccttggattggccttcaaggctgaaaatcgcgattgggacggcaaaaggattggcatggcttcatcatagctgcaacccgagaatcatccatcgcaacataagctcaaaatgcatattgttgactgcagagtttgagccaaagatctcggatttcggtctagctaggctgatgaacccaattgatacccatttaagcacatttgttaatggagaatttggggatttcggttatgttgctcccgagtattcaagaaccatggttgcaactccaaaaggagatgtctacagcttcggtgttgtgcttctagagctagtaacgggccaaaaagcaacgagtgtaacaaaagtatctgaagaagaagctgaggaagaaagcttcaagggtaacctcgttgaatggattacaaagctatcaagtaaatcaaaactgcaggaagcaatcgacaggtccttacttgggaacggtgtggatgatgaaatcttcaaagtactcaaagtagcatgcaactgcgttctaccagaaatagcaaagcagaggccaaccatgtttgaagtttatcagcttctaagagccattggagagagctataacttcactgccgacgatgatatcttaatcccatctgaatcaggtgaaggtgatttcattgaagagctcatagttgctcgttga

SEQ ID NO: 151233 - DNA, 3110 bp, Arabidopsis thaliana landsberg
aaaaaaaaaaaaaaaaaaaatctgtctctttcacttcacgtttgcgactgtgtcgtcgtcaagctccggatctcatcggcgtttcatcataattatctgtccatctattcaccgtacgactccgttttaggaatctgtagatgtcaatttgagagaaaagactgtcttcattacaacacatttgggacaacaaggatcactcatggcagtggtggatgttcatcgtttcgctgagtcaatcacttgccatgcttggagtcctgatctctccagtatgtttctaacacctctctgattttgtgattctcttctttctctcttccgtcgttttttccgttttagaattataaatgaggaggatctatctatagttagtttggctgggaagatagatagatgatacaactaaattgacttgtgttattcttatacatcttggtaatcaaatttcttcgagtcaatgttttatatgtctgtttgtcggtgtctcttgttaggaacacttggtatctagtattgtacattagtagatgcgcttttctaaacaaatgtaccaagttacatatgatttaacgtctgtaccaaagcctgtaaatttatgtgctttgacatttgtttcgttttacttgttagtggttgctctctgtcctaacagcactgaagttcatatctataaatcattgtctcaagaccactgggagaggttacatgtcctccaaaaggtgaaacctttctctctccctctctttctgtaacttttgaacttgcattccttttgctttctcttcttgggaattccttactttcgtatatttatgtattctcatttcactgatcacttgtcgctgataagtgttgtatagacagcttgaatctcccttacaacaacttcatgattattgttcgtcttgttgcagcatgaccaaattgtttctggaatagattggagctcaaagtccaacaaaatcgtcactgtttctcatgacaggaactcgtaagttgctacctttgatatactttgagaaactccaaacctgttaatcttagtccttcactttttttcgttcgttgaactgagtttagaatgcttcttgaaggtacgtctggagcctggaaggagctgaatgggtaccaactctcgttattcttagactaaatcgtgctgcactttgtgtccaatggagccccaaaggtaaatgtttaatttttctggttcttaagcttaatttccgtaatatgtagtgtaattttcctataatttctacagcttctaatctatgttctcatctttttgctcaatacccatagagaacaagtttgctgttggaagtggtgctaaaactgtttgtatttgctattatgagcaagagaataactggtattttcttcttctgctcctaattctcattattagtccttgattttttctttggcaagtttcctgacttctttgctacgaatggtgttgttggtctatgtaatgatattatcttgtcttatgtactggcatgatattagcaccaatcatattttttattatcttggcatgcataactgtgtattgtttagagattttagaaagatactttcatgtaaacttttagtatctgacattgcttggctttactgtttgcaggtgggtcagtaagctaatccggaaaaggcacgaatcttcagtcacatctgttgcttggcatcctaataatgtacgtgcaatcaacagaacctcttgtacttcatgtagttaaaataataagcaggctctctgtaaaagcattctctaccaaaaatattctataagttggccaccagattgagtatagagtacatgatccctaaaaatagaatatcaatctccacaaactagttaatcttctaaatcattttttctcgtatgcttttttatgttgctgtgctctctgattgtctgttatgcattaggttcttctggcaacgacatcaacagatggaaaatgtcgggtattttcaacatttatcaaaggagttgacacaaagtatgctcattacttgaacgtctacttttaaaacattttttcaaacatgaggccgtttcttatttgtctttcaatgggctgatacagggattcaaaagcaggctcaccagcggaaacgaaatttggggaggtttgactcgtttggctggctttccttcttttagtaaatagtataccacttctgccatatatatgttcagtctactctctcatctaatgttagggagtttttttttccactgtggctttgttgaaacagcaaattcttcagcttgatctctcatattcttgggcatttggtgttaaatggtctccaagtggaaacaccttagcatatgtaggtcagaaaatccttcagacttgggatgtttttccattgcgctctactgaaataatacaatggaacttcaacttggttgcagtttttactaccatctgtcacactttgcgtgtttatgtaatcatgtataggtcatagctccatgatttactttgttgatgatgttggcccttctcctttagcccaaagcgttgcattccgagatttgcctcttcgtgatgtgggtcagcatccacctttattttacttttgagaacctggtttctccggtgtgttatgtcctgaattgatatactatggggaaattgctatttcaggtcctgtttatttctgagaaaatggtgataggggttggatatgacagcaacccgatggtatttgccgcagatgatactggaatatggtgtgtaactctcagaaatatctgcttaaaattctctttcttaggggtttgcatacaatcaaattttcagttcttttattcctcttagatcacaggccggattgttggttctgaaacgaaccactaccaataattgcttcgtttacaagtttttgtatttggtctgtaggagcttcataagatacattggagagaagaaagcggcatcttcaggttccagttacagttcgcaggtacataccaaatcttctttcttatattgcaatatgtctggttttagccttttagtaaaaaaaatatgactgaactttaacttatccctgagttgttcctctaaagatcgtaatctttc

SEQ ID NO: 151234 - DNA, 1739 bp, Arabidopsis thaliana landsberg; identical to SEQ ID NO: 24639

SEQ ID NO: 151235 - DNA, 1718 bp, Arabidopsis thaliana landsberg
tcctcagttcttgatcactatatcttgaaggaattaagaagatgaatggtgaggcacggtctcgagtagtcgaccaagaagctggttcaactccatctactttgagagatgaagatcatccgtcgagacaaaggcttttcggatgtctcccttatgatatagatctcaatcccctacgcattgtaagcttcatatatacacaaaatcatagaatcaacaagattaatatctcacaatacttttgtgttaaactaaagaattggctatgtccataattacaaataatttttttgaaaatattaaaatgtttgtatagaaataaaatgctaattaatagtatcgccggactaatgtttaggtaatggcggaattggtggggacattcattctaatgttcagtgtgtgtggggtcataagcagtacccaattatccggcggccacgtgggattgctagagtacgccgtcaccgctggattatctgtggtggtcgtagtttactccatcggacacatctctggcgcccatcttaacccttccatcaccattgctttcgctgtctttggcggattcccgtggtctcaggtataatgcatccatctcaacacggcgtttgaccaactaagaattgtagttgaattatcttggtcttgatcgtttgtttttgtttatcttagcgtttagaccaagatcaaataatgtggttttttcatttatcaacgaagatgagacgagaaaacttaatcttttgtttggacgtttacaaattattttttatgaaaactgaaaattcttttttggaatgttgtgtcacatgccaggttccgttgtatataacggcgcaaacattgggggcaacggcggcaacattagttggggtgtcagtgtacggagtaaacgctgacattatggcaacaaaacctgctttaagctgcgtttctgcatttttcgttgaactcatagctacgagcatcgtcgtgtttctcgcctccgcgttgcattgtggtcctcatcaaaatgtaagtgaccaaatcgatcttcgttactcttctagtcggcttgttataaaaaaaaaagtatcttctaacaaaaataacgcctaaaatgtgacatttacatactatttcttatgaaattttctttcttaccaaaaggaaaataaaaaatcaaactctctgattagaaaacgtatatgcatataaattatatgttattttgtgcagttgggtaacttgacggggttcgtgattggaacagtcatttcccttggagtgcttattaccgggtacttaccttaaaactccattatcaccgtaaagtatggaaaatagttatttcatgtgatcgtataatgctaacgttttgtggaatatggtatgggttagaccgatttcaggaggatcgatgaacccagctcgatcacttggaccggcggtggtggcatgggattttgaagacttatggatttacatgacagctccggtgatcggagcccataatcggagttttgacatacagatcaattagcctaaaaaccaggccttgcccttctccagtttccccttccgtttcttcacttttacgttaatcacttcaaaacctaatatctattatacaaataaacacttatgatttttattcttggttaaggtttttaagtttttgtcattacgtcattagatgccgtgatgcgaaaacagagagctacttatcggattga

SEQ ID NO: 151236 - DNA, 1380 bp, Arabidopsis thaliana landsberg
aggtcgactctagaggatcccctactccgtcatctccggtttgtccatggggatggaaccaatctgtggccaagcatacggagctaaacaaatgaagcttttaggactaacccttcaaagaaccgtcctcctactcctctcctgctcggtccctatctccttctcgtggctcaacatgcgccgaatcctcttatggtgcggccaagatgaagagatctcctctgttgctcaacagttccttctattcgccatccctgacctcttccttctctctctgcttcaccctcttcgaatttacctccgaacacaaaacattacattgcccgtgacttactccacggccgtgtccgttctcctccacgttcctttgaactacctcctagtggtgaaacttgagatgggagtagcgggagtcgctatagctatggttttgacaaatctcaaccttgtagtcctcttatcctcttttgtgtatttcactagcgtgcatagtgatacatgggtcccaattactattgactctcttaaaggttggtcggctttgctctcacttgccatacccacttgtgtatctgtttgtttggagtggtggtggtacgagtttatgatcattttgtgtggacttttggctaacccaagagccaccgtggcttccatgggaatcttgatccaaacgacggctttggtctacgtcttcccatcctctctcagccttggtgtctctacaagaattagcaacgagcttggggctaaacgtccggcgaaagctcgggtatccatgatcatctcactcttctgcgcgatcgccttaggcctaatggcgatggtgtttgctgtgctggttaggcaccattggggacgcttgtttaccacggatgcagagattcttcagctgacttccatcgcattacccattgtggggttatgtgagctcggaaactgtcctcaaacaaccggttgtggggttttaagaggctgtgcaagacctacacttggggccaacataaacttgggttcattttactttgtgggcatgccagtcgctattctgtttgggtttgtcttcaaacaagggtttccaggtctctggttcgggttgcttgcagctcaagcaacttgtgcttctctcatgttgtgtgcacttttgagaacagattggaaagtccaagccgagagagctgaagagctgacgtcacaaactcccggaaagtctccgccccttctccccatcgcaagctcaaagagccggtctacctccggtacagaagatatgatgagaaccatgttggtttagattgatagctattctctggaggcatttgccatcaacattgacgtacatatatgttcttgtcatcattttttggagtttatagtgct

SEQ ID NO: 151237 - DNA, 924 bp, Arabidopsis thaliana landsberg
  unsure (1)..(924): unsure at all n locations
ttcntactntcttctcacgtctctccacctcgatccgtgatggcttgtcacagcgtcgtccatggacggagctcatcgatcgtagttccatggcgagacctgaatctctcaccgatgccttgtcccggataaggaagaatctcgcttacttcaaggttaactacgtcgccatcgtctccctcgtactcgccttttcgcttttctctcatcctctctccctccttgtcctcatcggactcctaggcggttggatgtttctctacctcttccgtccctcagatcagccactggtcgtcttcggtcgcactttctctgatcgagagactctgcttgctcttgtgctgtctacgatcgtcgtcgtgtttatgacgagcgttggatctctcttaacctccgcgcttatgattggtgttgcaatcgtttgcgtacacggtgcgtttgtggttccggatgatctcttcttggacgagcaagagcctgcgaatgctggattactctcattccttggaggttctgctacctcagctgctgcagctgtctcagggagagtctaagagctggatttgattcagatctcgtcaattgtggttggtaactccgtactgattttagtgatttgttgttgttgaaatggaatgtagattcgtaacgaagctctacagatttagaactacgaatttttggttgcagtatctgcttcttcttgttgttttatctctttggtggctcgacacttttatgttcagatgtagaaaactcaaagttgatctttctctatcgtttctcctattgtgggattcacttttaaaatttcatctaccttcaaatcagtttgttctcttttttcctttatcagtagcattgactttcagagcattcttcaccaaaatgaataaggatattactgcaattgggctgatcatg

SEQ ID NO: 151238 - DNA, 822 bp, Arabidopsis thaliana landsberg
  unsure (1)..(822): unsure at all n locations
aaaatcgccatgagatcgagaagtaaccttataggtctcataaacttcttcactttcctcctgtcgattcctatcctcggcggtggaatatggcttagcagccgagctaactcaaccgattgcctcagattcctccagtggccactcattatcatcggaatatcaatcatggtcatatctttagccggaatcgccggagcttgttaccaaaacaagttcctcatgtggctttaccttttcaccatgttctttgtaatcgctgctcttataggattcacaatcttcgcttacgtagttactgataaaggctcaggccggtttgtgatgaaccgtcggtatcttgattattatctcaatgattattccggttggttaaaggatcgtgtcacagataatggatattggagagatatcggatcgtgtgttagagattctggagtttgtaagaagattggaagagatttaaatggtgttccagaaactgctcatatgttttacttcagaaatctttctcctgttgaggtattattattttttttgtttaaaagaacatactagtgtactctaagaaactattatgtcacttgttcttggaatctaacacggtgtgaacgttatatgatatgtatttgttttcaatctgtagtccggatgttgcaagccgccaacagattgtggctatacgtacgtgaacgagacagtgtggattccgggaggagaaatggtgggacgaacccggactgtatgttgtggacaatgacagagactatctgttacaatgcagtcttgtanagcggtgtcttggtacttgaaaagagtgga

SEQ ID NO: 151239 - DNA, 2203 bp, Arabidopsis thaliana landsberg
atgggttgtgctcaatcaaagatcgagaacgaagaagcagttactcgttgcaaagaacgaaaacaattgatgaaagacgccgtcactgctcgtaacgctttcgccgccgctcactcagcttacgctatggctcttaaaaacaccggagctgctctttccgattactctcacggcgagtttttagtctctaatcactcgtcttcctccaccgcagcagcaatcgcttctacttcttctcttcccactgctatatctcctcctcttccttcttccaccgctccggtttctaattcaaccgcttcttcttcctccgctgcggttcctcagccgattcctgatactctgcctcctcctcctcctcctccaccgcttcctcttcaacgtgctgctactatgccggagatgaacggtagatccggtggtggtcatgctggtagtggactcaacggtattgaagaagatggagccctagataacgatgatgatgatgacgatgatgatgattctgaattggagaatcgtgatcgtttgattaggaaatcgagaagccgtggaggtagtactagaggaaataggacgacgattgaagatcatcatcttcaggaggagaaagtccgccacctcctcctttggcgaattcacggccaattccgccgccacgtcagcatcagcatcaacatcagcaacagcaacaacaacctttctacgattacttcttccctaatgttgagaatatgcctggaaccacactagaagacactccaccacaaccacaaccacaaccaacaaggcctgtgcctcctcaaccacattcaccagtcgtcactgaggatgacgaagatgaggaggaggaagatgaggaagaggaggaggaggaggaagagacggtggttgaacggaaaccaccggtggaggaaagaccgaagagagtagaggaagtgacgattgaattggaaaaagttactaatttgagagggatgaagaagagtaaagggatagggattcccggagagaggagaggaatgagaatgccggtgactgcgacgcatttggcgaatgtattcattgagcttgatgataatttcttgaaagcttctgaaagtgctcatgatgtttctgagatgcttgaagctactaggctccattaccattctaattttgcagataaccgaggtaattttgattcgataaatgtatgggagaaacaaaatgattggtttagctaaaatatttaagattatgtgttgttgttgtttcaggtcatattgatcactctgctagagtgatgcgtgtaatcacttggactaggtccttcagtggcataccaactgctgacgatgggtaaggtgatgttgatttgaaagagaatgaaactcatgctactgttcttgacaaattgctagcatgggaaaagaagctctatgacgaagtcaaggtaactatatcaaaacttgtctcttttttatgcttgtgcttgtttagtgtagctaaaagattttaactttttgaggaaagattcttgcaaccatgtttagtctttttgggtaatcttctctcctgagaaaagcccctttgattgttttgggtagttttatgagcaaaaatgatatatttttctcttgagagtctaattttgggatacacttcttgttggatataggctggcgaactcatgaaaatcgagtaccagaaaaaggttgctcatttaaatcgggtgaagaaacgaggtggccactcggattcattagagagagctaaagcagcagtaagtcatttgcatacaagatatatagttgatatgcaatccatggactccacagtttcagaaatcaatcgtcttagggatgaacaactatacctaaagctcgttcaccttgttgaggcgtaagtttcgcttcttggtagatattttttcctatgatgttttagacaaattgattttgagttcttatgcaaatttttttgcaggatggggaagatgtgggaaatgatgcaaatacatcatcaaagacaagctgagatctcaaaggtgttgagatctctagatgtttcacaagcggtgaaagaaacaaatgatcatcatcacgaacgcaccatccagctcttggcagtggttcaagaatagcacacgcgaattttgcaggagtgatagatctatcagaaagaatacataaaagcacttggcggatggctaaaactaaat

SEQ ID NO: 151240 - DNA, 900 bp, Arabidopsis thaliana landsberg
gcccgggacgtgtggtctacatctagcctaagctttataagcttgtctacgaattcagattgcttttaagcttcgaggtgtcactgacaaatcttggaggttccgctactcttactggaacagtagtcaaagctatgtcatgactaaaggttggagccgttttgtcaaagacaagaagcttgatgctggagacatcgtttcttttcagagagattcttgtaataaagacaagctttacatcgattggaggagacgacctaagattcccgatcatcatcatcagcaattcgccggagctatgttccctaggttttacacttttcctcatcctcagatgccgacaaattacgaaactcacaacctttatcatcgatttcatcaacgagatctaggaattggatactatgtgaggtcaatggagaggagtcatccaacggctgtgattgaatctgtgccggtgatgatgcaaaggagagctaatcaggaacttgttggaacggccgggaagagactgaggctttttggagttgatatggaatgcggcgagagcggaatgaccaacagtacggaggaggaatcatcatcttccggtggaagtttgccacgtggaggcggtggtggtgcttcatcttcctctttctttcagctgagacttggaagcagcagtgaagatgatcacttcactaagaaaggaaagtcttcattgtcttttgatttggatcaataaaaatgatgatgatgaaattagctggtattttaagaaaaaaaacatacatatataattctatatatatgacaacataatgcattgatttcattataaatttatcggataattgatatatgttctaataatatgcattgtcaatagagagattttatggttttcggatatatata

SEQ ID NO: 151241 - DNA, 1602 bp, Arabidopsis thaliana landsberg
ataggattgtcatgtgccttagatactttgagtggtcaagcttatggagctaagctatatcggaaactaggtgttcaggcttacacagctatgttctgtcttactttagtgtgtctccctctctctctcctatggttcaacatgggaaagcttattgtgatccttggccaagaccctgctattgctcacgaagctggtagatatgccgcttggctcatcccaggactgttcgcttacgccgttcttcagccgctcattcgctacttcaaaaaccagagcttgatcacacctctcctcgtcacctcttctgttgtgttttgtatccacgttcctctctgctggcttttggtttataagtcagggcttggtcatattggaggagccttggctctcagcttgtcatactggctctatgccattttccttggatctttcatgtactactcctctgcctgttctgagacacgcgcgccgcttaccatggagatattcgacggcgttagagagtttatcaaatatgctcttccttctgcggctatgctttggtacatcacttttctctgttcctttttcacttctcattgcctccacattttttgttagaaactcttttatatatgggttgcagcctggagtggtggtcatatgaactcataatattactttctggtctgttacccaacccacagctggagacttctgtgctctctatctggtactcatccttgcatctttccatttcctgtcacaatcttgaatttgcaaaatcataatgttattcatactacggacagtttcgaaacactttcaataacttattcaataccactagcgatcgcggctgcagcaaggttagagcttttgtcaccactacccagtacataaatgctgaagtatactttctgttatggtttcatgttcataagcaagtacattgtgcagcacaagaatctcaaatgagttaggagctggaaactctcgagcagcacatattgtggtctatgcggcaatgtctcttgcagtaatggatgcattgatggtgagtatgtctctattagccggcaggcatgttttcggccatgttttcagcagtgacaagaaaaccatcgactatgttgcaaagatggctccattggtctctatttctctcatactggacggtttacaaggggttctctcaggttcgagacttgttcctatatctgtactcaaacacaagctattatcagatattgtttaccctcttttcctccaaagtctcatgtctcctgttgcgcactttagtcctgtgtcaaagttacaaagatatcccaaacttttactcttttctgacttctgtcactcttaatagtcgtttgatggtttgcaggtattgcaaggggatgcggatggcaacatataggagcttacataaacttaggagctttctatctctgggggatacccattgctgcatctttagccttctggattcatctgaaaggtgttggccttaagattggaatccaagccggtgccgttctgcaaacgcttatgatggctcttgtcacaggctgcataaactgggaaaaccaggtctttatcccttttcttttgttcttt

SEQ ID NO: 151242 - DNA, 838 bp, Arabidopsis thaliana landsberg; identical to SEQ ID NO: 54946
  unsure (1)..(838): unsure at all n locations

SEQ ID NO: 151243 - DNA, 2891 bp, Arabidopsis thaliana landsberg
  unsure (1)..(2891): unsure at all n locations
atggtgagttaattggttgaagaattgcgagggaattgctaggcccaaccgcacttccctcgcaaattttaccctaaaccctaaattataaaaaatcataaattgcgagggacttgctaggagttctggcaattccctcgcaatatgtggtgcgttttaattggtttaaaaatcttcctcgcaatttcaaagcaaactatgcgagggttttgcgaggaaataaattcctatatatactcgaagacctagtttgagcggactcaaaccagccgcatcaaaccctaaccctaaaatttttcttcgattctcttcttcttctctgatctcttcggcgccggatctcttcttctccgatccgattctgtcgccgcctctcttcttcttcttctctaatctgttatactcatcgccgcctctcttcttctccgatctaattacggcgcagagtctcttcgccgcctctcttcttcttcgatctgtgctccagaaccgccgcgtctcctcttctccgactcgatcggttttgcctcaaaggtaatttatgtttctccaatctaagttcttctctcaaatccgacttattcttcttctccgatcttactctttttcccagatctaactcttcttcttcttctctaatctgttatactcatcgccgcctctcttcttctccgatctaattacggcgcaaactctcttcgccgcctctcttcttcttcgatctgtgctccagaaccgccgcggctcttcttctctgactcgatctattttgcctcaaaggtaacctctgtttctccgatctaagttcttctctcaaatctgacctattcttcttcgatccgatcttacttcttttttcccagttctaacacttgatttgttttttgtgcaagatgccgtcagataatacttatgtccggtttagacaataacgtgacccgttgcatgtcaattctccgcttagtggtgggaatatctcaggggttcaaggttcaggttcaggttcaggttcaaccgttccaccatcgccttcaacgccaatgactcagccttctgtcaatcattctgatgttcaagctgaccgtctnnnnnnnnnnnnnnnnnnnnnnnnnnnnnnnnnnnntggtcgtgctggcttgacaaggctagacccaaagcgtcctccgggaactctatggtaaggttaagcttatagtctctggaattaggtcttgtaagttggttagttctgccttagaagtttggtaagttggttggttctgccttagaagtctctggattttggttggttctgccttagaagtttggtcctgccttagaagtctctggatttaggttggttgtacttagcattgtgatgtcttagaagtttaaagacatagaaatccttatgtgtgggctggttggtcttcttgtaggtttgacgatgatgctgcagttgcagcaacagtccgcagcatctttgaaagagatttcaaagaacctcatgccaattggtcacaaacatcaaaggctacaatcgatcgatggtatgaaacatttgcggtaagttctgtgctcttttgatgtttatgcttgttttgtgtatggtttcatttctgatgttagcttctcttttgtagcaagtatataactgggaccgttcaattaacaaaagagtaagggttgagtttgaagcaaagctaaagtctaggatgactgatcaagtgtcaaggtggaagggaaattggaaggagaagggtgatgaagccaagccaaaatggattgatcctgatgtgtggaaaggtcttgtactgttttggcaagatccaaagtcagaaaaaaaagagtaacaacagcagaaatgctaggtatcatgatccggatggcaaaggcatctataaacaccgttcaggccagacctcatacaaagctcgtgcaagaaaacgagtaagataagtattcttctctccttaccattacttaatctagaattacatactgacatcttgtttatctctttgtgtttcagtgtgagaagactggagaaaaaactcctgatttccttgagctgctagatgagacacacagaaaagcggatggaagcttcatcgatgggaagtcagaggagatctacaagcaagtaacatctaggattgaagaggaagagtctcatatgagttcaggggacaatccggagagcactggatcaggtggactttctgttcatgtcaaaaacaagatatttactgaggtaaattttatgtgctctttctgttgtctacttgataatcactgttagcgttgtctacttgataatcactgttagcgttgtctagttgtgtctgaaatctgattgtgttgtctgaaatctgattgtgttgtctgaaatcttattgacagcttattgtgttgtctgaaatcttgacagcttattcattatactttgtgtagtgttgtgtttgaattgctttctattgcaagtgtggttgtgttgtctacttaataatcactgttagcgttgtctagttgtgtctgaaatcttattgtgttgtctgaaatcttattgacaacttattgtgttgtctgaaatcttattgacaacttattgtgttgtctgaaatcttgacagcttattgtgtttgaattcttttgtcttgtgttgaacttgttttctcacttgttttctgttgtgtccttgtgagtttttgtgacctttgcaggttgctccgagaaagaaaggaaggatttatggtcttggatctctgcagtttgaagcatcctcagctcatagtggtccaacacttcctagtgatgatccggttatactttctgcgaagctggctgccgctgaagcttgcattcaaaatcaggctgagaagatcaacagctttgatatcctctttgactat

SEQ ID NO: 151244 - DNA, 1767 bp, Arabidopsis thaliana landsberg
cacatcgataatggcttctcttctaacaaaacccaaacccgttttcctctgttcaccatcgttatctccaagaactttgaacacagcaacaccgtcattgaatttcaccagaatttcattcacccatcaccaaaagcttgctcctttcaagcctcctagtctcgttgttgcattctctgaaaagggtttgaagagagatgtcaccacagctgctgcagcgacggagggagattacagaaggataatgttatctgatgtgttggtgaagaagaaggaaaaagtagtttggtgggagagagaatggaaagctatggactttggagctgttgctgtcgttttgtctatgcatttgcttagtcttttggctccgtttcaattcaattggagagctgtttcggttgcttttgggctttatatcgttacaggtcttctggggattactctgtctttccataggaatctttctcataaagccttcaagctacctaaatggcttgagtacttgtttgcttattgtggagctcaagctcttcaggtgatttgatttgatgataatgtagtttttgttgaatgtgtaattttgtcacaaattgtgtgattgatgtttgtgtgttgttttcttcagggaaacccaattgattgggtgagtacacataggtaccatcatcagttttgtgattcagacagagaccctcatagcccacttgatgggttttggttcagtcacatgaattggatgtttgataccaatacaatcacccaaagggtaacgatttgcttcttctcttttttcatattaatatttttctgaaaactgtattctaaaactctgttttgtatatgatgtttaaagtgtggagagcctaataatgttggggacttggagaagcagccattctatcgattccttcgaaccacctacattttgcatccgctggctctagcggttgctttatacgcaatgggtggctttccattcatcgtttggggaatggtatgttctgtggctagtcttgcattttgaatctattcactgttaatttttcataactagctgataggattatgatgtgttttagctcggccaaaacaagataattctaccagttttttttgtgtagctatcaatttgctgggccaaatctcctcacttgatttccctcttgcgttttcttgtaatttagtgcaacttagattattgaccttaggcacacaagttgtgtttgttgaacaaaacagaaccacaagtaaatatcttatctttcttgtaagaaagatttgtggctcatgctcttctcgtgaatggacttaattctagttgcttgtatttagttagatataaacaacatttgcatgctaaaagtgaaactacattgaatttttttttatcaaatttgtaaacggaacgaaaagaagaaaaaaggcagaagaaacttgattataactactctaacatttccatagagtcacggtttctgatttgattttcgtctctaatcctttttttcttgggttttgcagggtgtaagaatagtatgggtatatcatataacttggctagtgaactcagcttgtcatgtatggggaaaacaagcatggaacacagacgatttgtctaagaacaactggtaacactcttcatcgatcactccttaatcactcgatccatcttaagataatatagttgtacccaaccccctctgaattataattttcagaaaggaaaagctctagcattcggggaaggatgccaacaacgccatcgtt

SEQ ID NO: 151245 - DNA, 985 bp, Arabidopsis thaliana landsberg
ggtgcacccatttctcatgtactttagatttctcttcctcgtgggccaaggtaattttcttctcgctcttagaaaatcactatttatgactcttcccgaatagagcttatttttgcatgcggttgattcgagtatagacccagttaagtttagttggaatttgccccctaattatatagcccgttctgattcgttagaactcgtccatatactacaatgtgttttcttttggcatagtgttattcatagaataattttgctatcgatatattgattttttcccctcgaattaataaatctggacacacgtgaattttttgcagaacaaaaagttacattcgtgattttgcatgtgtgtgttttttaaatgtttttgccaatgattggttgattatgggatgaagcaatgatgacttacaaatcggcgtacgcgtcgcaccaagttcaaaaaatggttcacggtgggcttcacttaataggcttagttctaggtattgtcggaatctgcgccgcctttagattccacgacaaagtaaacctaaaagacatggtctctcttcactcctggatcggtctcaccactttcatcctcctcggcgtccaggttattaaactactatacttcataaatactactttaacgttacctaaactttcataaaaatggaaaaaaaaacttgcataaaaataactgaaccttatggtgcttgcatataaattacacagtggctattcggtgcgttcacattcttagcgccgcaatcatcgtctggaacaatgactaagatgatgccgtggcacgtcttaagtggtcgggctctactttatatgggtattgtcgcaacactgaccggactcatgcaaagagctacgatgcttggtcactagcacaaacgctgagtcacgtctaattaacttcctggggttagccattctactctttggcgtttccgtcgacttctccgtcgcccttggccgttacaac

SEQ ID NO: 151246 - DNA, 976 bp, Arabidopsis thaliana landsberg
tgaaatccaaaaataaagaccgttgaaccaagttgaactttctataaataagataaataaatttattgaacttgagttatttcaagtttattacagcgatggcttgttgttattggtaactgatgaggtagattccaagatcgtggtttggaatccgtatttgggacaaaccaggttgatccaatgcagagatattgagcatttcagatataggtatgctctcggatacgacaacaaccgtaaccacaaaatcttgatgtataataggaaaaattgcgaaatctacgattttaaatctgattcatggagggttcttgatatcattcccgacttgcatacaaatatttatgtacgtgacatgtcaataaagggaaatacttattttttctatcgaggtgagaaaataggggaaggactagctggttgcttactttcttttgattttacaagagagagatttgtgtcgtgtcttcctctcccatttcaaattgataagtttgatgataatgtagctctatcttctactagagaggaacatcttgtggtgttatttaataattgggaagaatctgagatggagatatgggtgacaactaagattgaacccaatgctgtgtcatggagcaacttcttaaaaattacttactgtacacttccgattttagttgggagttttttcattgaccaagagaagaaacacgctgtgatttttgattcaagcttatcttgtggatccgtagcttgcatcactggagagactggaaacttgagaactgtggatcttggagtagctgccgtgccgtatcgtcagctaccagtgtgctcttatgctccaagtttagagcaaatcaaccaaggccaagaactaccccttattggtcagaagaaaatatcaagattatcaaccagtcttttttacattatgttatttgtttcgttcatcaccttcattttgttctttgactctgttttcttt

SEQ ID NO: 151247 - DNA, 830 bp, Arabidopsis thaliana landsberg; identical to SEQ ID NO: 37858
  unsure (1)..(830): unsure at all n locations

SEQ ID NO: 151248 - DNA, 2358 bp, Arabidopsis thaliana landsberg
ttagttttctgattcttgaaacacagtggtcggacaatatttgcaggttcctgtgggtggatgctataggatgatcgatatcccgatgagtaattgcattaacagttgcataaacaagattttcgtgctgactcagtttaactcggcttccctcaatcgccatttggctcgtacttattttgggaatggcataaactttggagatggttttgttgaggtatatatataacaatatggtttcctttataaacttctcagtttgtttctggatccgatgaaataaatcaaaggtaaaatcttatcgaaacaggttctggctgctacacaaactcctggtgaagccgggaaaaagtggtttcaaggcacagctgatgctgtgagaaaatttctgtgggtgtttgaggtatgaataacttatgatcattttacttgttttatcatacattaagtctgttcctttatgattctttaaaatcgtctgaatctactggtactttttattataggatgctaagaacaggaacattgagaatataatcatcttgtctggagatcacctatatagaatgaactatatggactttgttcaggtaatataatagtaaacattcctcttagcagtttcaaaactagtcttgctaactaactctaaacactatgcattggacagcaccatgtcgatagtaaagccgatattactctttcgtgcgcgccggttgatgagaggttagtttctttagcactatgatgtgacttttgtatgattttggttttaagatgttaacttaatctttagaaccccttatgtgaattttcagccgtgcatcggagtatggactggtcaatattgatcgaagcgggcgtgtagtccatttctctgagaaaccaactggcatcgatctgaaatcaatggtacaattttatttcctaaaacttaaaatacgtacaaaacagaatggcattgatctgaatatttttctgttgttttgatggttataactgaatgcagcaaaccgatactactatgcatggactgtctcatcaagaagcagcaaaatctccatacattgcgtcaatgggagtttattgtttcaaaaccgaagctttacttaagcttctgacatggcggtatccgagttccaatgactttgggtctgaaattattcctgcagctataaaagatcacaatgttcaagtaaaaaaaaaaaaaaaactcttctgtttttaaaaagatttcttgagttttatcactttatcacaaacgatttaaccaaattgtcttatttagggatacatctacagagactattgggaagacatcggaactatcaagagtttctatgaagctaatattgctcttgtcgaggaggtaagttataaagaggaactataattgagtttctatgaagctaatttttttggttaatacccaaaaatgtttcttacttttgaatttatctatgattcaatctcttaactattgttctttcgttcttgttttatgcagcatcccaagtttgagttttacgatcagaatacgcctttctacacttctcctcggtttctaccacccaccaaaaccgagaagtgccgggtagagatctttctctttacgtcgaagtcctctttgtttgcctgttaatctcgagtcttgattcgctgattggtatgatcctcgtgatgattttgcagattgtaaattcggtaatctcacacggatgtttcttgggagaatgcagcattcaacgttccatcattggtgaaagatcacgtcttgactatggtgttgagcttcaggtgtaaatccttggtcatcgaatgacctatagctgtatggacattgtcaaattcaaaagctgagtctggtatttgtttgcttcttgcaggatactcttatgttaggagcggatagttaccaaaccgaatctgagatcgcgtctctgcttgcggaaggaaatgttccaattggcattggccgagatacaaagatcaggtatcaaaccgaaatcacaataatcttctctgagtttgattcttaaactctgatgctatcttttattacattgaaggaaatgcatcattgacaagaatgcaaagatcgggaaaaacgtggtgatcatgaacaaagatgtatgctttcttatccattcttgattctctttgcatttgatgtctctaagatcaatgaagatcaagacttttgagagattcaacattcctaactttaatcgttttacttctcaggatgttaaggagtgctgatacgaccaggaggacaggatttcatacgattcgtatcgtggaatgcgctggtggttgctctataaagcgcctccatctaaagaccgtactgtgata

SEQ ID NO: 151249 - DNA, 1421 bp, Arabidopsis thaliana landsberg
  unsure (1)..(1421): unsure at all n locations
gtgtgtgttgttgttgttggcactgtgccactttctctctcgatgaaccctctcaagcaagcttcttcgatcttccgagcttagtttcgtttctaaatgtaagttttcaagtttttgtttcagtaagaagattgatagacctaattatttgttccccttctatatagtagagatttcacctagattggtccgtacatatcttatactgggattcgaatttggctgcctcagagtcagagattgattaattgatcaggtcaccggaaactttttgtctcgatttggatctcttatgcaaaatctgttgtgtcctaattctatttgattgtaaatcaatttgattctgggtttattacagattcagctgttgaaatcgtgcttattgctacaaattgagaggcactaaatcagtgaggtcgtaaagaagaaggcaaccacaatgatgcagnnnnnnnnnnnnnnnnnnnnnnnnnntttccctcataggtattttgtgttgccataagtttataagctttctcattcgcttcattgtcagaatatgttattttggattcttgaatattaattttgcagagtctttccacggtttgatgcttcgattggtattaagcccccaaagctttgtcaagttggtttcattggaaagactcaatcttatgggatttcaagtccgatacggcaaagaagattatatgtgaatttgaatgctaatgatggtcacccatccatgtctatgttggaagaagaaacctctactgaaaacaacgcacccagtcaagaagccgagcttccgttcagcaaatggtcaccttctaagtacatatggagaggtttatcagttcctattatagcaggacaagtcgttctccggattttaaagggtaagattcactggagaaacactcttcaacagctggagagaaccggaccgaaatctctaggagtttgtcttctgacttctacatttgttggtatggctttcacaatccagttcgttagagaattcactagactaggtctaaacagatccattggaggtgtcttggctttagccttctctagagagctaagtccagtcatcacatcgattgttgttgctggacgaatgggaagtgcatttgcagctgaactagggacaatgcaagtctcagagcaaactgatacactccgtgttttaggagctgacccaattgattatctaatcactccaagagtcatcgcctcgtgtttggctctaccgtttctgacactcatgtgtttcactgttggtatggcttcaagcgctctgctctctgatgcagtttacgggatcagcattaacataatcatggactcggctcaccgagcacttagaccatgggacattgtgagtgccatgattaaatctcaagtctttggagctataatatcggtaatta

SEQ ID NO: 151250 - DNA, 1232 bp, Arabidopsis thaliana landsberg
gaaaaatggagatatggttacttatcttgggctctctcttcctctctttccttctcaatctcctcttctttcgcctccgtgactccttctctcttccgttaccacctgaccctaactatttccctttcattggaaccatccaatggctccggcaaggcttaggtggactcaacaactatctccgctccgtccaccaccgtctcggtcccatcatcacccttcgcatcacttcccgccccgctatattcgtcgccgaccgttctcttgctcaccaggctctcgttttgaacggtgccgttttcgccgatcgtccaccggcggaatcgatcagtaagattatttcaagtaaccaacataacatcagctcttgtttatatggagccacgtggcgtcttcttcgtcggaatctcacttctgagattctgcacccttcccgcgtgagatcttactctcatgcgcggcgttgggttcttgagattctttttgatcgatttggtaaaaacagaggagaagaaccgattgttgttgttgatcatcttcactatgcgatgtttgcgcttcttgttctcatgtgttttggagataagcttgacgagaagcaaataaaacaagtggaatatgtccaaagaacacagcttcttggcttttccagatttaacatccttaccctttggcctaagttcactaaattgatttatcgaaagagatgggaggagttcttccagatgcagagcgaacagcaggatgttttgcttccgctgattcgtgctcggaggaagatcgttgatgagaggaagaagagatcatcagaggaagaagacaacaaagagtatgtacaatcatatgttgatactctgctcgatgttgagcttccagatgagaagaggaagctaaacgaggatgagattgtgagtttgtgttcggagtttcttaatgccgggactgatacaactgccaccgcgttgcaatggatcatggcgaaccttgtgaaaaacccggcgattcagaggaggttatacgaggagatcaaaagcgtagttggggaagaagcaaaggaagtagaggaagaagacgcgcgaaagatgccgtatctaaaggcagtggtgatggagggtctccggagacatcctccgggacattttgtgctcccccacagtgtcactgaggacactgtgttaggaggatacaccgcgccccagaatgggacaattaatttcatggtaacaatcaaa

SEQ ID NO: 151251 - DNA, 2746 bp, Arabidopsis thaliana landsberg
ttcaccaaagtatttaagcacaacaatttctccagcttcgtcagacagtacaatacttatgtgagtgaacttcgatcgattcttttttatttgtttttctcttcattgattcgattttcttcaatttcgtagttcgattttagggaatcttactttatgtgcttcatttttattttgctctcttgtttttttttgtggttgaattaagcattagttattgataaaactcacgaatgatttaaggttgcaagaaggtgctttgagaagtcgactcctatttagtgtatagtatgatgctactgattgatgttcctatatagttgttgacgctggtggttgaactatgcacgtctagtaggttgtgttaatgttgattttagttgcactaactgttaaagattggatctttttgggttctgacaaactcttgcaagataatttcacatatttgtattgttcttcagttgttttttgtacatgtataccctgtgaactgcaggcatatatgtttttgtttttctaagtatctgagcttgcatccgtgtctgtgaggctggaatgaattttcttaggtcaagcaaaactaacaagtgtatactcttgcgtagcttgttcctcccctgttcttatttacttaccaaaaggttccacgaactttgcaggcttatttggacatgtgctcatatgtgtctgacgattggttgattcagcacttccatttctggcctcttaagtcacaaaacaaaatttctatcagttgtcccatgttagctttccattcgtttgtatttgtccgtccaggtacatgccgatacactaacaactgtattagtttccttggaccatggtagtttggtgctgcagctagacccagtgaacgtatcataccatatctagaatagttgttattaacgtatttaatggtctttatgtttatacaaatcttctatgttggcttcctattgcaacggaatccaagtaacttcttgcggttgatgactgttccattctccatgcttctttttttcagggttttagaaaagttgatccagaccgctgggagtttgcaaacgagggctttttaagaggccaaaagcaaatactaaagagtattgtccggcgaaaacctgcacaagtgcagcctccacaacaacctcaagttcagcactcatctgtgggtgcgtgcgttgaagtgggcaaatttggactcgaagaggaagtggaaagacttcagcgcgataagaacgtccttatgcaggaacttgtaaggttgaggcagcaacaacaagttaccgaacatcatctgcagaatgtggggcagaaagttcatgtgatggagcagaggcagcaacagatgatgtcctttctagcaaaggctgtccaaagtccaggtttcttaaaccaattttctcagcagagtaatgaagcaaaccaacacatttctgaaagcaacaaaaagaggaggctacctgttgaggaccagatgaattctggcagtcatggggttaatggtcttagccgccagattgtgagatatcagtcatcgatgaacgatgcaacaaacactatgcttcaacagatacagcagatgagtaatgcacctagccatgaatctctctcaagcaataatggtagctttcttttgggcgatgttccaaattctaacatttcagacaatgggagctcctcaaatggatcacctgaagttacattggcagatgtttcatccattcctgcaggcttctatcctgcaatgaagtaccacgagccttgtgaaacaaatcaagtcatggagaccaatttgcctttttctcaaggtgatctcttacctccaacgcaaggagcagcagcttctgggagctcaagttcggatcttgttggatgcgagacagataatggagagtgttttgatccaataatggctgttttagatggcgcactcgaactagaagctgataccttaaatgagttgcttcctgaagtccaagattctttttgggaacagttcattggtgagagcccagtgattggtgagacagatgagttaatctcaggatcagtggaaaatgatctgatattgaagcatatagagttcctttcaaccatgagtaatgtgtggagcaagtatcaacatatgagccatcttactgagcagatgggacttctcacatcagatgctctcagaaaatgagattgccacaggccacaatctttcctcatgaggtaatcagtctatctatattgatatgttataaaccacacactttccaaaatttaaattttgtgcaaaaccaaacccctcgtctttgtcttgttatcgcagatgggttaagattttgtggagccgcaacaacaaaaagaatatgaccaaaggaggtactatgtatgtatgtatcaaactgttgtaactctaattcttgtcaatgtataataaaataagagaaatattgccttaaaagatttttgcattgcaatatctttgtttgttactgacagaatgaaaaggagatgcttcaaagtgagagatattcttctgttcttgtgtatgtctttagagatccttgtttatttttgttacattaagtgcaaaaattggcattttggttaacctgtggccaaatcttacctgctttagtgttttttttatcagtccttcacttttagtttcttgagtaaaactaatgttccaatttcgtctaaaggaaatcatctaaagagagagtaaaaaggaagaacgtgtgtcgtg

SEQ ID NO: 151252 - DNA, 1969 bp, Arabidopsis thaliana landsberg
  unsure (1)..(1969): unsure at all n locations
tcaaaaggcagcccaagcaattcatgttgccaaagttcgatccaacagaccaaaaagctggtctgtctcttcttgagaatgtgactaccaacgtaaagcaagattcaagattctgtcttgaaaacaatactttcacgtaaatgctcataccaagtatcttagtggtttcctcaacggtcaagctgataagaaaagcttcaagaagaatgtacccgttgtaacctacgaagatattaagccttatatcgatcgtatcgccaaggaaaagccgtctgatctcatctgtgatcgacccatcagtgtactcttgaataggtatcttccaaacaatttcatagatttgtatttataagtttaatgcaagatttgaaagaatttagaccagactagaatatgagaagagactttaaatctaggctcacataacccaaataagatctacccactttggattttcttaattcctctgttttgcctgaagaattgtggttaaaaaattattgatacatgagtttgtcaatcttttaaaaaaagtacattaaggaagggattgtatctgcagctcaggtacttcaggaggagttccgaagctgattcctttgacaacagaggagttggaacagaggatttcgtttgcttctctctatagacctctactctacaagtaaagagttttccaaactccaacttgtctctgttttattgatgataccaaaagaaaaagagtaggtaaaaccccaaactcattgtatcnnnnnnnnnnnnnnnnnnnnnnnnnnnnnnnnnnngaaaatctttcatgttatatttcgtgactcgagaaagcgagactgcttctgggatactggtcaggactatgataacttgtgttttgaaaagcgtgacgccagctaactcttttatctggtaaatctataaaaacctttgctcccacgttacattacacaattcattctttctgctactatttctttattgtgtttgttatatgacttacagggatcaatcacagataagcccgcatgcgattacgacttgttcagacactactcagagcatgtactgccaactgctttgtgggcttctacaacgagataatgtaggtcgccttggtgcaccatttgcttcatcctttctcaaaataatcaagttcttggaggatcactggcctgagttttgctcaaacataaggactggttgtctcagtgactggattacagacccccaatgtgtttcagggatcggtaagttcctcactgctcctaatccggaactagcgagccttatcgagcaagaatgcagtcaaacatcatgggaagcaatagtgaagagactatggccaaaagcaaaatgcatcgaagccattgttacaggaaccatggcnnnnnnnnnnnnnnnnnnnnnnntctatagcggtggtcttcctgtgatttcaacgttttatggcagctctgaatgtttcttcggtctcaatctcaatcctctgtctaagcctaatgaggtgtcgtacaccatcattccatgtatggcttatttcgagttcttagaggttgagaaagactatgaaagtggtcatgatcccgcagagaatcctgttgtagtcgatcttgtcgatgttaaaatcggtcatgattatgaacctgttgtcacaacgtttgctggtaagtgttttttcttgtttactctctcaatttcaaaactaaatgacatgttaataattttcttaatgtgtatcaaaattctttatacaggtttgtataggtaccgtttaggggacgttttaagagtgactggtttctacaacaatgcgccacagtttcatttcgtgggaagacagaaagttgttctgagcatcgacatggacaagacctacgacgaagacctcctcaagccagtgactaacgcgagtctcctgcttaagccacaagacctaatgctcatggatttcactagccgtgtggattgctcc

SEQ ID NO: 151253 - DNA, 2143 bp, Arabidopsis thaliana landsberg
agttttaaattttcaaccagaaaagtgtactctacttcaactacttcttctctacttctctaccttaaaacttccccaaccattttcttcttcaaatcatcatcatcatccctcgtacaaagaaaatggccatgagcatactcgcgaagatctttctcgtctttgccatctattgcgctatcgatcccttcagtcacagctccatttccaagttcccggatttcaaaacttacaagattgacatgcctccgttatcgtcacttccaaaggagagagaccgccagaatctgttgcagaattcagagatcaggtttcttaacgaggttcaaggtcccgagagcattgctttcgatccgcaaggtcgtggtccttataccggagtcgccgacggtcgaattctcttttggaatggcactcgttggacagatttcgcatatacttcgaacaatcggtgagtcttgtgattgcaatcgagtctttgtgaccatttcgtttccagtaaagttctcaactttgatgttttattaggtcagagctatgtgatcctaagccatcgcttttggattacttaaaggatgaagatatctgtggtcggcctttaggtcttcgattcgacaagaaaaatggggatttgtacattgcagatgcgtatttggggataatgaaagttggtccggaaggaggtttagcaacttctgttacaaacgaggctgatggtgtgcctttgagatttaccaatgatcttgacattgatgatgaaggcaatgtttactttactgatagcagctctttcttccaacgaaggtatgtaaggttttaaagttttgatctttactaactctcctgatcagtggcttgcataaagtgttgctttttggaactcatgttatattgattgaaatgatctgtcataggcacataaattgaaaattttgactgcggctataacttcagagccttaaatgttgaattctgtttatcttttgaggatctacaagaagttgcaatgagcttccgatgtctagttactacttttgtttgagtatgttgattgcgctatttgtaggaaatttatgcttttgattgtctcgggggaagacagtgggagggtgttgaaatacaatccaaaaacaaaggagactaccactctcgtgagaaatctccagtttcctaacggattatccctcggcaaagacggctcctttttcatcttttgtgaaggatctattggaaggtgagtccttcatcttaattcctctctgacttccacatcattgtctgtatatatacttggcataacttctgcaatcagcatttctgattgaagctaaaatggaacgattagcatgttgtttccatatcgtttcaatgattctgctagaaacaaactccaatactgtgaacagaatctaagtcattttttgttgttgttgttcagattacggaaatactggttgaaaggggagaaagctggaacgtcagaagtggtagctctattacatgggttcccagacaacatccgcacaaacaaagatggagatttctgggtggcggtgcactgccacagaaacatattcacacacttgatggcgcattacccgagggtgaggaagttctttctgaagctgccgatatcagtgaagtttcagtacttgctgcaggtaggtggttggcctcatgctgtagctgtgaagtacagtgaagaagggaaagtgctaaaggtgttggaagatagtaaagggaaagtggtgaaggcagtgagtgaagtggaggagaaagatgggaagctttggatgggaagtgtattgatgtccttcattgccgtatatgacttgccttagttcgtttctttttctattcaaatttgtatatttctagtttggctatgggattgcaatatgcatctcgttatcaaactatatttgacgtaatcaattcaaacacaaacaattactaaatacagtatcctttttgccatgtctttagtcaattagtctttcaatgagctaaagtttttcgggttttttttcttttttttctttttcggactttaggtttgatcatcaaagaagacaaccttataggtgtcggtcgtgtaaccatgatgtattcggttcagaatattggttcgattcgatactaa

SEQ ID NO: 151254 - DNA, 1296 bp, Arabidopsis thaliana landsberg
cccacacggaccacgttttgttcttcaagacgcaaccatttacgcgttcattgtttctcagcctaattatctcacttctgatcttcaggtcactctttcttgtcgaaatcctaatgacaagatcggaatcttctatgaccgccttgacatttacgcgtgttaccgcatccaacaggtattgtagaattagcgtttcacgtttttaaactcattttgaggatttctttaatgcaattcttacaagaaaaatgtgtttataaagaatggaccgacgaatcttagtattatatgcgaccgattctcaaacgaaaactgtttagttatgtttcataattggttttctccaaaaaaacctttatctcatctatttttgcaactttaccctttacttccaacataggtagattaatcctataaagtctaaaataatacacaatataacttttatacatatattataaacgtttttacgatcgtataaattaaaattttaaaattttgaaagtagagttgaattcttcattgtaagagcttcgatttaatatattataatgtcaatattttacaaaattagtggtatcaaaaaaaaagtaaaaaagattataatgtgtattattttaaatttcatagaattaatctgcatatgttagaggtcgaggacaaaattgcaaaactggatgaattccagattttttttacacaaaacccttcataatttgagacgtcacacatatatataattttatttcaacaaactgattatatatgataaagattcatgtttacaaaatatatatactaatggaccgacgacgaatcttgttaataggccgttctcaacgtagtcttaaacaatatgattttgcatgtgaggtttgaattagttatattttaataatctttgggatgtgaattattaattaactaaaatttgttcctcttttttttttcttgttaatcgttttttttttttgttataaggtgacgttggcgactttattgccggcgacttaccaaggccaccttgatgtgacaatatggtcgccgtttctgtatggaacaactgtaccggtggcaccatatttttctccggcgttaagccaagatctaacggcggggatggtgcttctgaatatcaagatcgatggttgggttagatggaaagtgggaacgtgggtctccggtaggtaccgcctccacgtcaattgtccagcttacattaccttagccggacatttttctggtgatggtccagccgtgaagtaccagcttgtccaacgatgtgccgttgacgtt

SEQ ID NO: 151255 - DNA, 1368 bp, Arabidopsis thaliana landsberg
  unsure (1)..(1368): unsure at all n locations
gaaacctaatcccttaaacctcgccggcgacggaaaatggctttcgcgtctccttcgctccgtcttcttcctcagtctccgttaggtcgaataacatctaaactacaccgtttcagtactgcgaaactctcactcttctcctttcaccatgattcttcatcttctttggctgtcagaactccggtatcttccttcgtcgtcggcgctatctccggaaaatcctctaccggaacgaaatcgaaatccaaaaccaaacggaaaccacctcctcctccgccagtcactactgtggctgaagagcaacacattggtgagtcagagacagtcaacattgccgaagatgtcactcaagtgagttcaaaggaaacaaaaaattactaagcttatgagtaaagaaacgtttttttcttattaaagattagattatgtgatgaagtttgataatttaggattcgaactttgtttgtatagttgattggaagcacaccaatggtctatctcaatagagtcacagatggttgtttggctgacattgctgccaagctcgaatcaatggagccctgtagaagcgtcaaagataggtcagaatgattcttcgtcttctctaaattatcagtcttgtggatttaacattcttaacagtttaccctttctgcaggatcggtctgagcatgatcaacgaggcagaaaacagcggagctataactccgaggaaggttattgtacttcttgcctttcgatattttaatgttctgtgttgccacattgtagattgctaattcgatggtgttattaaagcagactgtattagtagaaccaacaaccgaaaacactggccttgggattgcatttgtggctgcagctaaaggctacaagcttatagtgacaatgccagcttctatcaatattgaaaggaggatgcttttacgtgcactaggagcagagattgtgctaacgaatccagagnnnnnnnnnnnnnnnnnnnnngataaagccaaagagattgttctcaagacaaagaacgcatatatgtttcagcaattcgacaatacagcaaatacaaaggtaagaagttatcgagcttttactcttttaattttggatatgaggtgtgtggcctaataaggtattttttttatggtttgtttggtaagatccactttgaaactacaggaccagaaatctgggaagatacaatgggtaatgtcgatatattcgttgccggaataggaactggtggtactgtaactggtactggaggtttcttgaaaatgatgaacaaggatattaaggtatttctctttctcttgttttcagatttctggtttaaccttgtgattacctttatataaagatccttaaacaagg

SEQ ID NO: 151256 - DNA, 851 bp, Arabidopsis thaliana landsberg
caacagaacagacattgacataaagaaccattggaactcatgccttaagaaaagacttgctaaaaaaggaatcgatccaatgacccatgaggcaacaacaacaacaagcctcaccgtcgatgtcacctcctcatcaactacgtcgtctcctacaccgagccctacttcttcttctttttcctcctgttcctctactggctctgcacgtttccttaacaagctcgctgctggaatctcgtcaagaaaacacggactagagagtatcaagacagtgatattggcagaacaaccaagagaagccgttgatgaagagaagatgatgacaattaacatgaaagagaaggaattgattagttgttacatggagattgatgagacgatgagtattgatgaactaccttgtgatgactcgacgtctggcttcgtggcttttgacgactactcattaatcgacccatacagagacagtgtgtacgtatctgatttctacgatgagactgaacaccttgacctgttccttctttgaatcacatttcctttgtctaaataaatccgtttctttagtgtgacgagagagagacagtggagagagatgtctgaaaaaaacaagtgctgattagtactttgaatgacatgcatggtcaatgttgttttacagctttgagcctttgactgttactttttattttattttaggtacctgttttctcacacatgcctatgagcctacatatatttgagggtttcataccattttggtgatacaagcctatcggttactatattccttataggttttgtcataatggcgtggttaaaactttatcatatgtgtgtaagggttttatagt

SEQ ID NO: 151257 - DNA, 736 bp, Arabidopsis thaliana landsberg
ctttcttcttcccggagaaaatttggccctaaatcactttcccgggaaaatcaaactctggggaaagagttgaaacaatgtcacaaggcgatacagtaccgcttcatccatcgtctcaatcagacattgacgagatcgagaatctgattaacgaaagcgtccaatcaggtcccggaaccgttctcgccgctcgtccaccgagcccaaccagaccttcgattccagtatcttcttcttcttcttcttctccgtttatgcaatcgaatcttccaccgcttcatccgtcgtcatcagctcagaaagtgacacatgtccccgttcctccgcctcttccggcggtaagtaactccagcaatttccaaggagcgagtgcttttggatctccgcctaatacgttgacggagcctgtgtgggatactgtgaagcgagatctgtctcggatcgtgagtaatttgaagcttgtggtgtttcctaatccgtatagggaagatcctgggaaggctcttagagattgggatctttggggtccgtttttcttcattgtgttcttgggtcttactctttcatggtcagcttccgtcaagaaggttagctctcagatcagtagctagtttctctcagctttaagcttgtgtgatctaaatgtgatctggaactttagcttttaggtatctgatagagttctttagaatgtctctgttacagaaaatgagtgggactagagaaagcatttcac

SEQ ID NO: 151258 - DNA, 3944 bp, Arabidopsis thaliana landsberg
gagcttcaagaatttaattgcaacaccaagatgttgataattatatctgatgttgcaggagtgttaagggacagctggtcaggcatacaacgaggatggtcaaaaaatcgatgagtagggaaacatgatacctgatattgttgagggtgacgatcgacaccaccagggtgtcgctcgacaccaagtaggatacagagctgcagctattgcagatgaacgttatattcaacttgctgactacaacaagcctgatctattctatgctaatcattccagctattctactcaccaagcccaccgtccacccacttctacgagtaggatggaatacatgctagaacagattctcaagagccaggtgataacgaatcaaagaattgatggtctgtacaatgactttcaagacttgaatgctcggatcgatagaaaggatgttagtgtagttcagttagggagtagaattcagcaccagaccttagagaaaaccctcacgcttgcttgccacactgatttacagaaccactcgacaccaagtctcagtctcgactgacatgacctcggtgtcgaccgacactcatcaggaacaatcaatgattcaacgtttgacggagcgaaatcgagcgagctcgacaccaaagcgtcaacaacaaatgatagtgtccatgaacaatggacaaggactgcgccatattttgttgagattctagtggctatacggaccgaacagcatatccttgaagagagatgttttgcgctgtgtgatttgcttctagaaaagttaccttatgttgactacacgaacctatggtatatacttcatgaatatatctgggagttaattttgaatggtgtcagtgataaggacgcaagcttgcttaatgccgaaatcattacacttctgatgtgtgatgctccacggacgatgaaggacaagctggcaatgcctatctctgaaataatcaatgccagcgatccaggtagttatgtactcgattgctctatatctacagaaattccaattgttttgaatgagtgtgatgtggttatgactcttgacatggacaagttgaagaagccacccaccatagatggtcaggcattctctgtagagcactctatagacactagtgttgagatagataaggttcatggtacaagcgggcagctacaaaaagcaagtcatgatttagttgctgagaatcaatctggagggatggattcgatcgacaccaccacctatgtcgatcgacaccccacacaggcggagctagagttctttattagagctagtttttgtgttgagttcactgttgatactccaggcactatagtcaagtcacccactgcacctctactccttgatccacctcctaaacggctaaggtactcatctcctcctcttaaacctcttgatttcattaataagagtttcaaatttccaaaaactgttttacgattaagcaaaccacgagtttctcgtcgagtgcttgttcttttttttgatgattgtgcaggtaaaaggagtagaccaccgatacctctattctgcactgctaaagttccgcacttcctttgtagacctcacacggcaaatgcctatacgccaccatggatgatgagaggtttttctccgcggtatttcttgccaccatctgatcctcctgattctagaaacccaacatagtcaagctattgactataaacaagcgcttagtgggaggcaacccactagtatgatttttctttttatttatttcattcatttggtattaatttaggattttattcaaaaaacaaaaaaaataccaaaaaaaacatatttgctgcctaccaaccactatggtgttgatcgacactctcattttcaaggtaagtcgatttaacctaaacttcatcttcttcatttcagtttttattcaaaccgccgaaatcactcttttctctctagattgttcaccggttcttgtgattttaggctctaatctcattagaatttcatcctctttcgtccccaagtatctatttcatcgatctgcaacatgactgggcagaaaaagaaggcaaggaagagcgttcctccaccttcctcctccgccgctgctcaccaccgccggaccttctccaccgccgccggtctccgcccttcccaaccgcaactacctgctgcagcgcctcaacctcttatctattgatttccatggccaaagctactaacagaaagaattctttctcaaagagtttgggagacggatgtcaacaaagaattcactaaaggtgactatatcaatcgccctttttctccagattgggattattatgatacttttttctataatgcctagatgagtgtagaaattttgcctactcggtttgcggattttggtttaatgcagcgtttgcagatagagaaatctgttttaggactgctagatgatataggtttgggaaccatctgttgtaggcagtacgatttgtatcctgagctagttagacaattcatggtttttgttagggtctactatgtgaatgacaggaaacgcaatgctcaggaaggagctcttatctacttcattcgcggtgtcagatagagtctaccaccgagagatttgtgtgacatctatggttttgattttgatctcactagagtttccctgcctggacagtttaaggatgctcaggttatctggtgcaggtttggtaatggaatttttgattccaaggacgcagttcactcagagattcgtcacccggtttttgcgatatttggttaggctgattagaagcacactgttgtgcaagatgaagcctggcaagatgagactttctgtgctgttgttgctctatcatgctgttcatgatttctttcctgacagctttggagttgaggaggttgtccgcgatgtcaactttggcgttttgtttgctcatcacttggtctcactcaagacgaagccctttacacgtaaaaggaagaaatctaagagagttggcagtcttctcactcctatatttgagcattttcgcatcatctttgaaggagaagaggtcaacaccacgagattcacaatggatgaacgatatcttaagaactttcactagctgaaaggcaacttcctttggtgtttcagagacaaacacgacaccatatgattcagttaccttgccctacacttacagagattacaggagagcatgaggagattggttttcattatgatccttcccgtctgcattctgcgccatgctccaggagacagagaggttcagcttcaggatccgcaccgactcagactgaggatgagttcattgaccctgttgggggtccgagagttggatcttcttctttagctctaccatatgagctgccttctcctactcctatcccgatagagccacagatctttcaacagtacgtcgtcgacagtttcaagagcgtctggaacgccatagctacactttctcgttgcggttgtgttgccctcagtcgtcgtcttcgtcgctctcccgcacccacctccggcttagagcatgaggactagccatcctccttatcgtgttttattttctgactttgtttctggtttatatcagactattggttatttgttttgaaacttttagcacttattttcttatgctttgttggaactattgatgtgtgttttagtgatttaacagtctaactggaggatccatgtgaaaacactaaccaaggctctacaacaatgagcagaattcacaaagcaatgcgaaacgaccagagtgtcgatcgacaccatcatggtatcgatcgacaccactctcaggtggcaactcaaattttctaactttttaacttttgactatttctctttcgattcctctagcttaataactctggggacagtgttatctaagtctgggggagtcagttactaacttcatcttttcttttcttatgagtc

SEQ ID NO: 151259 - DNA, 1252 bp, Arabidopsis thaliana landsberg
cgagtttgcctgaaggtccgattgagcctgcaactccattatctgaggttaagcaagagccgtacaaccttccttctgtttacgagtggacgacatgtgatatgaactctgatgatatgtgttcagaggtatacaacctactcaagaacaactatgttgaggatgatgagaatatgttcaggttcaattactccaaggagtttctaaggtgggcactacgtccaccgggttattaccagagctggcatattggagttcgagccaagacttcgaagaaactcgttgctttcatcagcggcgtgccagcaagaatcagggtgcgtgatgaggttgttaaaatggcagagatcaatttcttgtgtgttcacaagaagctcaggtctaagaggctcgctcctgtcatgatcaaggaggtgactagaagggttcacttggagaacatatggcaagcagcttatactgcaggagttatccttcctacaccaatcaccacctgtcaatactggcacaggtcattgaacccgaagaagctaattgatgttgggttttcaaggcttggtgcgagaatgacaatgagcagaaccatcaaactctacaagttaccagatgcaccgatcactcctggattcaggaaaatggaaccacgcgatgtccctgctgttacacggttgcttaggaactacctcagccagtttggagtcgcgactgactttgatgagaatgatgtcgagcattggctactcccaagagaagatgtcgtggacagttacctagtagaaagccctgaaactcacgatgtcactgacttctgcagcttctacactctcccttcaaccatcctcggtaacccgaactacactacattgaaagctgcgtattcttactacaatgtggccacacagacctcgtttcttcagctgatgaatgatgcgctaattgtctcaaagcaaaagggtttcgatgtgttcaacgcgttggatgtgatgcacaatgagagtttcttgaaagaactgaagtttgggccaggagatggacaacttcattactatctctacaattaccgtttgaaaagtgccttgaagccagcggaactcgggcttgttctcttataagctcaacaacttgatttgatggtatcaacaaacttgaaatttgtctctctttttttttcttcagtctgaactacttctcccatggtttactgaaactgagtttaattattttggcaatgcaattttggattttgctttta

SEQ ID NO: 151260 - DNA, 942 bp, Arabidopsis thaliana landsberg
atgctaacaacacatatccagctgatttcattggtgtcaatctccaaatccaaaccattgtgatccactctgcttataagcacggtgtgaagaaactcctcttccttggttcatcttgcatttaccccaaattcgctcctcaaccgatccctgaatctgcgcttcttactggtccactcgaaccgacaaacgaatggtatgcgatcgccaagatcgcgggtattaagatgtgtcaagcttaccggcttcagcatcagtgggatgctatctccggtatgcccacgaatctgtatggtcagaatgataatttccaccctgagaattcccatgtgctgcctgctctcatgaggaggtttcatgaagccaaagccaacaatgcagacgaagttgtggtttggggaagtggaagcccattgagggagtttttacatgtggatgatttggctgacgcttgtgttttcttgatggatcagtacagtggatttgagcatgtgaatgtaggaagtggtgttgaagtgacgatcaaagaattggctgagttggtgaaggaagttgttgggtttaaaggaaagcttgtttgggataccacaaaaccagacggaacaccaaggaaactgatggataactcgaagcttgcgtctttgggatggacaccgaagatttcactaaaagatggtctctcccaaacttatgaatggtatttggagaatgttgtgcagaagaagcagtaaaaacacaaggtccaaaactcaaagcaattcattatctttacacgtgaatgtttatgcgtttgaattttggttctatacagatctctctatctcttttatgtaatttttgtattcatggatttcatacagttcaagttaagcaaacttactttgtaataaatgtaccattgttgttgagattattaataatcgaatagctttcttctctgaa

SEQ ID NO: 151261 - DNA, 307 bp, Arabidopsis thaliana landsberg
agtatcatcccgataagaatcaaggaatgaaggaagcgactcgcaaattcgctgagatcgacgatggtattttcgttttgcaacttgtgtgattctgctctctttgttaactcacccgtttttagttttgagaattgacgtattggtgtttgatgtaatagcttatgaagtgttatcggatgaggagaagagggagatatataacaagtatggtgaagagggacttaaacagttttctgcaaatggaggaagaggaggaggaggaggcggcatgaatatgcaggacatcttcagctcgtaagttttc

SEQ ID NO: 151262 - DNA, 1645 bp, Arabidopsis thaliana landsberg
gccatggtggagccagagcagctgagtacgtgaagcgccatcttttcagtaatctgatcacccacccaaagtttatctctgacaccaaatcagctataagtactgtaaaaaaatcatgagcaaagcttttttaaaacaatttgttgtagatgcagcaggactcttatttacattccattttcttcaatgttttccagctgatgcttataaccatacagactccgaacttctcaagtcagaaaatagtcacaatagagacgctggttctactgcgtctacagctattcttgttggtgaccgtttagttgttgcaaatgttggtgattctagagctgttatcagcagaggcggaaaaggtaaatttctatgagatccgttatgacttatctttttttgtttttggtggatatcattgtaatgttaagtaagcaatatctttgtatggcaccaccaatatcatgtagtagtatcctgatagataataccttttttcataaatctgtaccttgcagccattgctgtgtcaagggaccataaaccggaccaaagtgatgaacgtgaaaggattgagaatgctggtggatttgtgatgtgggcaggtaagtagcaagaaactataggactatattttctgctgcttcatgcttttttcaacatatagtcctaattataggggtgtgttcattcataaactaaataggaacttggagggtaggaggagttcttgcagtttctcgtgcgtttggtgatcggcttctgaagcaatatgttgttgctgatccagaaatccaggtcttttcatcacttctctaagaatcacattgcataatctttatgtccccttttgtctccagctgacaaatttctcaaacttttgtcattgaatacaggaagaaaagattgatgatactcttgagtttttgattctagcaagtgatggactgtgggatgttttctctaatgaggtctgtgaagtgaattgcttctttaacatcttctatttcctactccaacaatttaattacaataatacatgatcatattttgcaggcagcagttgcaatggtaaaggaagttgaagatcccgaggactcagcgaaaaaactggtgggtgaagcaataaagagaggaagtgcagataacatcacatgtgttgtcgttcgtttcttggagaagaagtcagcttcatcaagccacattagctcttcctcctccaaggaagccaaggaaatgcctccacttggagaccttgctatctcatcgaatgaagctaagcaagtccagatcggctcagggaacaaaccagagaatgtaacgaatcgaaaaccggacactgcaagtcgctcaactgatacactgacccttgagaggaattcagtgaccgacaaggtataaatagcgattccctctattctctaggaactaaagacagtgttctcttccctcaaacacggcaaacaaacttactgatcgttgatcgcgtttgcatttaggattgaagatgtatttaatacgattgttttaagtttatgattacgtttgtgtgtatataatacatgcatcgacttttgtatttgtttatgtgtaaatgttttaaatttcatgatagtttattcaaaaaataaaaatgaggtttgcgtttgac

SEQ ID NO: 151263 - DNA, 1783 bp, Arabidopsis thaliana landsberg
  unsure (1)..(1783): unsure at all n locations
ggccaatatctacatataacgtctagtgttttccgagcctggttctggcccagagtttttattttccacaagacgcaagataaattcaacggctcagatcatcctgttcctttctaatttaccgtagacacgagcacagatgattacgaaatcaaacgtaagaaacgaaacaaaacttttgctgcggcgacgatcggcaattcgaaatggacgacggagaaggcatggaaactgcagcggcagagcttgagagactccaaattgaaatcctccacaaaatctccattcttgagagctcttttctcccacagaattcctctgctgctccgtcgccttctctaccggttgatgaaaacgaaactgtgactcgcctctccaccattctccagtccggcggcgttaacgacttctgcttcaagagagttgctaccgattactatgactggcctctcgaatctcgtcgcgacgttctcggcgcttccatcagtcgagcatctctgcaagcgtattgttctggtactgcagttgctacataattgaattctatcggattcagtgtccgttatggagcaattgtctaagtaggcacttattaagtatggtctgtgccatttgtcattctcgatatgcacaatctgaggtctattgatgtcaacttgtcgagaaagaacgcatgggttcaagctggtgcgacattgggagagctctacgtaaagatcaatgaggcaagccaaacgctagcgttcccggctggcgtgtgccctacggtaggagcagggggacacataagcggtggagggtttggaaatctgatgagaaaattcggaatcacagtagatcatgtcattgacgcacaaatcattgatgtcaatggcaagctcttgaatcgagctgccatgggagaagatctcttttgggcgattcgcggtggtggttcaagttttggagttattctatcttggaaaatcaacctcgtggaggttccaaagatcctgacagtgtttaaggttaacaaaacattagaacaaggaggcactgatattctttacaagtggcagcttgtcgctaataaactacctgatagtcttttcataacagcatggcctaggaccgtaaatggaccaaaacccggcgagagaaccatcgcggttgtattctatgctcagttcttgggtccaacagataagctgatggagataatggaccagagcttccctgaattagggttaggacgtgaagattgccacgaaatgagctggcttaacacaacgttgttttgggccaattacccggcgggtacacccaagagcatccttctagataggcctccgacgaattcattgtcatttaagagtaaatcggattttgtcaaaaaaccaatacccaaaaaaggtttagagaagctttggaagacaatgtttaaattcaacagtagcgtctcgttgcaattcaacccttacggtggagtgatggaccggattccggcaacggccaccgcttttcctcatcggaaaggaaacttgttcaaggttcaatactctacgatgtggtttgacgcaaacgccacagagagtagcctggctatgatgaatgagctttttgaggtggcggaaccgtnnnnnnnnnnnnnnnnnnnnnnnnnnnnnnnnnnnnnnnnagacatcgatattggaagcaatccaagtggtgagacaaacgtggatgaagctaagatctacggatccaagtatttcttggggaatttgaagagattgatggatgttaagctaagtatgatcttgat

SEQ ID NO: 151264 - DNA, 1453 bp, Arabidopsis thaliana landsberg
atgaggacaagcggtgacgtttatggagcagatactggttcctcaagaagtgatgaagacagaggctttaaggaggatctcaatgaatccgctactagcccgatgagaaatcgcctagacgattcgaattcacgacctggttctcagagattcgtcaagagctcgagaaaggaggaagagactgattcagattcttcttcttctaagaacacaaccaccagaaacaacccaattcagtacactgataaacaacaagccgagcttttgagaaagcttgattctattaaagatcatcttctccgtggtggaggtaataatgctactgttgttgatcagccaccaatgggtttccatgcccatcatggacctcctccttcttattacaatccataccctgagccatttccttatggaatgtatcctaccgcgagtaaccaacctcatgttccagcttatagagacccttatggattcccagtgcataggatacctcaaaacttttatcaaggaccaagtcattaccctaatcagatgccgcctcgtccaccctatcctcaaggacagtatgtagacattggctctgatatacttgagtcacagttacaggaccctagattctttccgggtacgccaagtaggtatggtgatgtcccatttagcccggctttgcaccacggtgagaaagttggaccttttagtccacatggtggtgttcacacgaggtggcctagtgaaattgattctgaaatgggtggtgcttttgctcgtgggtatgttcaacaagctgtgtctgatactgattcacgtcgttgccatcctctagcaggcggtgcgccttttattgcttgtcacagttgctttgagctgctatatgtgcctaagaagaagcttcttggtcaggaaaggcaacaaaagatgcaatgtggtgcttgttctgaggttatcacgttcagagttgttgataagaagcttgttttctcatcttctgccctgggggaaactacgaaccgggtttctgtagaggttgaagatagaagctcaccaatccctgtggtagatgattatccactcaatgatgaagaaccaagaatacaccaggaaacgaaaattgtccatgctgtatcgcctagtgatcactcaaacgatgaagacaggtcaagcatttctagtgagccgcggaaacaggtcgtcaagtctgttcgcagcagagcccaaggcgcgaaggttcctcctcctcctcctccggaaaagtccaatcttcttgagctctttgagtattctaatgtaaaccgagctgcaatcacttacggaatggcgcagttagggtactataagcaagaatcatacacgaaacaagactccctgaatcagaatcagtagctactgagacagatgtttcttataatgagtactatactaacaccgaggagtctgaagattcaaggatctcaaa

SEQ ID NO: 151265 - DNA, 1127 bp, Arabidopsis thaliana landsberg
caaactccgaagtgaaagctcggttttcgccaccaatatcgattctgcatctacaccagtgtgatcaattctcggtaaattccacaacaaacactctctcacttgtattgttctctttcttgtggtataagtaatcatggttagggttttatcgcagattgggattttctgtttgccaccttctggtgttattcctcttcataaccatccagggatgacagtttttagtaagcttctctttggtacaatgcacatcaagtcatatgattgggtggttgatgctccaagtaagtttactttcgtcccaagaaaacttttgtgagctctgaaacttgtttgtcgttgttaccttgcagtgatttctggttggcttattagggttcattagatattcgactgtgcattgtgatagaagtaacaaaaggaaatcactttattaactttttatcttgaagatcaaatatcccaatttagctaaacattataggctcttgattggtaatacccgaaagtggtgaatgaagtgacatagtgtgatgaacttttttacgtgttgaattttcatgatttagaacattcatttatatactatttacgcagtgttaccaaacaaagcagtaatactactctctgttttagacttcatgatagtaaaatgaggaaattgatttttttctgtcttatctcaaatgcagtgagagattcaaaaaccaggctagcgaaattgaaggtggattcaacattcaccgcgccatgtaacgcctcgattttgtacccggaagatggcgggaacatgcatcggttcacagctataacagcatgtgcggtgctagacgtgctaggacctccttactgcaatccagaaggcagacattgcacttatttcctagaattccctttagacaaactctcatcaggtcagctttctatacttactaaccatgatagtctttacatacttaagagatatagattaaaagttcatgttgttgttttcagaggacgacgttttgagcagtgaagaggagaaggaaggttatgcatggctgcaagaaagggatgataatccagaagatcatactaacgtagttggagcgttatacagaggcccaaaggttgaagattga

SEQ ID NO: 151266 - DNA, 2778 bp, Arabidopsis thaliana landsberg
atgttttatgaaaaaatcaatgttattcatcgaccaaaacgacgtaggatagagaaagaaaaatgggaacaacatccgagtagcctccgagaccacaaacatcctccaataagccaaaagaagacgagagaaggagaagagtcgaaatcgccattgaaatggctctcaaagcttcacctgttaccggattattccctcctctccgtcctactgcttcttcttccccttcgacttcttctaatcgcccttgttccctcaggattctccctctcagaacatctttcttcggtaactcaagtgcgtctccttcttctctacttcgctttagggtttggctttatcttcatttcactagcttgcgccttgtttggattgcttggaggaaaatagtgcagctatttgctcaaattgggtaacgtgattagtcagagagagaattgaagtaaaattgggtattgattgtgctttttagtgtatgatttgtcgattttgtgtttcttgatttagtataaatgaggttactcttagtcagtgtctataacttcagtatgctttgactgtttcacatgtctaacatttagttctcttgctttttagttatgttgttggtttgatgtttccatgaacttattgttagactcaataaagattattgtttatttttacaaggtggagcgctgagagtgaatgtgttgagattagcttgtgataatagactcaggtgcaatggtcatggtgctactatgaatctttttgaacgattttctagagtggtcaaggtacttataccctttctcattctgtatttgactgtcattatgcattggagttcattaatcagttctcttgtttatttttcattttaataagcgaagtcatatgcaaatgcgctcataagctcttttgaagacccggagaaaatcctggagcaaactgtcattgaaatgaatagtgatttgacaaagatgcgtcaagccactgcacaggtgcacttcttactcttgaacaaactttatacattttcctgtacgatatttttcttcttcatttttttactacagcatggttggcccctatttatgagattagctaacttgtgtattatcaacgtgtctgaaggttttagcatcacaaaagcagttacagaacaaatataaagctgcacagcagtcttctgatgattggtatgtgtgcttttgcctggaccttgcttccatacctaaattcttctctgagctgattattcttacatgttacacgtttaaataggtacaaaagagcacaacttgctcttgcaaaaggagatgaggatcttgcacgtgaggcccttaaacgacgaaagtcttttgctgtaggttatatctatccattcttttgtccaccagttttctgtttcttaagtttgcttactccaacaaatgaaagaccctaatcgtttagcgcatcgagcgatttgaggctgatctcttggttttctgcaaggtttagttaggtggtggtgaaagtaaaatggaaaaatttagatatctaagtattctgtaattctcctcaggacttgcccccttttccaatcattttttgatgcaatagagcttggcagtgtttatagtactcttttgaaatatattgtttgttgagtttgttaaggtgattgcagtgacaaaagatattttggatatatataacactacagatgcagccaaaaacgacccttctgtgtttctacatattaggatgttgactattgtctttcagtatcagaaaaaaaaatcaaaatcaaattttggttctatgtagagtttcggaaacagccaaacacgattcttcagtgttttttacatatcagtatcttggctatcatctttgatgtgcttttgtttgagcaacagaccgtatggctctttttcagttttgttgatttatgtatttgtgtaacctttgcaaatggctaacgaattataggcaggtaaattttcactatcttttacctgctgataccttatcgactactgaagtctcttgaatacatccattctctaactttataaagttaccttaaaaaaaaactagaactttaggttttgaagttattaccttttttcttaacaggacaacgctactgctttgaaaactcaactagatcagcaaaaaggtgttgtcgacaatcttgtttcaaatacaagggttagttttcaccatatttatctatatattttgtattttgatttactatacactgttggaatctttagagctatgattaaatgaatttatcgtcatgcatttactcaataaaacaaagaatcatgtatacataattttcgtcatgccaccatacaatttgaatggtttagagatagtaccatagttaaatacctccgtcataagattcatatgccaagtatctctcttcacgttttgtactaaggagctattgtatctctatggacataatgtagaagatattttagattagtatctgtattttcagagttcttccatttccatagcatatgattcttatattttctgaaattgcttagggcgaagtttggttcttagaaaatgagttctgtaatttttttgttgtttccccttttatttgcagctcttggagagtaagatacaagaggcaaaagcaaagaaagatacgctccttgcacgtgctcgcactgctaagtttgcatcatttccctaatactcttctttatatcatttatggaagctcgtcctacagaagtgttcttgtcgatttatatattgtcccaactatatttg

SEQ ID NO: 151267 - DNA, 1410 bp, Arabidopsis thaliana landsberg
cttcgcttcaaccttcataatcagtggctccttcgcttattagtctttgtcaatcttaaatcgttgagtatccaaaaatcttaaactcaatggatccgtgctctttcgtacggatcatagtcggtaacttggccgttaggtttccgtcgtcgtcttcttcttcttcttcctcatcaggaccgtctgtttccggaatcaatccaacggctcctaactgttactgtaaaatcagattcaagaactttcctcgtgagattgtttctgttccggttatgttccgaactgaatctgaatccgagactcgttgctcctcctccggtaacgtatccaccgttgctgcttgtttcagtttaagtaaagctcagatcgaagcgtcgttgaagaaacctaaaattagtgttctctccgttgaggcttattcccgcggaaatagcgacggagacgactggtgttagctggcgcgtcagtgtggactcgctacggcgggtgagaagttgcttggtcgatttgaggtttcgcttgatttgaaatcggcggagacgaagagttttttggcgcataacggttgggttgctttgccgtctaagaaaacgaagagtaaaactggatccgatccggagctccacgttagcgtacgggtcgaacctgacccgagattcgtgtttcagttcgacggtgagcctgagtgtagtcctcaggtttttcaagttcaaggaaacacaaagcaagccgtgttcacttgcaaattcggctctagaaactccggtgatcggaatgttagtctcaggtcagtaaattatcagataagttgcttattagaaacagagcttttgcttttttttttactttagggttctgattagtaccaattagatttttatccttgcagcattgctatttatgtttagttttcttggaatttggatctatgcacgatttaggtattccttatgatgatatctaaaaatggtttggtgtttaaattctgcagcttatcatcggtgacaagtggaaaggaacagttttcaaaagagagaaaaggttggtcgataacgatccatgatctctctggttcaccagtagctatggcttcaatggtcacacctttcgtaccatctcctggttccaaccgcgtctctcggtctagtcctggagcttggctaatcctcagacctgatggctacacctggaagccatgggttcgccttcaggcatggcgtgaaccaggcgtctccgatgttctaggttaccgtttcgagctttataaagacggtatcgctgttgcagtctctgcttcctcgtcgatcagcacaaaacttggcgggagtttcatcatccatggctccacttctacgactacgactgcttatagaagaagctctgaaggaagtttcgatctttcttcgtggt

SEQ ID NO: 151268 - DNA, 1185 bp, Arabidopsis thaliana landsberg
caggaaggtgagaccgaagatgacactgatgatattcttcaagatatcactccttggtttactcgagtaatattttatttttcttcatcttcattctgtttaaatttttcaaagttgaatctgataaattttcatttcatgtctcttgtcataacaggccagtgatcgaccagaacttatactatctcgggatgaaatatacgacagctacatttgcaaccgccatgtacaacgtcctacccgcaatcactttcgtccttgcctatatatttggcctcgaaagagtaaagctacggtgcattaggagcacgggtaaggtggttggaacattggctactgttggaggagccatgatcatgacacttgtcaaaggcccagttctcgatctgttttggaccaaaggagtctctgcacataacacagctgggaccgacattcatagcgccatcaaaggcgcagtattggtcacgattggttgttttagctatgcatgtttcatgattctccaagtaaggcaaacaaaaaatatataaaaaaacacttatggatcaattttgacaatgaatcaatgtttttcaggcgataacattaaggacttaccctgctgagctctctctcacagcatggatatgtcttatggggacaatagaaggaaccgccgtggcattagtgatggagaaaggaaatcccagcgcatgggccattggttgggacactaaacttcttacagccacctatagtgtaagcatacatatctcagtagactagtgatttcatggactacaccatatatgttgataacttaaaattgttggaatataaaatggatgcaggggatagtgtgctcagcattggcttactacgttggaggagtggtgatgaaaaccagaggtcctgtgtttgtgacagctttcagtcctctttgtatgatcatagaagcgattatgtcgaccatcatctttgctgagcaaatgtaccttggaaggtaagcaagacacaaacaacatctaaaacgagttttatacaccaagattgaaaggaggtaataaaaaaactttttctatggcagggttcttggtgccgtagtaatatgcccaggatcccaccttgtgatatggggcaaagaaaaagaaaacaaaaataattccacgctgcaattagatgacgaatcagcacaaccgaaga

SEQ ID NO: 151269 - DNA, 3201 bp, Arabidopsis thaliana landsberg; identical to SEQ ID NO: 4727

SEQ ID NO: 151270 - DNA, 1581 bp, Arabidopsis thaliana landsberg
  unsure (1)..(1581): unsure at all n locations
gcaaaatggttattatgacctttctccctccttcgggaaattgccaccagccaatcaaacaatctaccttgttcttcattcatcattcacttctcagaattttcaattgagaattgagaattgcgagagagatctcattctccctctcgcaattctccgtcccctcgaatctaacaaaaagattttaatgtaaaatcactctattgatgcacaatgtcgatgatgttcccatcgtttcagttgctagaacttaacataatatcagctcaagacttggctcccgtcgcacgcaagacaaagacttatgcggttgcttgggttcattccgaacgtaaacttaccacccgtgtcgactataatggcggaacaaacccaacttggaacgacaaattcgtattcagactcaacgccgaatttctctacgctgatacttcagcagtggttatcgaaatttacgccttgcattggttccgagatgttcatgtaggaacagttcgtgtcctcattagcaacctcattcctcctaatcgccgtccaggatacagaaccagcaacaatgaatatcgtcgtaccccacctccaggaatgagatttgttgcgcttcaagttcgtcgtacttcaggtcgacctcaggggattttgaacattggtgttggattaattgatggttctatgcggagtatgccgctttannnnnnnnnnnnnnnnnnnnctgtgggatatagagatttgctcggagaagaagatcatcatctacaacatttgcatctcaatagcttcaaaggaagctcaaagaatccacaatcaccatcttctaaacaataccaatccgtagtctcgagaccgccaatgctccgtcgtacaaggagcgatacaagttcaatggtcgtttccgatcttctaagcagagttgagcgaagccgtgtagctaataggaagccagcgagcgcgttgatgagcgcagaatcggaaactgtacctacaacgacgggacacgattcagtgacttcagattccgaacagacaaaatcgatagagtatgcacttccttatcaatccccaaagattccaagtcagggatccgattcatgcgagcctgatttcatagatcaatcacccaatcacaatgtgttgcggccaagaagtgaaagacaacacgatcctgatttcatagatcaatcaccttttcgatcaaacgatcgttcacgcaaaactccgagaagatcaacgccaatgatcgagaaaccaagaccgccgagagactatggccgtacaagcagccgcgcttcaccatatttgtcaagacacggaacgccgttgagatcaaacatcgtcgcgtctactccgatcagatctaacatggtttcatcaagtccaatgagatccaccggcgtcggatcaactccgagaagatctaacatcctcggatcgactccgttacgatccaacatcgtcggatcaactccgattagatctaactacatggctacaccgatgaaatcgcctatgcaataagatcctccaaaggatctaatttagcaggaagaccggttttaacagaatccgaattaggtccgtcgc

SEQ ID NO: 151271 - DNA, 985 bp, Arabidopsis thaliana landsberg
atcgatcctcattgaatgactaagatatccaatcttccaagggatttgtcggaagaggtgctctgtagaattccgttgacatctctgaggcctgtccgatctacttgcaaaaagtggagcactttatccaaatgtgggagctttgcaaagaagcaccttgctcaagcaaaagtactagcagacgcaaaggagtttatggtggtcttgatgatgaattttagggtttatttgatgagagtcaatcttcaaaacaacgttgttgaatcatcatcatcatcatcatcatcatcatcatgtataaaacgtgaagctaaacttattagcttaggcgatgaagaagctgatatatctcaagtctttcactgtgacggtttattgttatgcatcagcatcaccgaatccaagactaggctcgttgtttggaacccgtattgggggcatacccggttattcgagcccacacatcaattcaacaaattcgatagctattcgtatgctctcggatacgacaagagccgcaaatcccacaaaatcttgaggggtattacttgtttggatcccttttttgatgagttcaaaatctacgattttaactctgacttatggagggatcttgatgtaactccggagtggcacttatggcaaatgctccatggcgtgtctctcaagggaaatgcctactggtttgctagagagaattataccgaaacaatggacacagaccattttttcttactctgttttgatttcacaagcgagacatttgggccgcctttgcctcttccgtttgagtttgctgtttctgaagatactatgagtgtatctagtgttagagaagagcagcttgttgtattatatcagccgtgggattatttatagttggacatctgggtgacgtctaagattgagcccaacgctgtgtcgtggaacagcaaggtgttcttatcagtgagtttaaaacaactcgtcggccctcagttttcag

SEQ ID NO: 151272 - DNA, 1334 bp, Arabidopsis thaliana landsberg
cgagtttccaagtaaggtcccagttaaagatggaaattcattattcaattccaacagaatctcaacttgatcgcgtgggaaagcaaattggtaaagtgtaatctgaatcgctggtcacaaagacgcaacagaagaaacaagttatgaagaaaacggccaaattcgatttcatcatatgaagatatgaagaagaaattggtatgtatgatttggtcaattttgcagtctactcttctaacaatcatatataataaagataaagagttatatgtcacatcgcttgacttggaaagtttgagtctttccacgtgtaaatattgaccaccacatatttagttcgaccaagaccgataccaaccgggtagacagtggaccaattaataaattttctagattatattgtctctacacaaacttttcaatatagacaatttatccaactgtagtcttctagatatgttttcgatcttgtctgtggcaaaaagatgaatttcattggtgattctgtagccagaaaccacatggagtctcttctctgcctcctgttaatggtgagatttttcttggagaagatcttgtggcataactccttaagcttgtgccttaagaaatctcgtttctttgctttggtttcacaggaagaaactccgaaagatatctacctcatggcaaagtttctaggggccggactcgaaaggactcatgctaaccagaccggaacaggaatttattatctcgacattgacaagatcgatgagcaatgggcaaatgatctgccaaatacagacattgccattgtttcagcttgtcattggttattcagaccaatatacatacatagaggagatgaggaaattggttgcatcttctgtaacttaccagtggtttaagctggttttctcagctgcttttaagcacatcaatggatgtcataactgcaaagacaacttagtgacaattctcaggacgttttcgcctacctattttgagaatggaacttgcaacactggaggagcttgcaagaggacgatccctttaaaggtaaatgaaatcaaccagaagagtagcgatatggaaatcagaacaactcagatagaacagcttgaagagattaaacgtgacagcttaaaaaaaaaaagtttgaggttttggatgtgactagggttatgctaatgagaccagacgggcacccgaattcattactggggaaataaatggatgaagggtttcaatgactgtactcactggtgcttgcctggaccaatcaatgcctggagcaagtttctcatggccatactcagacaactcaggtaaatcttgaggataagaaattt

SEQ ID NO: 151273 - DNA, 437 bp, Arabidopsis thaliana landsberg
ggagaataaaactgaggaagaggtatcaatcatcaaagtttcttcccttacttgcttcgatctttacaactctgatcttcatcaatcagctgttttgctcaagcaggtctatttccatttatttttcttaaaactgattacagtatgaacattataacttccgtgaaaaacattattagctcggtcattatgtgttatatattcttgttccaggcatgtctcgatagtggatttttctatgtcataaaccatggtataagtgaggaactcaaggatgaggctttcgagcacagcaagaagttcttcgctcttcctttggaagagaagatgaaagtcttgagaaacgaaaagtttcgaggctatgcaccattccatgattctctcttagaccctgaaaaccaagtccgaggggtgtcatatcggggggggggtgctta

SEQ ID NO: 151274 - DNA, 512 bp, Arabidopsis thaliana landsberg
tcgatggttagtaagatgcctgagtcgtgttacgagctttcattgaaggatcttgttgaagttaaggtgaatcaagagaatgaacggaaggtgttcgatgaattgcctaagagagcaaataggcagagtaaagttgtgaggaagacgaagagtgataaacgggttgatccgaataggagtggaggaggaaataatagtgggtttcttctcaaaattatgtttctggttagtttaggagctatgaaggatacgactaagaagaagaagaagaagaaaaaggatgaggcttgtaaggtttcaccgagaccttcgatctctgaggagactgtgaaagtagaggataaagaatggtggaatagaatgtctgaatcgagcacaaagaggagtggtagtagcagtagcaacaacagtattaggagccgaagcagcttaaggtatgttttcaaactgaagaatcaaagttttcatctttcatatcttacttacgcaatactacttggatttgctttgct

SEQ ID NO: 151275 - DNA, 1902 bp, Arabidopsis thaliana landsberg
aatccgttaaagctctttctcgggaaaatcaaaaccgagaaaaaaccttcaagaaacgttgacggagaatgtgaagtatcatgtcttataatacggggaagaaggagagtagtccagtttcgccattgaagaagcgacgagcaagctggtcggaactttgggttaaccatcaccacttattgtcttcttcgccccttgatttagccgcaaagtttcagtctttgactcctcctatctccaaatccaaaaccctacttcctgatttcacgcttctcttacctgacctcattctcatcagagtcattcagaaaatccctaattctcaacggaaaaatctctccttggtatgcaagagatggtttagactccatggtcgtcttgtacggtcttttaaggtttcggattgggaatttctatcgtctggtcggctgatttcgaggtttcccaatctggagactgttgatttggtcagtgggtgtttaatttcgcagccaaatttaggtattttagttaaccacaggatagtttcgtttactgttggtgtagggtcttatcagagttggagtttctttgaggagaatttgttgtctgttgaattagttgagagagggctaaaagcacttgctggtggttgctctaatctccggaaactcgtagtgacgaatactagtgaattagggttgttgaatgtagctgaagagtgttccaggttgcaagaactcgaattgcacaagtgttctgatagtgttttgcttggcattggtgcgtttgagaatctgcagatcttgagattggttgggaatgtcgatggtttgtataactctttggtttcggatatcggattgatgattttggctcaagggtgtaagagactggtgaagcttgagcttgttggatgtgagggaggatttgacgggattaaagagataggtgagtgttgtcaaatgcttgaggaactcactgtttgtgataataagatggagtcgggttggcttggaggtcttcgatattgtgagaatctcaagactctgaaactcgtttcttgtaaaaagatcgataatgatccagatgagtccttgagttgttgttgtcctgctctcgagcgattgcagttggagaagtgtcagttaagagataagaataccgtaaaggctttgtttaaaatgtgtgaagcagcgagagagattgttttccaagattgttggggattggataatgatatattcagcttggcaatggctttcgggtactaaaaactttatctctcccttttgtgcgggtgaggcttgataatagttaactgaactgcattctggttttgtagcactatatgaatctctaggaacaatgtgatctttaaaaagttgtagccaatttcattgctactagtataagatcttgtcgataatttttaaaaagttcaaatcttttgccaatttcattgtttgttgggtttgcaggagagtgaagctgttgtatctagaaggatgctcattgctaacaacatcaggtctagaatccgtgattctacattggcacgagctcgaacatctgaaagtagtttcatgcaagaacataaaagattcagaagtctctccttcgctgtcagctctgttctcagcattagtagaattgcagtggagaccagacaccagatcccatctctcttcaagccttacagggaccggaattggggaaaaaggtgggaaatttttcaagaaaacatgaatacttaacacttcgcaactctttcttcaatgttgttttttgaaagtttcttaggttctctttctttgtttcttctcgctcaacaaagtagccccccctgtaaattctacaaaatatccattctctgaaacatagattcatagattgatgagcccctggaccccccccaaaaag

SEQ ID NO: 151276 - DNA, 1499 bp, Arabidopsis thaliana landsberg
atctttgctatatgtagagtcgatgctttgacttgttcttttactcttaaagcttgtgctcgtgcgctttgttcttccgctatggttcagcttcatggtcagattaaccgtcggggattatccgctgattcgcttctttgtactacgttgcttgatgcttactctaaaaacggagatttaattagtgcgtataagttgttcgatgaaatgcctgtgaaagatgttgcgtcgtggaacgcgttgatcgcggggttagtgtcggggaatcgagcgagtgaggcattggagttgtataagagaatggaaacggaaggaattagaagaagtgaagtaactgttgttgctgctttaggagcttgttctcatttgggtgatgttaaggaaggtgaaaatatcctccatggctacattaaagatgcaaagttaaatcataacgtgattgttagtaacgcggctattgatatgtattcgaaatgcgggtttgttgataaagcttatcaagtgtttgaacaattcactgggaagaagagtgttgttacatggaacactatgattacagggtttgcagtgcatggagaagcacatagagcgttggagatttttgagaagttggaggataatggtattaagcctgatgatgtctcgtacttagctgctttaactgcgtgtagacatgcggggttagtggagtatggtttgtctgtattcaacaacatggcttgtaagggcgttgagcctaacatgaagcattatggttgtgtggttgatctgttaagccgtgctggaaggttgaaagaagctcatcatattatatgttcgatgtcgatggttccggatcctgttttgtggcagagccttcttggagcttcagagattcacaataatgttgaaatggctgagatagcttccttgaaaataaaggaaatgggtgttaacaatgacggtgattttgtgttgctatcgaacgtttatgcagcgcggggacggtggaaggatgtaggacgagtgagagatgatatggaaagcaaacaagtgaagaaaattccaggtcttagctacatagaagccaaaggaacgattcatgaattctacaacagtgacaagagccatgaacagtggagagagatttatgagaagatcgatgagatcaggtacagaacaagttctaacagctgagattggtgaattttaatgcttttgatttacttctttcttgttattttggttgatgaggataggttcaagataagagaggatggttacgtggcgcagacgggacttgtgttgcacgacataggagaggaagagaaagagaatgctttgtgttatcacagtgagaaattggcggtgccttacgggctgatgatgatggatggcgcggacgaggagagtccggtgagagttataaacaacctgagaatttgtggggactgtcacgttgttttcaaacatatttctaagatttataagagagagatcattgttagggatcgagttcg

SEQ ID NO: 151277 - DNA, 773 bp, Arabidopsis thaliana landsberg
atgatgtatcgagaaatatataaaactcggaggtaaataatattagatggaccgacaaagggttcaaagggtgccattaatggaggcgacaacacttggattcccactgattctttcagcttccatgtctcatctctctactctctctccatactttacagttgaagttgcacccaacatgagttttgagcaaacctacgcacctttacaccttaaatataatgcccctcaagcccaaactcttcaaacacacttctctcatctctctaatctctctttctctctctatctctaagaatatataaaggtatggactaccagccaaacacatccctacgtctaagcctaccaagttacaagaaccaccaactaaacctagaacttgttctcgagccttcttccatgtcttcttcttcatcttcttccacgaactcatcatcatgtttggagcagcctagggtattctcatgtaactattgtcaaagaaagttttacagctctcaagctcttggtggtcatcaaaacgctcacaagaaagagcgtcaacttcttaaacgtgcacagatgttagccactcgtggtttgccacgtcatcataatttccaccctcataccaatccgcttctcatccccttaggccgctgcctcacctcctctctcagccgcatcctccgccgcatatgatgctctctccttcttcttcgagttctaagtggctttacggtgaacacatgtcgtcacaaaacgccgtagggtactttcatggtggaagg

SEQ ID NO: 151278 - DNA, 1629 bp, Arabidopsis thaliana landsberg
ggtttatactactatgatactacactgttagcagttagcttcatctttagctacaccgttaaacttccatcaaccaaaaatagttaacttaatcgttgaagatgccacgtgtttcggcggaaattttagatatttctcacaccggcggcaacgagtcaccgacgcttggcgaactcctgaaagatttcaacgacagtggccggaaaaaatatcccggcgaaaatgctccgactcaacacatattggatctcgctcccgcggctgaaacacgatctgtgccgtttctcttatccttcaacaatctcagttacaatgttgtacttcgccggcggtttgatttctcccggcgaaagaccgcttcggtgaagactttactcgatgatattacaggcgaggctcgtgacggagaaatcctcgccgttcttggtggaagcggagccggaaaatccacgttgatagacgcattagccggaagagtggcggaggatagcttgaaaggcacggtaactctaaacggagaaaaagttttgcaatctcgattgttgaaagtgatatcggcgtatgtgatgcaagacgatcttctttttccgatgctcaccgttaaagaaaccctaatgttcgcttccgagtttcgtctcccgagaagtttgcctaaatcgaagaagatggagcgtgttgaaaccctaattgaccaactagggcttagaaacgcggcggatacggtaatcggagatgaaggacatcgtggagtatctggcggagagcgacggcgcgtgtcaatcggaattgatattatacacgatcctatcctcctcttcctcgacgaaccaacgtcagggttagactccaccaatgcgtttatggtggtgcaggttttgaaacgaattgctcagagtggcagtgtcgtaattatgtcgatccatcaacctagtgcacgtatcattggtttgcttgatcggcttatcatcttatctcacgggaagagtgtgttcaatggatctccggttagtcttccttcgttcttctccagctttggccgtcccattccagagaaagaaaacatcacagagttcgcacttgatgtcattcgagagcttgaaggatcctctgaaggaaccagagatttagtagaattcaacgaaaagtggcaacagaaccaaactgctagagccacaacacaaagtcgcgtatctctaaaagaagccatcgctgcaagtgtttctagagggaaactagtctctggctcatctggagccaatcctatatcaatggaaacagtatcttcatacgcaaacccgccattggcggaaacgtttatcttagctaaacggtacataaaaaactggatccgcacgcctgagctcataggaatgcggattggtactgtcatggtgactggtcttctcttagctactgtatattggaggcttgacaacactccaagaggtgcacaagagagaatgggcttctttgcgttcggtatgtccacaatgttctattgttgtgcagacaacatccctgtttttatccaagaacgatacattttcttgagagagacaacgcacaacgcatacagaacatcttcatatgttatatctcacgctcttgtgtctctgcctcagctacttg

SEQ ID NO: 151279 - DNA, 3378 bp, Arabidopsis thaliana landsberg
aaagagtacatggattcgaagatatcggagatcaaaaccggtgttgctgatactgccagtgctgtttcagagatatacaaagccaacttcaagaagaaccttggtatctagtggttggaatcaactgagccaagagattgttaaaagcgtgagtaattcctattgcttttgttcacatagtcgtattagcatctatgtgtggtatgtatgagttttcaggatggataattgaaattgctcagctatgctagtagtatataaatatctgtgtttcttttttcattgaaacttagatgataggcacataatctaatattcacaatgtttaactcaaagaacgctgttatgatcaagttacataggatttccaatgaatacactcttaccttctttttaccataagctgacttaggtgactttgattcttattcggtttatcccctcgggtctcttgaagtcaggctatgtttgcagctcctcggttgtaacctctttgggttaccactttcttcagtctcactgagttcctcctttacttgtttaaagcttgcttactcatgcatcatatgtggtgagaatatcttactgatgatatgaataagagagagtagctatcaaatcaagaaaatgagaggaaggagttaaaaaagacaaaggaaacctaagctgcttatctataaagccaacacattattcttacccttttgcccacaaagtaaatgacacacatcaactaaagtagaaatttaaaatgcctttgaatgccttaatttgcatttttattaaattattaacagaaaaaagatatgttggttagtactaatccaatacaatacagaaacgtgtcaagtatcctaatcaataatggcggctccacgtaagacaaaaacaaattaaggaaagagcgagagagagagagagagagagaaaaaagaagaagaagaatttgaggcgattgggtaagcgatgcacatcgtcttctctgtcgatgatttgaccgaatccttctggcctgttcccgctccggcgccgtcgccgggatcgtcatcgactccgtcaccgacgcagaacgtggcggatgggatgactcgaagtcaatcggagtgggcgttccacaggcttatcaatgagttgtctggttccgattcgagccctacgactaacacaatcgagagatcacctccaccggttcagtctctttcgagattagaagaaaccgttgacgaaaccgaagatgttgttgagattcagaaaccgcagaatcatcgacggctccctgttgatgatcaaaggaagaatcggaatcgtgctccgtcgtctgatccggttgattcttcagctcctgttgttgttgatcctaatcagtgtcatgcgattcttaagagcaagctcgagcttgcttgcgctgctgttgctcgtcgtgtacgtctcttagatccatttcttatgtgtattcagattaaaggaattgatgatttcaacaataaggaatgtttggttgtgtgttgatttgatatgattttcttcaggtgggaactgtgaaaccggaagattcgagtgcttcagctagcaatcaaaaacaagctcaaggtcacgtatcgttgctttgttttggttttggttttttgactctctctagctttgtctctcgtcaatgtcaatgtttagattacatagagagcaaacatttcatcgagatttgtttgtcaatttgattagacaattaattaactgctaatctctctcagtaaactcaagactttaagggaatttgaagataagtaggctttgttttggagatgacagctttctctgtgttcactcatatttgattctgttctagtcgagtcaattttttctctgagaagaaagaaacaaggcatacgtagtattatgcgtttagatgagaattcttagccttttgactctccattcttattagtgtaagttagtgcattatactagatagctttcttatttcccgcttcttgtgatatgtacctggatgaaatgtttttcagttagtggataatgggattattttgaaattatctaggctccattgtggcacaaacttcacctggtgcttcatctgttagattttctcccacaacaagcacgcaaaagaaacctgatgttccagccagacaaactactagtatttcatcacgagatgattctgatgacgatgatcttgatggagacgcagataatggagatcctactgatgtgaagcgtgctaggaggtacaaatcttgatttttgtaccttagaatgtttctggtaatcgttctgaatctcgaggctgatagatatagacatgcttttgggaaaaggcttgtacctaatagtttctactttctactctctctaaagagaaagaaagaactgaaatctagtagaggaatgtttcagtcaattttatgttgtgactgttgttcttaggaaacagtcaggctctatatatttaactttttcgaaggtcatcctgattcatttttttttttttgtaattacccaggatgctctcaaaccgagaatccgctaggcgctctaggagaagaaagcaagaacaaatgaatgaatttgatacacaggttcggtcttttattagttgctcatacatttatacatttctcgagtctttcttacttttcaacagtcttcaggggtttataggtaaagtttttaccaattgtaggtaggccaattaagagccgagcattcaactttaattaatcgtcttagtgacatgaatcataagtatgatgcagctgctgttgacaacagaattctaagagctgatatcgaaactttgagaacaaaggtactcttgtgactcacgagtgttaagaatttaaaacacccaagattatgatttaataactaagttaattgcattgataaaaaacctgtgcaggttaagatggcagaggaaactgtgaaaagagtgacaggagtgaaccctttgcattggtcaagaccaaacatgggcaaaccgtttagcaaccctgcgagtgcttcttctagagtgccgccaaactctaaccacattttgaaaccagcaaattcaagtacctacaccagtgctggtttagctcaaaatcagagagtggagacggcaaatttcttgccggaacaggtgaaccgtgaaggcatgcagaatccatttgctcctgattctaatctgtatgaaaccctaccccattggaatcacaagcattcaccagaaaaagagtcattggttttgtgattttgattgaggtaactattgtgtgtatttttattaactgtatgactcagcggcggtaaactcttaatattatatatatgattggacatgatggaagaatgtataagctatagtgcttctaaggc

SEQ ID NO: 151280 - DNA, 677 bp, Arabidopsis thaliana landsberg
ccctacaaatcaagaaaaggaaacagaggagaagagagaaaagaaaaacccagaagcaatgtctttttcttctctcaaattgccaatctttctcattctctcaagtcttctccatgcggctataggtacgtacaaacatattcatattttacattcatcaaaacgtcttggattgaaaatcttcatcagtctttagatcagcataggaagaaccctagattttcatagtttgaccaattacacgaaagatataagatcaaccataggaaaaaagaaagcgtcaattctcatacgaatctttgatttttaagattcttattgtatttttttctttctcttctataaattgtaggggaaaacattgtttgcgagaatctgccaacaaatatgtgctcgttctcaatatcggcttccgggaaaagatgtatattggagacggctaatgtcgccggagaattcacttgccgcacttccgcagtggacgtggaagggattgtaaaccacgtggagaccgacgagtgcgtttccgcttgtggggttgatcggaaaaccgtagggatctcgtcagactcattgatggaagcaggtttcgccgctaagctttgctcatcggcttgcttggactattgccctaacattcttgatctctatttcaatctagccgccggtgaaggtac

SEQ ID NO: 151281 - DNA, 1164 bp, Arabidopsis thaliana landsberg
cattcctcagtgatctatcaaagttcgaagagaccgacgcaaaagggacagaaacggagaaggagaaagaggcagagatgggagtagagatccaatcgccgcaggaacagagctcttacaccgttgagcagctcgtcgcccttaatcctttcaaccctgaaatcctgcctgatctcgaaaactacgttaacgtgcagtttcctttcccttttctctcaagccggattctgttgtagaaatcgtgttccattgattgttgttggtttcgttatgattttcaggttacatcgcaaacgtatagtctggaagtaaacctatgcttgcttcggctctatcaggtgctctagttgttcttaagctggaccttttgataccaaattcaagagttttagtgtctcttttcgttaattggtattgttgcttttatgcagtttgagcctgagcgcatgaacactcatatcgtggctcgaatcttggtcaaggctcttatggctatgccaactccagacttcagcctttgcctcttcttgattcccgaaagagtggtattcttctttcctcttaacttcacaatgttttgctttcttacatatatagcttatcgtagatacagaagaaacgattgttcaaatgtttctgactcaagttattatgccattccaagttatttctgtcagttcagtctgtgtactgagcattcatgataaagtgtgagtttcaatgtgttggattcttgaggactaataaatgtacttgtttggattgtgtgtttcagcaaatggaggagcagttcaagtcactaattgttctatcacactaccttgaggtacgcaaacatcagtattagttagttgagagttgaaaaggtgtgcattgagtatttaaagcacttgtttttcttttgcagactgggaggctccaacagttctgggatgaagctgccaagaaccgtcacattctcgaggctgttccaggtaactaacttctgaatcataaataaatcgtctactaataacaaatttctagatgtagatttgttacttaaggattattgtgtgtagatgtcttatggtacgaacaaagtcctcagtagtggtttatggtactggctattcattttatgattgtgtctagtgtagatgtcttatatgcgagagattaaat

SEQ ID NO: 151282 - DNA, 2143 bp, Arabidopsis thaliana landsberg; identical to SEQ ID NO: 7810
  unsure (1)..(2143): unsure at all n locations

SEQ ID NO: 151283 - DNA, 587 bp, Arabidopsis thaliana landsberg
atggaggagaagaagagcaaagtgatattacatgggacgtggataagcacatactcaaagagggtcgaaatcgctcttaaactcaagggtgtactctacgagtacctcgaagaagatcttcagaacaaaagtgaatcgctgattcaactcaacccggtgcacaagaagattcctgttcttgtccatgatgggaaaccagtggctgaatcacttgtgattcttgaatatatcgatgagacgtggacaaactctcctcgtttcttcccagaggatccttatgaaagggcccaggtccggttctgggtcagctacatcaaccaacagggtgtgttcccccaacctctcatctgaaatcaaccccatacattgatatgattagcagactattgactgtttcttgttgcaggtgtttgaggtcatgggtcaagtcatgtcccaggagggtgaagctcaagcaaagtctgtagaagaggcaagaaaaagattcaaagttcttgatgagggactcaagaagcatttcccgaataaaaacatcagaaggaatgatgatgttgggcttttggaaatcaccatcattgctactctcg

SEQ ID NO: 151284 - DNA, 1429 bp, Arabidopsis thaliana landsberg
caaaaatccctctttatttacttacattatatggttcctaatatttcggatgtgaatgtgaattatttttaaaattaattttcacgtaatgtcattataatatagtttactttgaaatcagatttctcgttgaaccaaccaaccagtgattatagtccgcaaggagggtctaatgggggacgaggacattccagattgaagtctcagctaagcttcacgaatcacgactctctggctcggatcaacgaggtcaatgagaccccagtccacgacggttcaggccattcgttttctgcggctagctttggtgcagccactactgattcttgggatgacggttccggttcgatagggtttaccgtgactaggcccagtaaacgatccaaggacatggactctggtctcttttcgcaggtacaatttatttgtttccatgtgggattcctttttttttttcttcatgtgttattactataaacatgctactttagtcaaattatatgaaatttcaaaatttctagaaaaggacaaaaaaatgtaaaatatttgttttaggatagacataaaaaaaaaaattaactagtaaaggtaaatgcagcaaaactctttagtggccatacatttttgttggtggccaattcttaccgaatatttttatcactggttttgcagtatagtcttccttcagacacttcaatgaactacatggataacttcatgcagcttccagaagattctgtaccctgcaaaatccgtgccaaacgcggctgcgccacccatcctagaagcatcgctgagcgggtcagttataaacactttttaatttatttagcgatggataattaattcactaaatttagcaacaaatttgatcgtccctaatcatgtagaccctattctttttgccatcctcctatcttaacctatacaatatgtttatattataggagaggagaacgagaataagtgggaagctaaagaagctacaagatcttgtccccaacatggataaggttactttatatcaaatatatatagtatatatggtaacatcattttgaaaaagtgttcattacctcacacacttgttgctgattttcttagcaaacaagctattcagacatgctggatttagctgtacaacacatcaaaggccttcagcatcaacttcaggttcccttatcttactttttctgtttaggtcagctgaatccatttccagagttctctctagttcatgatccatattgatacataaacacattttcatatacaaacgcagaatttgaaaaaagatcaagagaattgcacgtgtggatgcagtgagaaaccaagctagctcaaacccaaaggtagggtcatcctaattttatttgcattgttccgattttatcatatgagagaattagagaagatgtaaataaaatag

SEQ ID NO: 151285 - DNA, 2337 bp, Arabidopsis thaliana landsberg
aatcctaacatcttgtgttctagtttgtgaagacttgaaattgaaactctttataatcttctagctctgcaatatgtaatcttgaggttccgtgaggatccaagttgatattggtttgattaatagttcattaccgttgactatatggtttaatctgtgttagtgactaacctgttatgttgagttaaattgtaacttgacttaaattcgttaagtaacatatctaaagtacgcgaagttctctgtgatcagtgtaatcggaggtcttacatgttttgatagttaactaattttttttttatcatttcctctgtttttgcaatgtaaggaagatagttttttcttctgtttgacttcattttcgaggatcttggtcatttggatttatgcttttgttgtctcttctcacagattccggaaatttggcagaaacctgaaagcgggaattatcgccaatgtgtgacgcgccctaagaactatacgagtatgttgctatcttaaaattcctagttcttcttcaagctcgtttgcagttctgatttttcaaaatctggtatttatgtctttgtctaggactgcaacgccaaaccaatgggtatcttgtagtacacgcaaatggaggattgaatcagatgagaactggggtgagtttacttcaaaaggatattagagggtattgatctccgttttctccatagtcaagtgttttgatgtactattctttgttggttttgaccaatatgcagatatgtgacatggtcgctgttgccaagattatgaatgcaactcttgttcttcctctgcttgaccatgaatctttctggactgacccgaggtcttctctctatatcttggcactcttattgacctgataccacaagatatttactaaaaatgaagcagaatgccaataaatattgttttgagtgcagcacgttcaaagatatttttgactggagaaacttcatgaacgtactgaaacacgatgttgacattgtcgagtacttgcctcctcagtatgccgcaatgaaacctcttctcaaggcccctgtttcttggtctaaggtccgtgctttgttcatattagtgtaggtttcgttgttagcttccagagttttatctcttctcctatatatgtaagggcttgtcacaatgagaagtaaattcttaaattcacaactgatatacaggctagttactacagaagcgaaatgttgccattgttgaaacgtcacaaggtgttaaagttcacgcttacggactcacggcttgctaacaatggcttgccaccatctatccaacgactgagatgtcgtgctaattaccaggcactgctatacacaaaggagattgaggacgtagggaagtttttggttaaccggttaagaaacaacactgagccgtatatcgctctgcatttgaggtagatccgacatatcttttatcatcaacaagggaaatagtttggatcttggttccgtatcaaatggattttggatttgcagatatgagaaggacatgcttgcctttacaggatgcaaccacaatcttacaactgaggaagcagaagagctgagaatcatgaggtacagtgtcaaacattggaaggagaaagagattgatagccgagagagtcggattcaaggcggatgtccaatgtctccgcgagaagcagctatatttctaaaagccatgggatatccgtcctccacgactgtatatatagttgctggtgaaatctatggaagcgagagtatggatgccttccgtgcagagtacccaaatgtcttctctcatacaacccttggactgaagaagagttagagcctttcagtcaataccagaatcgccttgctgcgttggactacattgtggcccttgaaagtgatgtttttgtgtatacatatgatggtaatatggctaaggcggtacaagggcacagaaagtttgaagggtttaggaagtccataaatccagacaggtatggtaccatggaataaagcttttcattttggcgagattatgtagtttctttcactggttttttgctgatttgttctgtgtgattatttcaggctgaattttgttagactgatagatcattttgatgagggtatcatatcttgggaagagttttcttctgaggttaagagattaaatagagacaggattggagcagcatatgcgagactgcctgctgcacttcccaggctagaggagaacttctatgcgaacccacaacctgattgcatctgtaacaagtctcatcctgagcagctgcggaaacaatcaagtctaaggacagactcaaagagttggaagaagagtgccttaaga

SEQ ID NO: 151286 - DNA, 1409 bp, Arabidopsis thaliana landsberg
  unsure (1)..(1409): unsure at all n locations
agccacttgataaggacttgagaacttgcgttgatcaacaaagccaaaggtaccagcttccaaattaaaaccatctcagtctccttcctcttatattgcaatcttcagagtttttggattcaacatctctccatttctctcctctctctcttaccaagttcaatcacaaggaaatggagatccaggcaaagctcatggaatacagattccatttcatggtgacaatcatggtgagcgtgattgtggcgtctctcgtgtatgcagcaccaaggattctgaacattttagcctatttctggcctctgtttgcgtcaacagccgcctnnnnnnnnnnnnnnnnnnnnnnnnnnnnnnttcaacagctttcagaagaagccaccggcgagagactgatggattacgtcgccggacggcctgaggattctcacaagtacgactgacaaagatttgcacacaagcatatatccatctttaaaaagctttaacaatagaaaatgatttggtgtaacttatgtcaaataaaatgtcgaatgattgtgtaacaaaatttaaaatagataaaaaaaaacagagcataaaagcagagtattaatgaagaaaacaaaaacaaactatagttggtcaataactgtattgataagcgaattcgttgacaccaatcatggcagaaannnnnnnnnnnnnnnnnnnnnnnnnnnnnnnnaagatgagtagaatgagaatggcggagattgggttcttgaggagctcaaagatgggctcaaagacagcagagagagctccagtgctaaccgtgagagcgtaaagaccgtaccttctaacgttgtcccaaaactcttccattaaaggaccttctggtccaagcgccatagctttctctgcatccattcccaataccaaaaccatcatcaaccctacagagactccaccaaccacagcatatctccagtgccgttccaaacccagaggaggaggttgtgctctttcaagcttgctgtttctgctacttttcgtagtcaatcttcttctggctgagccacaccgaacaagacatgatgttctgttccttatgcttgagcttggaaaagctagagctgctgctattgatctgctactggtaaaatggaggtgtggttgcagacaagatagtctcattttggggagagacatcatcgtcatctcacttcttcctttccttgtaggagtcagattctttcttatatactaaaacatttggtttagattgtgtggctctgattcgcctgatctcttttcgctgatctgtggataacttaatcgtttttctattacaaactaattttgacaaggtgtaataaacaagggaatgtcaacaaataactcattagagctcacacatatatatatatgatacaacactacacaagcct

SEQ ID NO: 151287 - DNA, 3170 bp, Arabidopsis thaliana landsberg
atgactactcctggagatttctggcttcagtgtgaaggcattgttcaggacttagatgatagacgtcaagagcttcccccgggcgtcctcaagcagcttcatactcggatgctttttatccttaccagatgtactagattacttcagtttcataaggaaagctggggggaggaggaacaagttgtacaactacgtcagtcaagagtcttgcattctatagagaaaataccgccgagtggagcgggaaggagttacagtgctgcaaaggtaccatctaccaagaaagcttatagtcaggagcagcatggtttggactggaaggaagacgctgttgtacgctcagttccccctcttgctcctcctgaaaattatgctataaaggaatctgaatctcctgcaaacattgatagaatgtcttcctggaaaaaacttccatctccagcactgaaaactgtgaaagaagcgccagcatcagaagagcagaatgatagcaaagttgaacctccaaatatagttgggagtcgacaaggtagggatgatgccgctgttgctattctcaactttcctccagcaaaagattctcatgaacactcctccaagcatcggcacaatatttcttggggttactggggggaacaaccccttatttcggaggaaagttcaataatgtgccgtatctgtgaggaggaagttccgacaactcatgtggaagatcactctagggtttgtacattggctgataaatatgaccagaaaggactgagtgttgatgagcgactgatggcagttgctggtacacttgacaagatagcagagaccttcaggcataaggatagcctagcagccgcagagagcccagatggtatgaaagtatccaattcacatctgactgaagaatctgatgttctctctccaaggttgagtgattggtcgcgaaaaggatcagaagacatgcttgactgttttccggaggctgataattcaatttttatggatgatctgagaggtttaccgctaatgtcatgtagaacccgttttggtcccaagtctgatcaaggtatgacaacttcatctgccagtagcatgactcctagatccccgattccgacccctaggcctgatccaattgaacagatattaggaggcaagggtacattccacgatcaagatgatattccacaggtttgtgatggttgtgctccatgttcataagttttcttgtcttttatttaatatctgctctgatgaatagaaccctggataactgatgatgcagatgagtgaacttgctgacattgcaagatgcgcagcaaatgccattcctgttgatgatcaatctattcagcttttactttcctgtcttgaagacttgagagttgtcattgaccgcagaaagtttgatgcacttatagtagaaacttttggaacacgcatagaaaagttgatacagtgagttcctggtaccccgtgctgtctttgcttataatgaaagtgttctgggagatgtattcttgtctccagaactattctcttgtcagttgaggcaagtatagctcaggctgagaatttattgtaagaatcctttttctatatattagggaaaagtatcttcagctgtgcgagcttatggatgatgaaaaaggtaccataattgatgaagatgctcctttggaagatgatgttgttcgcagcttgaggaccagtccagtacatctgcgggaccgcatatccatagatgattttgaggtcatgaagtcaattagtaggggagcttttgggcatgttattttggctcgtaagaacactacaggagacctatttgcaattaaggtgttctaaattttagttcgttttactttttgtaactcttgtaaaagattctgtctgtgacagttaagctgacttggttggcaaaatctgtttcctaaatcttgtttgggggctgtcataatccgtaggttctgaggaaggcagatatgatccgcaagaatgctgtggaaagtatacttgccgaacgagatattttgatcaacgcccgcaatccctttgtggtgagctgttcgagctttaagcatattaagtcctctgcagagatttcttacactaacgtaactttcttttgaccaggttcgattcttctattcttttacttgtagcgaaaacctgtatcttgtgatggaatacctcaatggaggggatttttattcaatgttgagaaaaataggttgcttggatgaagctaatgcccgtgtatacattgcagaagttgtaagtgtgtaatactctcacagatcatgccataataacaagagattttatctaaatgttgtgattcagtgtcgatattattcgtgtcaggtccttgctttggaatatttacactctgagggtgttgtgcatcgtgatttgaagcctgacaatttgttgattgcacatgatggtcatgttaaggtaatatcaggccttattaaatagtatcaggccttcagaatgttttgttgatctcatgcaatttggaactttggagattatatagtcctttctgaatctcgtaattataaacccacacgggcaattagcctctgcatttatgagtctataaatatcatacatgtataaattatcagaaccatgcttccctgtagaccttatggtacctttttgtttcgtctgagcagttgacggattttgggctttcaaaagttggtctcatcaacaacactgatgatctctctggtccagtttccagtgcaacgtcgctgcttgttgaggagaaaccaaaattgccaacattggaccataagcggtctgcggtgggcactcctgactacttagcgccagaaatccttttggggacaggacatggtgcatacgcatttctttctcatcttgtttttcacttctctctattatttcaaatcttacatagaaattggtgctgggttgatagaaaaatgattggtcctgggttgagactgtttatctgaataacaagatgtgtggtatatcaagttgattacagttctacttatcttgtggtgtaagtaaaaagcttgaatatgtagcttattagcagctttaggttcatactaaattgttgctctgctgcctctctgactatagttttaaatattcaattctcgtcatcacataccaaaaccatgaaggct

SEQ ID NO: 151288 - DNA, 1991 bp, Arabidopsis thaliana landsberg
  unsure (1)..(1991): unsure at all n locations
attttagctccttgaaggctcataacgcataaagttcttggcttcatcgttttctctcttgattaatttggcattgtatatcttatgtctgattgtgtgaaaaaaccacaaatgaaaggagtttagacacaaatcacagtttaagacaaaattatagtcttgtttctttcaaattatgcaaaaaaatcaagaatctgagacataagagaaacgtttatgtctctctcttttaatcaatgctatgttgcttttctcaactgtttcaagcgttattacattactagctaaaaatcttgatgtcttgttcttatttttgcagtttctcctcttgagctttggaattgaagctaagataagaaatttagagagaaatgggatgttctcattcgaagtttgatgacgatgaagctgttcagatctgtaaagataggaaacgtttcatcaaacaagcagtggaacataggactgggtttgcttctggtcacattgcttatatccagtctctgaggaaggtttcagatgctctccgggaatatatcgaaggagatgagccacatgagttcatgttggacacatgtgtcactccagtgaagagaatgagcagctcaagcggcttcattgagatatctcctccttcaaaaatggttcagagtgaggcagagtcgaaattgaatgtcaacagttacttgatggctagtggaagcagaccggttcgggttgaagaaaagcctcctagatcacctgagacttttcaggttgagacttatggagcagatagtttctttgggatgaacatgaacatgaacagtccgggactaggcagtcacaatataccgcctccttcaccacagaactctcaatgggatttcttttggaatccattctcggcattggatcagtatggatacagttatgataaccaaaatggtatggatgatgatatgagacggctgaggcgggttcgggaagaagaagggattccagatcttgaagaagatgaatatgtaaagtttgaggatcatcataacatgaaagcaacagaagattttaatggaggtaaaatgtatcaagaagataaagtagaacatgttaatgaggagttcacggacagtggatgcaagattgagaatgagagcgacaagaactgcaatggaactcaagaacggcgcagtcttgaggtgtccagaggaggaactacagggcatgttgttggagttacatcagatgatggaaaannnnnnnnnnnnnnnnnnnnnnngtacttgaatagaaggccaacaagcatggcagaagttattaaagatcttgaagatcagtttgcgatcatatgtaccgctggtaaagaagtctcgggtctgttggaagctagtcgagttcaatacacatcctctaatgaactgagtggtaagatttgtacttttctttgtttctgactatatatatgaaacgaatgtggttctgagacttcttattgcagccatgacaatgctgaacccagtagctttgttccgctcaggcggctcatcgagatcttcttcctcatcaagattcttgatcagctcttctggaggttcaagggcgagtgaattcgaaagcagcagcgaattttcggaagaatcttgtatgctctcgggtagccatcaatcaacattggaccgactatacgcgtgggagaagaaactctatgatgaagtcaaggtaataactgagacttctaatagtattttcagttcacctctctctggttaactgacttgaatgttgtgacagtctggagaccgaatacggattgcatatgaaaagaaatgtttggtgctgaggaatcaggatgtgaaaggagctgactcttcggcagttgataaaacaagagctacaataagagatctacatactcagatcaaggtctctatacactcaatagagtctatatcccgaaggatcgagactcttcgcgaccaagaactgcttacacagctgtttgagcttgttca

SEQ ID NO: 151289 - DNA, 390 bp, Arabidopsis thaliana landsberg
ctcactgacaacggactctccagactcctgtggtttcaagcgatcaattcggttaaaagaatcagtgatgaggtttcgttcgagaaagttaggagtgagtttgcagaggctcactctttaagtgatggtcactttctgttttttcattacgaaggggattcttgtttccgtgttgtgatctttgatgtgtctgcttctgagattgaatatccattggatgataatgatgataatagagaagaagttatggatgatgatgaacaagggtttactggttttgaaagtagtgatgatgatggtgaagttgttgatatggatgaattgttgaagaagtagaagaagaaccaaggagtcaacattaagtctgagaatgtcataatacttggtaaa

SEQ ID NO: 151290 - DNA, 991 bp, Arabidopsis thaliana landsberg
ctcgactgaaaggtacttacagctcttacactcaccattaatatataaactttgatctctttgttgctgaagctgaaccttcgtctcgcttggcttgttttgttgcagcaacgaccaaccgataatgaccgatatgtgaagaattgtaagaacggaagatctccaaaggagacccgatggtggttccacgacgataaagtataaacctcgatcaaccaaaaaaaatgtaaaatagtccaaaacagtctttgaggtttgttgtctatttttaatttaattgggtttaagctgtcccaaacccatttccaaaatccgtgatgtataaaaacaacacaataaatttgactaattttgaatcttctactctaattttaaaacccctactaacaaaagacccaacctaatctctctgatgcttctctattaggtcatatatatacatcaggaagaatatttctcaactactactttcctcttggttttgtcctgtgtcaccatgaagccgctgacgaagaagacgacgacggaggaaacaaagacaaagatgggttttgaaagattctctgaccagtagcgagtatgtgtcgcggatcaaactcagcctttaagcttctgaaccgatcccacttgtccccaaaatgagccacccactcttcctgtgttgcgtggtgaggaagatactgcttcacattgatcttggcttgttcacagaactccaagatccgacggttctgatctttcagatactctagcttctgtgtctcttcaccgtccgttaaagctgatctcaatagagccaccagatagaaaacttcctcatccggcgtcacggctgagctactctcgtcccatctgacaataacatcaaattacgacacgtcagcaacgacaatatctatattaatgtaataatcaatgatgtgtggagggttcgttgagatcggtttggtctaggagaatctgattgggacccacccaccatgagttctag

SEQ ID NO: 151291 - DNA, 1369 bp, Arabidopsis thaliana landsberg
  unsure (1)..(1369): unsure at all n locations
taaagatagattttggatttcgaaataaaatctcccgccagattcgagagaccacgacgactaacttgatgttctcgattattaccagcagctcccttcaaaaaccctaactctctgagctcgatcgacaagtgataatggccaacagtaatttgccgcgaagaatcatcaaggtttgttttccaatctcgatttgattccttggacaaactctaccgatctctgtttctatcggagtctcttaacttttgttttccttgcgatctgataggaaactcaacgtctgctcagtgaaccgggtaaaaaactctttaattcgtcctgccttgttgagttatagtgttgattttgagatgataatatcaattttgatggttgaattgtggatccgagacgtgaccgtccatggagtttggaatttggttgtagagtaagatttaaatctgattataacttcgattgatttgattggtgcagctcccggtataagtgcctctccatctgaggataatatgcggtatttcaacgttatgattcttggtcctacacaatcaccttatgaaggtagtcaaatagtcttctgataatctgagtattagattttttgctttgagagtacaacatgtttatgtcaagcaatgattgctaatgctcttgtatcttgtttgtgacactagctagtgttaagtatagtcctgaatatacatacacaactgtacttagttttattattaacacattcgatttgttctgttgcgtaccagatgctaagtttaaaacttgtaccttttttctttttctcctttgaatatgctctctcttaaaattttaactttttactgagtgatagattccatcttataggaggagttttcaagttggagctctttttgcctgaagaatatcctatggcagctcccaaggtaagttgcttcaacttttgtgtgtctttcttctttcatttcatgcttcacttgttttggtaacattaggattaccccacataacattgttaagtggaggtaaatgctctttaagtgaatgtctctctactcttaacactaggattttatttatgggtttatgagattggtgactatggatttgttatgactactccgaatgtcttttcttatattatattagacaacgtatccaagtttcttcattgatgtagagtttatgggtcttattgatgatatcatttgaaacacacgttacgtttctcaccaagatttaccatcctaacatcgacaaggactgttgtgaaaaatttccttttcttctcttactgncaagataactaaccagacacatggtcttttatacttatggatcatgttctgtttgcacttatcatgtatatata

SEQ ID NO: 151292 - DNA, 2440 bp, Arabidopsis thaliana landsberg
tcaacattttcagaaggcattttgtcattgctcccatcaacacatcaaaatttatttttgccccatatccccatgaccaagtcaaaaggttcagaatctggggggttactaaagctaggcagcaggatgaatcattatgttggcccgttagtcttcttttttttgctttcataaacttgtaaaaaataaataacctcttgtcaacaaatttcattttacatactccaagcccgtgggccaaaaggatcgtacggagccattttttgttggtccaagactccaagcgaagaagactatggacttcttgtattattagccaaaattaaaatttgaagttaggtaacaaatttatggatttaggaaaatacgtttataattgtattttcttatttagacattgcaaatcccatgccgttttcttttgttgttttgtcaatttcatgccgtatgattaaagtttacaatgcattttgtataagacaaatgctttttgataaaagaatattaaggtacaaaaaaagaaaaggaaggtaaaaagattcctttttccctctctttgggccttaaatagagacagagaccgaaagaaagaggagaaacctcacacaaaattggtcctaaacgagtctccttcagtcgtaatttgcagcagagcaacgatggcagcgactccaatggaaggcaaatgggttcaggtcagctttctcgcctttgtgtttctcttagagacgaatctcgtttcatcggatattacttgtctcatgttttcggatttttattgaatcgtacgagactttcggcttttgaaattctaatttcgttttggaatctgtttataattctctgtaaatctgtccaagttctctgttagattgctgatgtgattatacacttaggttcaataatcattttggttctacaacagaatctcctagtttatgctttctctgatcaattttggatttgtggatgatgagtttgtcatttattgaatggactatggattattcaccggcagagttgttcatatcatgttgattaatagtttactgatggaggagggtttaattttgtaatcatcatcacatataagtatttgaattatttatcttgtgtagacactattggattagtagactatgactttgtcattattcaattgactattatttgtgaatgctgactcaactctttgtttctttctcattgatttctgctaatactttttgtaatgttgattataaaaacattgtaagatttagtatttgagtaatttatgttttgtgttatttgtcattcagcttaaacagaaaggaaccggaccaggagcaagaagctctcatgctatagctcttgtgggaaacaaaatgtatgcctttggtggcgagtttcaaccacgtgttcctgttgacaaccagctctacgttttcgacctcgaaactcagacatggtctatccaggaagcttctggggatgctcctcctcctagagtaggtgtagccatggctgcagtcggacccatcatctatttctttggtggccgggactcgactcaccaggagctcaacgagttatactgttttaacactttgaccaaccagtggaaactactctcttcaggggaaaccggtccacagaaccgaagctaccactctattactgcggattctcagaacgtgtatgtgtttggtggatgcggagttgatgggcgtctcaacgatctatgggcttacaatgttgttgatcagaaatggattaagttcccatctccgggagaagcttgtagaggaagaggcggtccaggactcgaggtggttcaaggaaagatctgggtggtatatggattcgcaggagaagaagcagacgatgtccactgtttcgacatagctaaaggggaatggaaagaagttgagacaaaaggcgaaaaaccgtcagcaagaagtgtgttttcgactgcggttgttgggaaacagatactgatatctggaggagagattgacccgagcgatctggggcatatgggagcaggatgtttcacaggtgacgcttatgggcttgatacagagacgctggaatggaggaaatgggaggatggggttggatcggtggagcatcccggtcctagaggatggtgcgcgtttgcagctggatcacgagatggtaagcaaggtctgttggtttatggcgggaactcgccgagcaatgataggcttgatgatatcttcttcttcactcccaacactctactcaagtgattggtaactaagtatggtttggttttcttgccggagagaggggctgtgtgaatgttcctttttttttagtttccttttggattggatgaactatgaagatgtgtgatgtgtttcattttcctctagtatttgtaattaaataatcgaaatttttcattaaagaagataacgaataacatcagctt

SEQ ID NO: 151293 - DNA, 1778 bp, Arabidopsis thaliana landsberg
tcaggttcacatgacttgctgatttggatttttttcatctgcggttttctcttccaagcaacaatggtgtcggcgaacagagaaatggctgtttactgtttcgacactttggtctctcactacaacaatgaagagactccaccacctgcctttgaagaggccaatcagtaagtttttttccttgcttgtgttatgacatgcaagtttgaatctttctcaaagtatgcatttttttgtaattctctttgtctggaatttggatagagtactattgaacggacgatctgttcttaaatacaaaatcaaattctttttatggtcccaagttgttcttgatactgttatgagtagtcactttgagtatgtgaaactgtctgtgatgaggatattctttcacaatctaatattcagagactgtgatcagcagatccttgcaaacattgcatgccttgtcgttgtgatgctagaaactaaccattttttgttttctgggtattttgtgttgaatgtttatggatgggtgatataatctgaagcgcatactttttgtgtccattcttactgatggtccagtctttttgctttttgtgtagtccattgtttgttacctggaagaaaatagtgaatggtggagagcctcggttgcgtggatgtattggtacactggaagcacgccgcttgatcagtggcttcaaggattatgccttgacaaggtacgtactcgtcctcattcagttttttttttctgattctcatattattttcttggccatattcatgatgtgcttttcgtctgctttgcttttttttcatggttgaaattgttctgcctcaactttgcttatcatatatctgtgttcttaagtcttagatagtatctcttaacaactttgttgaatttttcttttgtctgtctgctttacttctcttctttctcattttctcttggtggaatgtacttgtattgcttgatactaagagcggtttaagatagactacaaattgataaccattaggtgacacacaacaaactaatggataagtacacatgtacagatatacttttacatatgtaaataggcagttctttgtctaatttatcaaacagacataaatggcattcccctattgttttgagctaacagatttcatatcaagtatcaaaattttcagctgtttttgtactgtgtttggtgtgtaatttatatttttgttgcaacccatctgctgcagttgattaaaattttttgctgtatctttttcgaaactttgtgtatatcgatagcatgaatagcaatagtattacagtgaaagctaatcaggcttcaacctctgtaaaggaactgagtaattcagttctagagattttaggcttgacacccacaaatgaagcacatatatgttggtgtttattgtgcagagagagcctctattcattagcatttcccatagcttatctgccttttatgtcatgtggttgtgttgtaattgcttgtgatatctttcttttgttgtcagttttaaacgacattagttttcttatataatattgcagtgccttgagggatcgcaggttcccacctatacaggccaaagaattgccatctctgcagtgtacggtgtctgtcttgactgattatgaagatgcagaagattaccttgattgggaggtatattctcttcactcttttcttacaatatgtcaatctcacgaattaagaatatagttgccaagaaggaatgcatactattcaatgtacacagtcaataaacttttc

SEQ ID NO: 151294 - DNA, 1226 bp, Arabidopsis thaliana landsberg
aactacggcctaaccgccgacaatcttccacctccgtcagcgagtgcaaagctccttcaatccacaactttccaaaaagtccgtctttacggatccgacccgggtgtaatcaaggccctagcaaacacggggatcgagatcgtcatcggggcgtctaacggcgatgtacccggtctagcatcggacccgagtttcgcccgaagctgggtcgaaaccaacgtggtaccttattatccagcgagcaagattgttctcattgccgtgggaaatgagatcacatcatacggcgacaatagtctcatgtcgcagcttttgccggcgatgaaaaatgtccaaggtgcccttgaggctgtgtctcttggtggtggaaaaatcaaagtctcgacagtacacataatgtcggttctagccgggtcagaccctccttcgaccgcggtatttaaaccggagcatgctgatatattgaagggattgctagagtttaatagtgaaaccgggtcgcctttcgcggttaacccgtacccgtttttcgcttaccaagatgaccggagacccgaaactttggcttattgcttgtttcaggccaatcctggccgtgtcgaccccaacagcaacctcaagtatatgaacatgttcgatgctcaggttctacatttcttgacatattttaagttttagctattttactagaagttactatttatgttatgttccgaaattttagtgcacaacaaattttttggataaacggttttatttcatgaattttctttttggtatattattaaagtacaacgagatgatattttagtagtttgtatgtttgataaatggaattaatttttctcaagtttggtttcggaaaagaaaaaaaaagtttgttaaattaaagagattggcatattcgttacgtcaaatgaatggaaagtgaaaactgtactctagaaggaaaagtagtataaatcgttaaaggacacaaagtgagtgtaccttataaagttagtggaaggtagaaaattgatatcgaaatttgcaataatggattcatactattaggaaaagagactacaatacaaattaaaaatgttatttgtaacatataaaaagaagtaaacatatagatgatataattaatctgttttgtggtttaatttacggtggtaaaattttgttttgtgaaggttgatgcggtgtattcagctttgaactcgatggggttcaaggac

SEQ ID NO: 151295 - DNA, 3709 bp, Arabidopsis thaliana landsberg
actccattaaatcccttcttcatcgatccttcattagatttacaacaacaacaatgccaagcgtcaagctcacacaccattctccacctgacactattgcctccgactccgtccgtctcctttcccgtgaaactctccgaatcagcgcctctctcgcttctcctcccgttgatgatctccctcctcactctcctccacctccagattctcaatttcttcattcgactctgagattgatctgttgcgaagaaatcgatggccgtcggtttaagtatgtcgctgagagcgatggttctgggagattcaagaagaattcagttcgtgctattagcttggagtctcctcagactccttttgatgtatgccttgttccattgatgaactctttttttgaattttcctaaatatgtgaaatgtgttcaatttttgtttttggtgatttgttacaggaagtgggttcgtttcttagatcttacgttgtacctgaaggctttcctgggagtgttaatgagtcttatgttccttatatgacttggagagctttgaaagtatgtttcgttactttctaaaagtttttttttagaattcagtgtaaatgattgatctttttgactgtgtagcatttctttggtggagctatgggtgtgtttactactcaaactcttcttaattctgttggagcttcaagaaacagttctgcttctgctgctgttgccatcaattggattctcaaggttttcctttctcgtatatcctttcatgcatcatgcatgtataacaatcctttaaaacatggcttactcactcattgttgaatatcaatgtaattcttgtaggatggtgctgggcgtgttgggaaaatgctttttgcgaggcagggaaagaaatttgattatgatttgaaacaggtacttattccattacttaacaaatgcgatggttgactctctctctcacgtttaaactcactttggcttgcagttacggtttgctggtgatctattgatggagctcggtgctggtgtagagttggcgacggctgcagttccacatctttttcttccactggcttgtgctgctaatgttgttaaggtagttttatcatcttttatcactcataattgctattcgatttcaatgttattgttggtctttgatttttgtttttgtctcaatcatttgttttatcacagaatgttgcagcagtaacatcaacgtctactcgtacaccgatctataaagcctttgctaaaggagaaaacataggagacgtaactgctaaaggagagtgtgttggtaatattgcagatctggtatgaccctttttcaacattagttttcattgtttcttgggtgttttgttggtttaatctgtcaagcggaattaaatttgaactaaaggtggctacattgctagtttgctacttgttgcttaagggtcgaaatagattctgtttgatctctttttgagctctaaaattttcatttgtttttattattttctatgtgaagatgggaactgggtttagcatcctgatatcaaaaagaaatccttcgttggtcacaacatttggtcttctatcatgtggctatctcatgagctcgtaccaagaggtagaatccagctctgtttcaagtatatctctttttatgtacttggggttctcttgatttattgctcaaaaaacgtggctgtgtcctttacaggttagatctgtagtattgcatacactaaaccgtgctagatttacagtagcagtggagtcctttcttaagacgggtaagctatgtcactttgctagcatgcacttgagtgtgctcctagagctctgatttctcaccccttttgaggtttgtcatattcaaacttcacagattgaactttccatctatctgcaggacgggttccctcattgcaggaaggtaatatccaagaaaagatattcacttttccatgggtggatgatcggccagtgatgcttggtatgtgttatctaacattccatataaattatgttcctttttcattacccttactgatttgttttttcctacaatttgacaggagccagatttaaggatgcattccaagaccccagcacgtatatggctgtaaagccttttttcgatgtatgtgttttttcccttaatatcaagccttgaccgctttatcttgatactgtaattgactttattctctttactaatggcagaaagaaagatacatggtaacgtacagccctaccaagggtaaagtctatgcgctgctcaaacatcaggctaactcagatgacattctcaaagcagcatttcatgtaggatgattttgtatctgtttaatcactattctgttgagacgaagtaattttggcctaaattttctcattcggttacatgatcatatatcacaggcacatgtgcttcttcatttcatgaatcaatcaaaagatggtaacccaagatcggtggagcatttagatcctgcgtttgctcctacagaatatgagctcgagtctcgtattgcgaagtcgtgtgaaatggtttccacatcatatggcgtcttcaaaagcagggctgcagaacaggtaacttgggagaaacctgttatatcctttttaagttatttaattgagtgtgcatctgaaaattccattttgatagggttggagaatgtcagaatctctgcttaatcctggccgggctaggttatgtcatgtgaaggagggggagtaaacatcgcctgttgagactggtcatcgacctgaatcggcttttatagttatttcactgtcacactctaaattttgctgtcttggtttcatgaagaaaaaaacaggttttggttggtacacgttttattaaccatgctgtaaaaaatagaacgatatgtagcttttgtaaattgtgagaataccactggtgtaatttaacagatgaatcttctttgtgtaccaattctcacatcatgattgttacacaggttcataaacagaaagtcagaaactttgggttcacgaaacatacataataccagatctagaatgtatgaattggtagaggtgacaaaaaccatttagctttggattcattttgagatacttatttgatatcttttctggaacacattctttttttctggaacatcatagagagcccaagatcgaacataaaagaaaaaaacatcatagaaacaaagagacttattcacattaaaatataagacaaacaaaatcaaagttttatgactcctttattagcatgaaaatatcatacttccaaaaagtaaacccgttatggggcgcaccaagaaacggaaacttatttatttacaaacaacagaacaaagcaacgcacacgaagatctatgttttaagtctcagaaccagcaatgcacaatgccctttagttcaagttgatgacatcgtaaatgaaactggcacgtttcagttagcaaggacgcttttaaactgagctatcgattcaatagccttgtcaaactcactatcttccaatgcaaatgaaaaccggcagtaaccagggattccagtccaggaaccgctgtttaagcaaacaccggtatggctgaggaacacatccctcatatttgaatccgtaagctcgacgatttcctgaccatctcctgctttcagctttacttttttgttgagataagctttcggctttgccaccattgagattccagctgagg

SEQ ID NO: 151296 - DNA, 1365 bp, Arabidopsis thaliana landsberg
aaatttattcgagattaattttctttttctttatatgtagtttgactcgttaatttctattgatatcaaagtaattttttccacttttctttccattgttcccagagattttaaccttttgctgctaataagtaactactacaatcagaaatatataataacatatcagaaatatgtttgtaacaggttattatattattttcttctaataggtgcacttggattaccttgaatctggagcaaatatcatcataacagcatcttaccaggtactttggcctatattaactaaagagtttgatttggtttgtttgcctgaagtaaatgtggtaaaaaaaaaggaaattagtttcaaaatgcatcaaggtacttaaacaaattaatttattacacaggcgacaatacaaggattcgtggcaaaaggtctatcggtgggagaagcagaaaatttacttagaaggagcgttgaaatcacgtacgaggcacgtgagattttctacaacagatggaccaagggttcatgggatttcgcctatgctggaaaagcttcccggagaccgattcttgtcgcagcttccgttggtagctatggagcttatctcgctgacggctccgaatacaggttctttgatcgatcctagtcatttttgtctgttacatttgtgtataaaattggaaaaatcatagtcataacaaaagttttggtcagttaaagaaatttaatttaattcctcataattgttctgcagtgggatatatggagattctgtgagtaaggagacattaaaggatttccatagaagaagagttcaaatcttagcaaaatctggagccgacctaatcgcattcgagactattccaaataagctcgaagcagaggtatctaaaattttctttttaactgaacatgtattctattctagtagctttcgttagtccatcgttgtattatatccctagttcaagcattgacgtggttgacaaaaaaacagtctaaccaaataaagttcttaactaactattaagtactgttagtctagtagtggttgcattttggtagttgtgataatattacatgatgttactgtataaatatatcgtttttcacgaatcataggcttatgcggatcttcttgaggaggaagatatcgatattccggcatggttctcgttcacttccaaggacggagtcagtgtgccacgaggagattcagttgtagaatgtgcgaaagtggcagattcatgcaagaacgtggtggccattggaatcaattgtactgcaccaagatacattcatgctttaattatctccttgcgccaggtatgtataaacaatgatggaattagggttttttcttttactct

SEQ ID NO: 151297 - DNA, 837 bp, Arabidopsis thaliana landsberg
catcagagaaagagagtttgaacattgagaggtattcagactcgttgaagcagaagatgaagtctaataagaatggatctttctttgattttcttgttcttagacctgataacttccctaaagaacttcttggaggtttgtttttgtttccaccatctcaatactctttagatgtgtttagtttcatcttgcggattatgcgatttcagatactcgaagagaacagcggcctgtgaagagagctaaatggagtcaagaagctggtacattgtgtttattattagtttttgttttcaacaatgtaacgagaagtttaagttctgtgttttttgtttcatagatttgcagaaattggatgtgtttgagaagcttgaagctaagtttaaggtaactagtgaaacttttaacggttcaatggttttttaagagcacttgacagtaatgtgttttggattatgtttggttaggttgaaggcaaggaagagaaagaagaaggagaagatgatgaagaagttgtggactcagaaggagaagaatctgataaagaagataatgatcaggtttttgcttattttccagattaatgtttgaattgaaaccttgtgtgattcttcttcatctcaagttacttagcaactttgttcttgaatgcttttttgtagaatcaagactttgatgatgatgacgacgattataataacgaggatgatggatgtaagaatcatcatctttattctctgtttctttactaagattgcatccttaaaactttaaaaaaactattctaactaactttgttactctcttttcttgccagtagtcgaagaggtgtattaa

SEQ ID NO: 151298 - DNA, 918 bp, Arabidopsis thaliana landsberg
ggctagagcgagaagccggagcagaagctatagtccccgtcctcgtgacaggtcaccacctcgcgaacggaaaggctacgacgataatcgcctccgcgaacgtccgtcttctcgtgatcacgaatcctctggtccttctggtttgcttatccgtaatctccctctcgatgctaggtctctccgtccttctctactgttcagattccatcaaggacatcacaagttctctaatgttgattaattgacacgagttttggaatgttttcttgtttttcaggccgaacgatcttagggattcgtttgaacggtttggtccactcaaggacatatacctgcctaggaattattatactgggtatatgtcaagctttgtcttttataatcagatgcttttagctatttcctagcttagctttagcttactggttatttctcttaacaatgtcacattgtcaatgtgtatggattcttgactaatttgattggtaacttttggtgtcagttcaagtagttgtttgttgagtaggaactcttaactttaatgtgatattattttgtggtttagggagccgagagggtttggatttgttaagtatcgttatgctgaagatgcagctgaggcaatgaaacgaatgaatcacaaagttattggtgggcgtgagatagccattgttttcgctgaggagaaccggaaaactccacaagaaatgcgtactactaacggtacaaggtgaagagtccgttttcttgtgtttgtatcatatttttatatgaatgtaaatgttttgtaagtaattatcttagttacttccaaatcctatttcgtttaatatagtggtcgacacggggactacaagaggacttcacacagatcaccaaggcgcagatatcgttgtaagtagctttttggtttgcttt

SEQ ID NO: 151299 - DNA, 885 bp, Arabidopsis thaliana landsberg
atgggccaaacgtttcacgcttttatgttcccatggtttgcttttggtcatatgactccatacttgcatctagccaacaagctagctgctaaaggtcatagggttactttcttgctgcctaagaaagctcaaaaacagttggaacatcacaatctgtttccagacaggatcatctttcatcctcttactattcctcatgttgatggcctacctgctggcgcggagaccgcctcggacatccccatctcgttggggaagtttcttaccgcagccatggatctcactcgcgatcaggtcgaagccgcggttcgtgctttgcgaccagacctgatctttttcgatactgcttattgggttccggaaatggcgaaagaacatagagtcaagagtgtgatgtacttcgtgatatcagctaactccatagctcatgaacttgtaccaggtggtgaattaggagttcctccacctggctatccttcgtcaaaagtgttgtcccgtggacgcgatgctcacgctttgttgacttattccatgttctacgagaggcttcatcaccggataacaacaggtctaaagaattgtgattttatctctattaggacttgtaaagaagtcgaaggtaaattctgcgactatatagagcgtcaataccagaggaaggttcttttgacaggtccaatgcttccagagccagacaatagtagaccactcgaagatcgatggaatcactggctgaatcagttcaaacccggctcggtaatatattgtgcattgggaagtcaaataactctagagaaggatcaattccaagaactctgtttaggaatggagcttactagtttaccgtttcttgtagcggtaaaaccaccaaaaggcgcaaaggcg

SEQ ID NO: 151300 - DNA, 1299 bp, Arabidopsis thaliana landsberg
gcatgatatgattattgaagctggtgcttatccttcacctcttggatatggtggatttcctaaaagtgtgtgtacttcagttaatgagtgtatgtgtcacggaataccagattctcgccagctacaggtcctcatgtgtgctttttactgctttaagctgaatagctttgaaggagttcatttgtttatcactaactattaagtcttaatgcagagcggggatataatcaacatcgatgtcacggtttacttggatgtaagtcatttgcgcttcttttgttaatttgcagacactttcactttgtttgatttctacatacaacttgaaacatcaacagggttaccatggagatacgtcgagaactttcttctgtggagaagttgacgaaggtttcaaacgacttgtgaaggtagtattcttcttcttcttcttctcttcactgtgttttgtcttcaagttcacaaaaaaatgaattctgttttaatatgctaactgttgtcggtttcttgttctgtaaggttacggaagaatgtttggagaaaggtattgcagtttgtaaagacggagcaagcttcaagaaaatcgggaaaagaatcaggttgcaaccaaaactattcttgatttcaatataaccgtgtagaaatgtactatttgaggacactgctagaccaaacaatctcaatgctttcaatttccaacagtgagcatgcggaaaagttcggctacaacgttgtggagcggtttgttgggcatggtgttggaccagtattccactccgaacctcttatatatcattaccgtaagtaatctcttccttagcaaaatcgttcttatgttaggaaacatcaatcaaaaacaatagttggctgcatatgcatatgaacctggacttacggttgaggaattttaatccaatttgcaggaaatgatgagcctggactaatggttgagggacaaacattcacaattggttagccattttttccccttccatgtcatggctttcatttgcttatgattaggtgattactatataataaaaaccgatgaatacattactgttgcagaaccgattcttaccattggaaccacggaatgtgtaacatggccagacaactggactactctgacagcagatggtggcgtcgctgctcagtttgagcataccattctgattactagaacgggttcagagattcttaccaaatgctaaaactattcacattgatcatttccatttcaccttttatttgctgatcctttaaggtccatagtataaattcattatctatgagacc

SEQ ID NO: 151301 - DNA, 1503 bp, Arabidopsis thaliana landsberg
  unsure (1)..(1503): unsure at all n locations
caaaaatggcttctcttgctcccggaattctcttaaaactccttcaatgcatgaactccggcactcgccccaccggagatcacagatctgcaatcttacaagtcaccggaatcgtcccagctctcgccggctccgatctatggcctaaccaaggcttctacgtccaaatctcagattctctcaattccacttacgtctctctctccgaacgcgacacagatctaatcctcagtaaccgtctccagttaggtcaattcatatacctcgaacgcttggaattcgctactccagtcccacgtgccgcaggaattcgtcccgtcgctggtcgtcatgccttcgtcggaaaaccagagccgttgattgcaagagtatctaacggatctaaacgagatttcgttattcagccagtttctgattctgagtactcgttagatccaatcgctgtttacttgaacaatagaagaattgacgacgacggtgacagtgatgtgaaacctaatgtgagacaagcgcttgctccggtgaaccaaaacgaagagaatcgtaaccaaattcgaaatcagaaaccgaaaacgactccacagagattctcgtcaccagcatcttctaaacgatcagtctcatcagggaagaagaactgttcnnnnnnnnnnnnnnnnnnggtggagagagatccgtcacctgtggtttctggtaaagggaggagcatctgcgtctccggtgccgtcaaaatgcgttgtgccaagcttagcggcggcgcgtgaggagaataggaaagtagctcgagagccatcgattgttgtgccgtcaaggtatagacagccatcacctaatggaaggaagatgaatccttctcctagtggaagaagaatgtcgannnnnnnnnnnnnnnnnnnnnnnnnnngtttaaagatgactccaatggttggagattcttcagggaagaagaagatggcggtgattgcagccggaatctcaaaagtttctgaagctttagtcggttcgtctgctaagaatggtaatcggaaaaattgggaggaaccattagcaggtgatggtagtgctaagaataagcctgatcaccaagcaattttgcgtactcaggtactaaaaactttgttactcagtgagatatagaaagtttgtttagtttgatgaacaaattagtgttctggtgaatgaaatttgagttgttatgtgtgatggattgaaattgataatgtacaattgttgtaggctgctatgacgaggcgtctcagtgatgcaaataggagaaagagtggttcttcttcttcagtgtgtgaagagaaagcgaagtcgtgttcatcagagagtagtttattagaagaagtctcagcctttgaaggacttggtatcacttatcatgaacggaaatggacggatggtagtgttccactggatagtatctctgatgaacttgcaaaacttggaaaggttcgaaatagtgttttgtgtttaagctacatttagactagagggtat

SEQ ID NO: 151302 - DNA, 936 bp, Arabidopsis thaliana landsberg
ctggctggggtgtgcgcaacagatccatttcgtcgtatggactatttcctgaagcagttggagtccattgggttcgttggtgtccagaactttccaactgttggtctctttgatggtaattttagacaaaatcttgaggagacaggaatgggatatgggtaagctacaaagcaggtttcaagaatcattttttgtgtatggattgtgtttaaatttccacataaacttgtccgatattgcagtcttgaagttaaaatgatctcataagcgcacaaaatggggctgttgaccactccatatgctttcaacccaaaagaaggagaagaaatggcaaaagcgggagctgatatcatagtagcccacatgggtctaacgacatccggaaatattggggcgaaaaccgcagtttcagtggaagaaagcgttgttcgtgtacaagctattgcagatgctgctcgtagattcaacccagacattatcgtcctctgccacggaggtatagtaacttctaaaatccatcattcactgtttgatatagaagttttgttgtagtaagctttttgtttttaggtccgatatcgggtccagaagaggcagagtttgtgttgaagagaacacagggttgtgtccatggcttctacggagcatcaagcatggaaaggctacctgtagaacaagcaataacaaacactgttcaaaaatacaagtccatatcgatcaagtgaagtcaaaataataagttcacttagaaacctttatctttggtgtttctagtatatttgcatgtgttgaggcctatgggtgtggatgcatgcttttgtagcatggtggattgttttatggacctctttgcttgcctctgcaggatcatatatgatctctagctttggatatcaggatacttgcctgcatactaaagatcgtagagcttagctt

SEQ ID NO: 151303 - DNA, 1852 bp, Arabidopsis thaliana landsberg
acaatgtcctgcaccatcactgctgttggctcactagcaaaggccctcgtgacatccttgaagcggtttcttccactggaatctctcttcatcacgagttctacagtaagcatttctcatccttattccctttttattccctttattggataaagagagtctctctaagtatatagtttctaaaacaggtcgtaaaagcatggtttcgtgtttccttggccatggtatattgaatccacgtccatctactatgacggtcatatcccgtccaccagtgtacattcctccacgcttctattctaatattagccgccgacgtgaaaatagatacaactccattttcccgtttccacttgagtctcctcgagaagcctcctccaccctctggaaaaactttcttttagctgatccagggccacttgatgaggaggatagctgcagtgaaacgcctggacctgcctcctggcttttgctctgtgtgccgtcgtattggttgtggtccaggtattgctggtcaaggcgttgataattttatcacgcatatctctactcgagaacatgaactcaatgtaagctaagcatccttgccactagtttaactatattccctttctcagttgttcttttctttgcccaataactccagattgaaagagagagatatgtgtaaagaagaacataagaaaatgatataatgagaacaattctttttaatccgtaatgtgtgtgactgccaaatattctcaaatgttccaccattttcatgattttttggctgttagaaataaaacgtttagaatttgtaccaaaatacggggatggatttaaacaatcaattgtacgttaagttcaacacatttgaaaatgatttatacgcatgcatcatgagcattattgtattattgtttattttatataggtcccttttatatattataaaagagtgcaataaatttggttacgactttgaaactcatcgagctttcaacaatggcgaccattccctcccacaaccttcgtcctcatacgaccaaccaaaggactcagtactctctttccttcagaccacacttttcacgctctactctgatcactttcccggcaagatcatcgccggcgagggctatgtccagaaccgacgaggaggcttcaatatctacaaggctcgagcaagaaagctatgggctgacgacggcagaggacattcgccgacgggatggagaagcaaaagaatccaagaggttgagagacacgtggcggaagatccaaggggaagatgattgggccgggttaatggatccgatggacccggttctgagatctgagctgatccggtacggagaaatggcccaggcctgttacgacgccttcgatttcgatccattttcaaggtactgcgggagctgcagattcacgcgccgtcacttgttcgattcgctcgggataatcgattctggctatgaggtggcgcgttatctctacgcgacgtcgaacatcaacctccctaatttcttctccaaatcgagatggtccaaggtgtggagcaagaacgccaattggatgggttacgtggctgtatccgacgacaacgaagccacgcgctgccgtttaggacgccgcgacattgccatcgcctggagagggactgtcacgcggctcgagtggatagctgatctcaaggatttcctcaaaccggtatccggaaacggattccgatgccccgacccggccgtaaaagccgaatccgggtttctggatctatacacggacaaagatacatcctgcaatttctccaaattctcggcgcgagagcaggttcttacggaagtgaagcggctggtggaaaggtacg

SEQ ID NO: 151304 - DNA, 1623 bp, Arabidopsis thaliana landsberg
aggtcctcttccaggttcgggagaaacgggttgaccggttcaagcttggggaaggcgttatgccagcgagtttcaaggtgcttcatgatccagttcgtaaaaccgacacaattattgcggattttggagaaagcgctataggaagagtagcaccagtggattcaggattctggtggattatacttctccgtgcttacacgaaatctacgggagatttgactttgtctgagacaccagagtgtcagaggggaatgaggcttatactatcactctgcttgtccgaagggtttgacactttccctacgctgctttgtgctgacggttgttctatggttgataggagaatggtaagaactaactttttagtgaacgagcaaaaatcttatatgattcatcacactaaaaccaaatcttgatttgtttatttattagggtgtttatggatatccaatagagattcaagctctgtttttcatggcattgagatgcgccttgtcgatgcttaaaccagacgaggaaggtcgagatttcatagaaaggatcgttaagcgacttcacgcgctgagtttccatatgcgcaattacttctggcttgatcatcagaacctcaatgacatttacaggtatagttatttcatttgctttagatgatatgtagagtcacaaaagatcactataacttatagtacatttgtttaaaaaggttcaagactgaggaatactctcacacggcggtgaacaagttcaatgtgatgcctgattctatacccgagtgggttttcgacttcatgcctctccgtggaggctactttgtgggaaacgtaggacctgcccatatggatttccggtggttcgcactcggtaattgtgtctccatactttcttcattggccactccagatcaatccatggccattatggacctccttgagcaccggtgggcagagcttgtaggtgagatgcctctcaagatttgttatccatgcctcgagggccatgagtggcgcatcgttactggctgtgaccccaagaacacacggtggagctaccacaatggtggatcttggccaggtcttttttctttccctggagactgattgcataagtcatttcttacttcgcttaactgagattttcgctagacctagccattagttttttttttcggtttgatttgggtctcaattttttttgtagactggcataagaacagaaatatacatttaagatagtttagctagattttagttataaaaactcagtacttagtttagctacggtttggttgtggtttggattattcatatgaaacgattcatatgaacgtatagatacattttagtttggttcaacttttgtatcttatgatcgcatttctttcttatatatatatacatttgtggcaacctttgatatattttgttttgaaatattttgatagattgaataatgaacatcacgttgtgtagtgttaaatttgtcaataaaatcgaatacaaaatctgaccgcctttttgtttctctggtcaatgtgcagttttgctgtggcagctaacagcagcgtgcattaagacagggagaccgcagatcgcaagacgcgcggttgacctcatagaatcgcgt

SEQ ID NO: 151305 - DNA, 961 bp, Arabidopsis thaliana landsberg; identical to SEQ ID NO: 9790
  unsure (1)..(961): unsure at all n locations

SEQ ID NO: 151306 - DNA, 1193 bp, Arabidopsis thaliana landsberg; identical to SEQ ID NO: 4200

SEQ ID NO: 151307 - DNA, 1358 bp, Arabidopsis thaliana landsberg
gcaacaatggccaaaagctctttcttcaacaagcatttgcttctctctcttctcattcttctccaaagctgtctactctcttcttcttcaagtaccgattcagaaactctcttgaacttcaaactcaccgcagattccaccggaaaactaaactcatggaacacaacaacaaacccatgccaatggaccggagtctcctgcaaccgcaacagagtcacacgactcgtactcgaagacatcaatctcaccgggtcaatctcatcactaacctcactcacatcactcagagttctcagtctgaaacataacaatctctctggtccaatcccaaacctctcgaacctcacagctttaaagcttctctttttatcaaacaaccaattctccggtaacttccccacttcaatcacttcactcactcgtctctaccgtcttgatctctctttcaacaacttctccggccagattccaccggatttaaccgatttaacccatctcctcactctccggttagaatcaaaccggttctccggtcaaataccgaacatcaacctctccgatttacaagacttcaacgtctccggtaacaactttaacggtcagataccaaattcattgtctcaattccctgaatcagtctttacacaaaacccatctctctgtggagctccattgctgaaatgcacgaaactctctagtgacccgactaaaccgggtcgacccgatgaagcaaaggcttctcctttaaacaagccggaaactgtaccttcatctccaacttcaattcacggcggcgacaaaagcaacaacacatcaagaatcagcaccatctcacttatagctatcatcctcggagactttattatcttaagctttgtctctcttcttctctactactgtttctggagacaatacgcagtgaacaagaagaaacactcgaagattcttgaaggagaaaagattgtctactcatcaaatccttacccaacatcaacgcaaaacaacaacaatcagaatcaacaagttggtgataagggtaaaatggtctttttcgaaggaactagacgttttgagttagaagatcttctccgagcatcggcggagatgttagggaaaggaggattcgggacggcgtacaaggcggttcttgaggacggcaatgaggttgcggtgaagcggttaaaagatgcggtgacggtggccggaaaaaaagagtttgagcaacagatggaggttttaggaaggcttcgtcatactaatcttgtgagcttaaaggcttattactttgctagagaagagaagcttcttgtttatgattacatgcctaatggtagtctcttctggcttctccatggtac

SEQ ID NO: 151308 - DNA, 1619 bp, Arabidopsis thaliana landsberg
  unsure (1)..(1619): unsure at all n locations
cacattagaaacttcccactctctctctcgtttgcttcttcttcatcgcttcacccactcacttgattctctctctaaaaccttcactgtctctatctatcttcaaaacaatgggaaacctgtttgacagtagcaaggctttatggggaaacatgaaccatggatcgtcacgttactctctcaacggcaaaatcatgcttgcttccgtcatcatcctcttcgtcgccgtcattttaatcctctgtttccacagctacgctagatggttatttcgccgtcaaaaccgccgtattcgccgccgtatcagtgctcacctccgatcactcgccgccgctagagaccccacccaatcatcatcctccctctctcctcttgatccgacggtgctcgagaagatccctatcttcgtctactccgttaaaacccatgaatctccgcttgnnnnnnnnnnnnnnnnnnnnnnnnnnntcgaagaagacgacgaagatcgtgtccttccaaaatgcgcaaggctgaccacgtcgagtctctcaccacgttgtcgactggtgcatctgggaacaagtttctattcactaacgagaacaagcttgtggtctcgtggtggccagattccgttaataagatcttcccttcttcaatgcagacgagctccaaagaagaagccaggaagctgaggatgcttctttcgcagttcatgaagcccgaggctttgaggaggtatgttggtgttatggatgagattgctcaaagacattttgagacggaatgggccaatcaagatcaagtcattgtcttccctcttaccaaaaagtatgtactttgcttctcatctttttaaagcaaatttaattttttttgtaaatgcaagaaaatgggaagaaaatattagaatttcaccaaactattttatgactaagatatacatataaaaatctcaatcaggttcacgttttcaatagcatgccgttcgttcctgagcatggaagatcccgcaagagtaaggcaactagaagagcaattcaatacggtagcggtagggatcttctcaatcccaatagacttgccaggaacacggtttaaccgagccatcaaggcgtcgaggttactcagaaaagaggtttccgctatcgtaaggcagaggaaagaagagctcaaagccgggaaagcattagaggagcacgacatattatctcacatgttgatgaatataggagagaccaaagacgaggatttggctgataaaattattggattgttaatcggaggacatgacacagctagtatcgtatgcactttcgttgtcaattatcttgctgaattccctcatgtctaccaacgtgtgctacaaggtactcgcctctctctacaacctctagtgttattctttgaatacattaatatgtttaggtacaacactttttcaattaacttgtactttcctacacgacagcttcctcaataataaaactaaacatagcttatgactggtttgttagctaggaattaggatcatatcttatgacttctttttgggataatgaataaataaataaaaatactatgtgagaaacattacatatgataactaaatatgaaccgacaatgcttgtaacata

SEQ ID NO: 151309 - DNA, 688 bp, Arabidopsis thaliana landsberg; identical to SEQ ID NO: 14285

SEQ ID NO: 151310 - DNA, 535 bp, Arabidopsis thaliana landsberg
acccaaatggtatgtaacatgcagcatgatccatcttttgtaatacaggagcaggagcaggacatgcatatttagtatggaaagagaccaagctgatgagttatcaatcaatagcgaagcagtcaatgacccatcaccagcagctattcattttggagaagcatcatcagattatgcacaaagttctgttcaaggtaataaaagcttttttactcatatccataccaatctcaacataagaaatgaaacattcttttactgcggtcaaaataattgattaggtgtggagaatcttcattgtggatggctaattgatgaggaggagacggatcctgaggaggaaacggatccagaggagaaggagaccgagccagaggatccaaaggagaaggagacggagccagaggaggatagtgatggtgatgatgatgagatcattcagcttactccagaacctctttgtgaagaacttcaagagcttctcggggaagtacgtggacagaagaggaggaagaaagagatgaggtgggacaag

SEQ ID NO: 151311 - DNA, 3056 bp, Arabidopsis thaliana landsberg; identical to SEQ ID NO: 30781
  unsure (1)..(3056): unsure at all n locations

SEQ ID NO: 151312 - DNA, 8541 bp, Arabidopsis thaliana landsberg; identical to SEQ ID NO: 5070

SEQ ID NO: 151313 - DNA, 1514 bp, Arabidopsis thaliana landsberg
tctcaatatagtaacattgagtggcgtataatcattaatcttgaagcatctaattaactggttgtacatattaatagcagaatcctgaaactgctgactatgcatctagcagcttgagaattgtaacctctccagactaagtaaggaagtcgaagacaaaaccaagcagctacggtatggctccattgatatgttatgcagataaacctattttcatataggctatagctgtaagagatcatctatttcatgtgtgtggtttttttttaatgttttttcaatgatgtgtgcatgctatttttaggttttagaatctatttcatggaaattgaagatatttcatttcacgtgtaagttcgtcaagttgtggcgtgtgtcttggaaattgatgttttgtttgtagattttaagagctacttctaaaatttacaagagttttgtaattttcaattatggcccattattctcattaattcattaaaaaaattatatacattactatctatatctagcataggtagttttttttttctttttctttggtagacatactgaacaaatatctgatatatcactgactggataaatatctatagagatatttttgatagaaatgagtgttaatttaacgtaaaacaggaaactgagaggagaggatcttgatggattgaacttagaagagttgcagcggctggagaaactacttgaatccggacttagccgtgtgtctgaaaagaaggtttactactatacataaactaatagcatgcatattttccttaacgtggcatataaataataagctgtacatatataaaagtttgactttgttgttattggtaaatagggcgagtgtgtgatgagccaaattttctcacttgagaaacgggttagtagttagtacatacaattcgtataactaatggatcataagcctatctatagctagtgactttcttaataagtgaaacagggatcggaattggtggatgagaataagagactgagggataaagtacggctctaaacccttatagatatcatggaataaccttaatctatttttttatgtataagaaaatatgatgagggaacgtatattatatatcggcagctagagacgttggaaagggcaaaactgacgacgcttaaagaggctttggagacagagtcggtgaccacaaatgtgtcaagctacgacagtggaactccccttgaggatgactccgacacttccctgaagcttgggtataatttgtttaactgaacatatttcaaactttttgttgacattttgtatgtggatgtttactaactgtttgttggttaggcttccatcttgggaatgaatctgagagagagaaagatccagcagagttgacttcgatggaagcccacaaatattaagtctaccttttccctttcttttctttgaataagtgttgaaaaagaattgagatgggaagaatgaattctcattgcattgcagagaagcaagtttcagatattgtacg

SEQ ID NO: 151314 - DNA, 1196 bp, Arabidopsis thaliana landsberg; identical to SEQ ID NO: 4650
  unsure (1)..(1196): unsure at all n locations

SEQ ID NO: 151315 - DNA, 959 bp, Arabidopsis thaliana landsberg
gatgttattgagcattactccacattaaagggtaaaagctttaaatcacatcgagtgacacgaaagggtaacttaaggttcatgttttaggtaccgatagattctgaatcactttggttgcagcgaatcctgagtttagttctctaccgagctttctctttggacagtcaatgggtggagctgtgtcactcaaaatacatctcaaacaaccaaatgcgtgggccggcgcagtcttgttagcaccaatgtgcaaagtaaagacttgtttttccttgttattaatctctgggattactaatcataacattaacatgagatatctattcgttctagattgcagatgatttggttccaccacctgtattgaaacagattttgatcggtctagctaatgttctaccaaaacacaagttggttccacaaaaggatttagcagaagcagggtttagagatatcaggaagagggatatggtaaaaacaaacaaagcagattttgaggaacgtatcgccttttcttcttacgatttccttacttaagccacctgtttaatatatgcagacaccatacaacatgatttgttacagcggcaaaccacggctacggactgcagtagaaatgcttcgaacaactcaggacattgaaaaacaattgcaggaggtaaaacgtatgagaaaacttggaagaatcaaagcagaatcagaataataacattctttggtttcatctttgcaggtatctttgccgatattgattctacatggagaagctgatacagtgacagatccttcagtgagcagagagttgtacgagaaagccaaaagtccagacaagaagatagttttgtatgaaaatgcttatcattctctgctcgaaggcgaaacagaaaacatgattctccgtgtcttgtccgatattatctcgtggctcaatgaccatagcttgcaagctgagggatcat

SEQ ID NO: 151316 - DNA, 1079 bp, Arabidopsis thaliana landsberg
ggtttgactttttgtttctgatttttgatctgtgaaaattggtttttttattattattaaataaatcgaattgggtttttggtgaaggtaataactggagtgtctgatgctgagttaaataatttcgatgtgattgaaggtaatgattatgagagagtaactgttgaagttgtaagaatggtaagtagtttgtgttttgtaataagatctttgtttttatttatttaattacaatgtgatgttattttgggaattttgagattcttgtgatattcgcaggataattctgagaaggtgaaagttgaaacttatgtttgggttaataaagatgatcctagaatgtatggagaatgggatttcgaggttggttctttttgttaatggttgatgaaaaatgtagtatgatctgggaatgttagtttattttgttgtttaaagcatttatagtggctgaacatattgaaattgttatatcgacttcgttttttaccaatttgtttgtaggtagttaatgtttgaatacgggacctagtctaatctcgggatatcgtcgtggaatgttaggttgttttgttgtttaactagcagtattgaaatcgttgtgggatgattcaaacgatggttttctcgattttgtttttaccgatcttttgcgggtatttaatgttgcaatttcgtgtgtgtgtgggtgtgtgtgtgtaggaatggagagtggttcacgcggtgaaattcgtggagacttttagaaaaatgttggaatggaacaagaatccaaatgggaagagcatggaggaggctgtaggatcattattatcgtcaggggattgattcttgaatgagcttggctaatcttagcagaagagagtaagtaagtaaagagtgggttttgaataatgtgttgttggaacttgaaacagagtcttctatgtgattttgtttgtgttgttatggatatcttgttggcactttttctgatttcagttggaaacaggtgcgcttgcgggcaatagttgcttcggagtggttgtaataacaatttatcataaagcctaccaatattaatataatagattttatat

SEQ ID NO: 151317 - DNA, 663 bp, Arabidopsis thaliana landsberg; identical to SEQ ID NO: 51421

SEQ ID NO: 151318 - DNA, 1398 bp, Arabidopsis thaliana landsberg
cttcttcatatatggagaaagagaatccctttaccggcattttaagtgataaagccgcggataatccaggtttcttgctaaagctcctctgtctttataaatatatatcactctgtatagtgtgtgttaatctccttttgaatatttgtttgtagacttttataactggaatagagtaaaagttcggtattgtgacggtggatcgtttagcggggatagcgaaaataaggttagcatttgtatagaatttgataactttcttgtgttacaacattgattgtttatttgaatttttttgctacaaattaggctgcacaacttcagtttagaggaaagagaatttggttagctgctatggaagatttgatggcaaaaggtatgcgtcaagctaagcaggctctgctctctggatgttctgcaggaggtcttgcggtgattttacgatgtgatgattttgggaaattgtttcctccttccaccagagtgaaatgtttgagtgatgctggtttcttccttgatgcgtgagtgatttgctagtttccttgagtaacaagtataggtaatgactttggtatacatagtgactgttttttgtgatttatggaagtgaagcatcgatgtgtctggaggtcgatctcttagacgattatacgccggtgtggtcaaattacaggttagaagtaaagaatgttgcatagtgttttacttggtgcaagaatactaatcgagatttgtgtaatgtttctacagaatctgcaaaccaaccttcctcagtattgtgtaaaccgtcttaatcccacttcggtacatattcttaacttcacaccaaataagaaagatgtagtgtgctaaatctcctcataagtgtactccatggtttcaatattgcagtgttttttcccacaaaacctaatcaaccaagtcaagactccactttttattcttaatgctgcatatgattcttggcaggtaagttatttctcttgttgatcatcagatttattaacaagattttgtgtttagttagtttttttttggtgcagattcaagagagtttagctccaaaatctgcagatccaagtggaagttggaatgattgtagacttaactacgccaagtgtagtgcatctcagatccaattcttgcaaggtgaaacataagctaataatgatgttcttgatttttttttccgacttatgttcttgattctgaataaccaaactaacaaatgtttttgaaatgtgtgttacaggttttaggacgcgtatggtgaatttggtaaaaggtttcgcgatgccaagtaagaacggtgtgttcctcaattcgtgctttgctcattgccaaacagagaggcatgacacttggttcgcccaaaactctccagctattaagaacaag

SEQ ID NO: 151319 - DNA, 703 bp, Arabidopsis thaliana landsberg
ttttttttttccgaaaatggacgttacaattcaaagtttcgttatttcagctcggtgaaccatggactaccatatgatctaatggacaacattgagaggatgacaaaggaacactacaagaaacatatggaacaaaagttcaaagaaatgcttcgttccaaaggtttagataccctcgagaccgaagttgaagatgtcgattgggaaagcactttctacctccgtcatctccctcaatctaacctatacgacatccctgatatgtcaaatgaataccggtacacaaacagactttgatccagctttgaaaacgcctcacaatcttccaaaattattgattactttgctttccatgtctcttaacagattggcaatgaaggattttgggaagaggcttgagattctagctgaagagctattggacttgttgtgtgagaatctagggttggagaaagggtacttgaagaaggtgtttcatgggacaacgggtccaacttttgcgacaaagcttagcaactatccaccatgtcctaaaccagagatgatcaaagggcttagggctcacacagatgcaggaggcctcattttgctatttcaagatgataaggtcagtggtcttcagcttctcaaagatggtgattgggttgatgttcctcctctcaagcattccattgtcattaaccttggtgaccaacttgaggta

SEQ ID NO: 151320 - DNA, 1797 bp, Arabidopsis thaliana landsberg; identical to SEQ ID NO: 30331

SEQ ID NO: 151321 - DNA, 1334 bp, Arabidopsis thaliana landsberg
  unsure (1)..(1334): unsure at all n locations
tattggtctgatgatggagtagtgtttaagccattgaagcttaacgatggaagaaactatcaagtttggattgattatagagattttgtagttaatgttactatgcaagttgttggtaagattcgacctaagattcctttgcttagtacgtctttgaatctctctggtgttgtggaagaagagatgtttgttggattcactgctgctacagggagattggttcagagtcataagatcttagcttggagttttagtaattcgaatttctcgttgagtgatagtttgatcactactggtttaccttcgtttgttttacctaaggactcgattcttaaagcgaaatggtttgtttttgtgttggtgttgatctgtttcttggttgttgctttggttggtttggttttgtttgctgtggtgagaaagagactagagaaggcgaggaagagagcgttgatgcaggattgggagatggagtattggcctcatcggattccgtatgaggagattgaatcggggactaaggggtttgatgagaagaatgtgattggaattggtgggaatgggaaagtgtataaaggtttgttacaaggaggagttgtggaagttgcggttaagcggatttcgcaggagagtagcgacgggatgagggagtttgtggcggagatatcgagtcttgggcggttaaagcaccggaatttagtttctttaagaggttggtgcaagaaggaggttggtagtttcatgttggtttatgattacatggagaatggaagtttagaccgatggatattcgaaaacgatgagaagaaaactacgcttagttgcgaagagaggattcagattttgaaaggtgtagcttcaggaatattgtatttgcatgaaggatgggagtctaaggttttacatagagatattaaagctagtaatgttttacttgaccgagatatgataccgaggcttagtgattttgggttagctcgggttcatggacacgagcaaccggttaggaccacgagggtggttggtacagctggctatttggctcctgaagtggttaagacggggcgtgcatcgacacataccgatgtttttgcttacgggatattggttcttgaagtaatgtgtgggagaagacctattgaagaaggtaagaaaccgttgatggattgggtttggggattgatggaaagaggtgagattctaaatgggcttgatccaaagannnnnnnnnnnnnnnnnataacacgagtcattgatgaagctgaaagagttttgcagcttggattgctttgtcacatcctgatcagggcaagagaccgtcgatgagacaagtg

SEQ ID NO: 151322 - DNA, 1093 bp, Arabidopsis thaliana landsberg; identical to SEQ ID NO: 52002

SEQ ID NO: 151323 - DNA, 988 bp, Arabidopsis thaliana landsberg
tttgatgttttaccagctcagagatggaatctatttgcgtatgatgatttgtttagtagacgttacttgagtaattccacaatagagctaagaacagatgataatgttgttaggtttgctttcaacaatgtctctagtagtggtaacaatgttgtacctacaagaaaagagaagaaatggaaacgggctaaattgtcaagaaaggctaaagtgaatgagttaaggttttatcgtcttaaggctaaaaagaagatgaattctccaaaccctgaagttaggattcgttacaagcttgaaaaggttacatcttttagttactctacattgtattagtcaatgtaacattggagtttattcaaaatttattggtgtggttgattgtgtaggctaagaggaaagaagaatggttgattgagaaactgaggaaatacgatgtcccgaaatcaccagcggagccgtatgatccagaaagtttgacagaggaagagcagcattacttaaaacgtacaggtgagaagagaaagaactttgtacttgtcgggagacgaggagtgtttggaggtgtggttttgaatttgcaccttcattggaaaaagcatgagactgttaaagttatttgcaagccctgcaacaaacctgggcaggttcatgagtatgctgaaccagcttgctcggttaagtaagggcattgtgattgatgtcaaacctaacaacaccattgtgttgtaccgtgggaaaaactatgtgagaccagaagtgatgtctcctgttgataccctctctaaagataaggtatattgttgaatctagatacttaatgtttggctggttgtttcttgtcttgacaaaagtgaatgaaaacgtcaggctttggagaaatatcggtatgagcaatcgcttgaacatacaagtgagttcatagagaagctggagaaggagcttgaggagtaccataagtacgttgttccgtccaaaaagaagaaagatg

SEQ ID NO: 151324 - DNA, 564 bp, Arabidopsis thaliana landsberg
tggtcacttgattctctcttccttcatcaatcaatctcgtctcctggaaaacattagggagcctctcagatcctcaagaaaaccctaaatcaaaagtcgagatcgatggcgtccttcgctcgccgtgccatgagcttagctcagatcccatctgctcgtatttcctctggagccgcttctattggtcagcgtcgttgtctcgccggcgccgctggtaaattctctctccctcttccttctcttttcgatatttacgatttttttcggtatcaattttggtggcgtatagcttatttcgcacattttatgtctaatttgtgttttcacgaattttagatgaaccaaatgttacaactttgtgaagattttgtatatcattggcgttgtcaggttccaaattgaatcactgtatacaaaaaattgagtttttgagcattttgtggatttgtctgtgtactgtgcagatcaccatggatctaccaacgttgacttctggaaacagcccacgaacccaagaaactggaaagaggagcatgtatgtatcaatcatgtgtttgggacact

SEQ ID NO: 151325 - DNA, 1160 bp, Arabidopsis thaliana landsberg
ccttgacaccttattcatctcttcaaaattctattattaatgcaggctaaaacgaaatgtcccgaaagaaaaatctaggcttgaaggaatatctacactaattaagtaacttgaattcattactgtttcgtttactatgaagaaacaaaatcatggaacacgtacgtgttgatcaacccgtgaaaaaatgttcattacctaattaagtaaatatagtaggattatttagctaacgtgtcctaacgattcggttattattccctttttgtgtgattatattctttttcattttgtgtcattattactaaaagacttgtgaaattaaagataataatatattgtagaccggaggaccgaactatccggtagagctagggaggagagacggcagactatcgacagtggctagcgttcaacacagtctaccccagcctagtttcaaattggaccaacttaacactatgttcgctcgtcacggtctatcccaaaccgatatgattgcactctcaggtatttaaaccgaagcaaaaccggagtagacggattttaatttcatatattataaccaagtctaacagattatttttatgatatgcaggagcacatactataggattcgcacattgtggcaagttttcgaaaagaatttacaattttagtcctaaacgtccaattgatccaactttgaatattcgttacgccttacaattgagacaaatgtgccccattcgggtcgacttgaggatcgcaattaacatggatcctacttctccaaatacatttgacaatgcttatttcaaaaacctccaaaaagggatgggtttgttcacgtcagatcaagttttgttctctgatgaacgatctagatcaactgtcaattcatttgcttctagtgaagcaacttttagacaagcttttatttcggctataacgaagttgggtcgggttggagttaaaaccggtaacgcgggtgagataagacgggattgttcacgtgttaattagtgtgatttgaggttttctttcttttattccttaaagaggatttttttttttaataataaaatttaatttcttgttgtcaaaataaggagttcataagtgtgaaacatggaaacttaaattaataagatgggtttatttcgttgacaaaaaaaaaa

SEQ ID NO: 151326 - DNA, 979 bp, Arabidopsis thaliana landsberg
ataaagacgagcagaagctatatacatggtaagcataggagctgaggactacttgaatttcgcaaaggctcatccaaatgccaatactgtggagcagctaactcaagttgcccacgttctccaaaggataccaagagagctcacggtatactttttagttattcacaactctctcaacttgatagattgatggatccaacttggtagcttctacaagtttgatcgtagtaggaattttgttttggatatatgcagagtttatacagggcaggtggagcgaggaagtttgcggtacagaatttgggaccgcttggttgtttaccgatagtgagacaagagtttaagaccggtgagaattgtatggagatggtcaacttcatggtgaaaacgcacaatgaaaggcttagtcgtttgctcgttgcgataaccgtaccgatactgtaccgtggcttccggtacagcctccttgatttcaatggtgaaattctccggaggataaatgaaccatcactccatggtaattaaattatagaaagatggaacaacttttttaacatgtggattcggttgttttagttaatgttcatgtttatggtgattaggatatactgatacaacgacttcttgctgcggtactggatcgatgaatgcatacgggtgcggttatagtaacgtgcatgccaagctctgcagctaccagaaatcatttctgttcttcgacgggcgtcacaacactgagaaaaccgatgaagagatcgctaatctgttttattctggagacaaacatgtcgtgtctccggtgaatataaaggatctcgtaggtaaagcagcgaccgatcttcttgcgcaagaaatctagaaaccccaatcgtgttctgttctgtttctttgaaataagtaaatggttgttgttgtaaactgtaaaactctgtattcaacttcatatatatatgatgataaagaaaaaataaaccgttta

SEQ ID NO: 151327 - DNA, 1228 bp, Arabidopsis thaliana landsberg
gtctaacgatacatccgacaacccgaaaatgaccgaattggcacagcaatcagagagtatggagcctggaatggctaagaacgttatgagcggattcaaacccgaagttttaccagtttacaccgagttagcgaacgagttcggagttttcgatcgatggttcgcatcagtaccaacttcgactcaaccgaatcggttctacgttcactcagctacttctcatggatgctcaagcaacgtgaagaaagatctcgttaaagggtttcctcaaaagacgatctttgattcgttagatgagaacggactcagttttgggatttactaccaaaacattcctgcgacgttcttctttaagtctcttcgtaggcttaagcatttggttaaattccatagctatgcgcttaagttcaagctcgacgctaagcttgggaagcttccgaattactctgttgtggaacagagatatttcgatatcgatctttttccggctaatgatgatcatccgtcgcatgacgtggcggccggtcaacggtttgttaaggaagtttatgagacgttacggagtagcccacagtggaacgagatggctttgctcattacttatgatgagcacggtgggttttatgaccatgttcctacgccggttaaaggtgtgcctaaccctgatggtatcattggacctgacccgttttactttgggtttgaccgattgggtgttcgggtccctacttttctgatctctccttggattgagaagggcactggtatgtgatttgttaatttcttcttttacacttttcagactctgcttggataactgagtttatattgatcttgaatattgaaaatttcatattcagcttgatatttgaaattattaatcttgtgggaattgcgcatgatttggtttggactaatttccacttcttaggcagatcacattgttcatgttaaatcccattggttttggttctcatttcttctcttcaatctttataattctgtctttgtggttttgataagactggtgttgggatcgattttgtttcagtgatacatgaacctgaaggtccaacaccacattcacagtttgagcattcttctatacctgcaacggtgaagaaactcttcaaccttaagtctcacttccttacaaagagagatgcatgggctggtacatttgagaaatacttccgtatccgagattctcctcgccaagattgtccag

SEQ ID NO: 151328 - DNA, 999 bp, Arabidopsis thaliana landsberg
aaaatatcggaaaaggaaaaaagttgctctcgcttcaggttttttatttcccgccaattatttcgacaaaaatggctcctaaatcggataacaccgaaggtataatgatataatctctgaaaaaaatctgctagttctctttgatcttattcctcattttgatttctctcttatttacttgtttcctgaattttttatttctgcagctatcgtactcaactttgtcaatgaggtaagcacttctctgcgattctacatttttgctttaattctaaacggagatcacaaacagatacgaccataaaaattagaattcgaatttgaaattgagtctaggttaaggtacgcagtgatgttcacatgattctgaatctgggaatttaatcacttgggtttcaatttgtgctataagtttacacatgaatttttcgtttgaagctattgatattgactaggttttaaaaattgattgatacaggttatatatatatatatattgcaagttttgtttcaatctgttgtattattgttgttagattttgatgaatgtgttgttggtacttttttgatgcagcaaaacaaacctctaaacactcaaaatgcagctgatgctctacaaaagtttaaccttaagaagactgctgtgcagaaggcacttgatagtcttgctgatgctggaaaaatcacgtgataagagtatggtaagcagaagatatacattgctagacaagaccagtttgagattccaaactctgaagaacttgctcaaatgaaagaagacaatgccaaacttcaagaacagcttcaagagaagaagaaaactatcagtgatgtggaatcaggtgtgaaaaaactactttttctcagtggttttgaggatgtgatatagctgcttggataatgttatgttctgtgatgttatttgcagaaatcaagagtttgcagtcaaacttgacactagaagagatacaagagaaagatgccaaactaagcaaagag

SEQ ID NO: 151329 - DNA, 1259 bp, Arabidopsis thaliana landsberg
  unsure (1)..(1259): unsure at all n locations
gatgaacaacggcttcttgtgtatgagtttatgcacaagggtagtcttgagaatcatctgtttgctagtgagtctttgatctcgtccatgttttgtgaaactttgagaggcagtttgttcttatgtttgaatgatttttttgaagatggaaataaggattttaagccgctatcttggattctacggattaaggttgcacttgatgcagctaaaggtcttgcatttcttcatagtgatcccgtcaaagtcatttacagagacatcaaggcgtcaaacatcttactggactcggtattcttctctttcgatgtctacttgttgtctttatcaacgacttaaaagatactgagttttgtctttcaaacaacaggacttcaacgcaaagctttcagactttggtttagcgagagacggtccaatgggagaacaaagttatgttagtacaagggtcatgggtacttttgggtacgcagctcctgagtatgtctcaacaggtacattctgtcactaagatatgatgcaagtaataatggttggataagaaaatgtaagactgttgcatgatgcctaacactggtttttaatgtaaatttgaagatagcaactataaaatttatgtggttaaaggagcatatgggttgatagctagtttcgttctctcatctttctatcttttttnnnnnnnnnnnnnnnnnnnnnnnnnnnnnnnnagtttcggggttgttctgctagaactactatgtggaaggcaagcactagaccataaccgcccggccaaggagcaaaaccttgtggattgggctcgaccatacctcacaagcaggcgaaaggttctactaattgtggacactcggcttaactcacagtacaaacccgaaggagcagtgagactggcaagcattgctgtgcaatgcctatcattcgaacccaaatcacgtccgaccatggaccaagtggttcgagccttggtacagctgcaagacagcgtggttaaaccggccaatgttgacccgcttaaggttaaggataccaagaaacttgtgggattgaaaacagaagacaagtaccagagaaacggtttaaacaaaaaaaccgttggattgtagtaggtagagggaaatataaggttacttggttaggtactcttcatgtcttcttcttgtgtattgtaatattgtgcgaagtgattttgacattttgtaacactgcttatagttttgctcctgaaatattcgatttggagatacttgttttctctc

SEQ ID NO: 151330 - DNA, 2344 bp, Arabidopsis thaliana landsberg
ttaggcaacctcttagacaacaaagcgtgcaccaaaacttctttattgaacaaattcccaaggagatcaatcacgcacggctcagccaaaggctcgttagacaaagcacaattcaaccatttggagagcctctgctcattaggatcaaccttgtcaggtttcttctccgcgtacatattgagatagcaatcgcgagactcggctcccgttgccccaccatctcctccacctccacggaggcgagggaaaagagtgagcatggatacagaaggaagcttcgatacttggatccgtgtagagccattcaaaagcttcccatctagagtaatcgagcaagccgataacgatatacgctgcgacgattcgagtaaggaagtgatacccgaaagagttaatagagattgcgcaggatccaattgcagagcgacgactttttgacagtcaggagatttaacgaagatctggcgccggatatgcatggtggcggagcaatacgaagagctctaggtttccgatcaattttggtcggtgattagaaattaaagggtcgaggagagaggtttgaaaaaaaaggtaaccaaagtaaagtttgtgtgttatatattagctggaccgacttataaatcaagtggaccactttaaatttggggctttgagctttataatttctctgtgggtttgggcctttcatttactttgggctgttttctctcaaatacaatgtagtggaataattgagctataattatttttttaatgtttttgtttttccattcccataaaacaatttgtaaaatatgattaaattcaaattggaaacattttaatcattcgaaaggacaaaatgttttataaaatatgaaaattaaaaaattcagtaaataaattaaagaaaaatgtaaaaatggattgtatttgattaattagagaattagattttaggataattttaagaacaaaaacaattatacaaagaggccggcgacgtacgacttttgtgagataatatgtgaaagattcgagatacttaatattctaaaatatttatgggagtaatgaaagaacaaatgaaacggccagtaaattaaaaaaatagaaatcaaatttttttgaaaagaataaaaacaggggagggaacagaggaagaaaccccaagaagagaagaagagatggaaaatggaaatggagaaggaaaaggagaattcataaaccaaaacaatgacttcttccttgattccatgtcaatgctctcctctctccctccttgttgggatccatctcttcctcctcctcctcctccgccacaatctcttttccacgctctagccgtcgacgcccccttccccgaccagttccatcatcctcaggtaccaaaactattatcttacatcataactcaccaaaactaagaatgtttctgatccttttctgtgttgttgttgttgtttgtcaatgcaggagtcaggaggtccaacaatgggtagccaagaagggttacagccacaaggtacagtgtcgaccacgagcgcacctgtggttcgtcaaaagccaagagttcgagccaggagaggccaagccaccgatcctcacagtatcgctgagagggtatctcattgttcacttcctccatatccttcttctcttatcttgtgtttctgattgtatggttttgtacagcttagaagggaacgcatcgcagagcgtatgaagtctctccaagaactggttcccaacaccaacaaggtattcactactttcctaatttatgaatcttgtttggatttgcataataaccgaattggttgatggtgagatgcagacggataaggcatcaatgttggacgagatcatcgagtatgttaggttccttcagcttcaagtcaaagtactaagcatgagcagattgggaggtgcaggatcagttggtccacgcctcaatggtctctccgcagaggtcagtttcttagtcccttatggctttcaacatatgtatagtggcatcaccaatcatcatcaatcgtcatggtttttggtaatgtaggcaggaggacggctcaatgccctcactgcaccgtgcaatggcttaaatgggaatggaaacgctacaggatcgtccaatgagagcctaaggtcaacagaacaaagagtggcgaaactgatggaggaagacatgggatcagcaatgcaataccttcaagggaaggggctttgcttaatgccaatatctctcgcaaccgcgatatcatcatcaactactcactctcgtggatccctctttaaccccatatccagtgctgtagcagaagaggattcaaatgtaacagcaactgcagttgctgcacct

SEQ ID NO: 151331 - DNA, 1729 bp, Arabidopsis thaliana landsberg
  unsure (1)..(1729): unsure at all n locations
gcattttatgctggaacccaagagaaatgctttttttatttttttatgatgtcaacctcggtttgacagcttacctcattggaaatatgaccaacctcgtcgttcattggactagccgaaccagaacctttgtaagtttgatcactttcttttagtctaggcatgttcatttcggataaaggttcgggtaatagcgtggggtttacgtacttttgagtattttaagttgactaaaataatattgagtattactaatctgtaatgctttattgctttgtgttaaacagagggattcagtgagagctgcttcagagtttgcttcaagaaatcaactcccacatgacatacaagatcaaatgttatcacacatttgcttaaagttcaaaacagagggcttgaaacaacaagagaccttgaacaatctgccaaaagcaatccggtcaagcattgcaaactatttattcttccccattgttcacaacatttacctctttcaaggagtttctcgtaacttcctctttcaattggtaaaattctattctctaaccttttttcttaacgtttaatatgtaagaggtgaccaactccatgtaccttttcatgttcaaggtttcagatatagacgctgagtatttcccaccaaaagaagatataattctacaannnnnnnnnnnnnnnnnnnnnnnnnnnnnnnnntcaggagcagtggtgagtgaaatatatcggttatatgtaaatatgtgaataaaagttaggaatcttgtaacattgtgtattgtacaggacttcactgtctacgttgatggacatgatcagtttcaagggaaagcagtaattggagaaacatttggagaggttggagttttatactataaaccacaaccattcacagtaagaacaaccgagctgtctcaaatactacagataagcagaacatcgctgatgagtgcgatgcatgctcatgctgacgatggacgagtcatcatgaacaatctattcatggtatgtgagttattatagaaatgtttctatagttaaaacaaactctaaactcatttttggctataaaactttcagaaacttatagggcaacagtcaatagcaatagatgattcgaatactagtggtcacgaaaacagagatttcaaaagcatgggatgggaagagtggagagattcaagaaaagatggctatggtttagatgttacgaatccgacttccgacactgctctaatggatgcgatttacaattaagatactgaaatggttaagaagaggcttaaggaacaaaagatagagagagccaaagaggaaagatctagtagtgaaagcgctggaagaagttacgctaacgattcatcgaaaaaagatccatattgcagctcaagcaaccaaatcatcaagccatgcaaacgagaagaaaagagagttaccatccacatgatgtctgagagcaagaacgggaagttgatactcgtaccatcatccatagaagagcttctaagacttgcaagtgagaagtttggaggctgcaacttcacaaagatcaccaatgnnnnnnnnnnnnnnnnngatgatttaaatgtcatttgggatggtgatcatttgtatttttcatcaaattgagtttgaaaactcgacttcatttatagagcatgtatatctgcagacaatgtatttttacccggtttcatagaaaagtctagattatcaaaagcagagtatacaa

SEQ ID NO: 151332 - DNA, 459 bp, Arabidopsis thaliana landsberg; identical to SEQ ID NO: 73529

SEQ ID NO: 151333 - DNA, 780 bp, Arabidopsis thaliana landsberg; identical to SEQ ID NO: 2043

SEQ ID NO: 151334 - DNA, 1070 bp, Arabidopsis thaliana landsberg; identical to SEQ ID NO: 34576

SEQ ID NO: 151335 - DNA, 2185 bp, Arabidopsis thaliana landsberg
gtttgtcatgcgaaagtatctgcttttattcgttatgcaatttttgagatgaagcgtggtggtcaggttaaggtggctagggaggtttacgaacgagcagtggacaaacttgcaaacgatgaagaagctgagattctctttgtatcgtttgctgaattcgaagaacgatgcaaggaagtagagcgggctaggtttatctacaagtttgctcttgatcatattcgtaaaggaagagctgaggagttgtacaagaagtttgtggcgtttgagaaacagtatggagataaggaaggtattgaggatgctattgttgggaagaagaggtttgagtatgaagatgaagtgagtaaaaaccctttgaactatgactcatggttcgattatgttaggctggaagagagtgttgggaagaaagataggataagagaaatctatgagagggctattgctaatgttccacctgcccaagagaaacgattctggcaaagatacatttatctttggtgagttttttctttctcaatttggtttaatgatttttggcaattacgcattatcgatttagaattggaatgttggcttcttatattgatcatggttttgataagaatgctaaaatgtttgagattggttgtcttaggcagatgttagttctatcatatatgtcaagcttttagcacatccaagtcattaaatatatgagacagattcttacatttcatggaaagctattgcttttgtattttattagcttatggttctgcggttttctcaaatactaatactgatgtgactaaattgtgtaggattaattatgctttttttgcagagatggtaactgaagatgtggagagcacacgagatgtttacaggtaattctgaaactctttccattcatcttcttttcactcgcggcggattagactaactgttttcatttgtcttaccaaactttacagagcatgcctcaagcttatcccccactccaaattttcttttgccaaaatatggttgctcgctgcacaacatgaaatcaggcaattgaatctcacgggtgctcggcagatactaggaaatgcgattgggaaagctccaaaagataaggtaagcctaaaaatcgtttaaactattatctcattccattcctttaaggacacaaatagttttacttactgtggtgaactttttcctgcaaatagatattcaagaaatacattgagatcgagcttcagttgggaaacatggataggtgtagaaagttatatgaacggtatcttgagtggtctcctgagaattgctatgcttggagcaagtatgctgaactagagaggtctcttgttgaaacagaacgagctagagctatttttgaacttgcaatatcccagccagctcttgacatgcctgagctgctatggaaggtaagtttttcagtcgaatacattcatagaatcgagattcctcagacttttgaaaccgattggataattgaaattctatattgtttgtggcaggcatacattgattttgagatatcagaaggggaattagagaggacaagggctttatatgagcgactcttggatcgtactaagcattacaaggtgtgggttagctttgcaaagtttgaagcttctgctgcggaagtagaggaaggcgagtatgaagatgaagaccaagaagaagatgttattgaacacaagaaagactgcatcaaacgtgccagaggtaactttaaaactacacattatatcagttttgatgattccttgcggacatgttttaactgtttattctctgtatatttcttctactcagcaattttcgatagagccaacacatattacaaagactccacaccagagctgaaggaagaacgagctacgctcttggaggattggctgaacatggagagtagctttggtaacctcggggatgttagtattgttcaatcgaagcttccaaagaagctcaagaaaagaaaggcgatcactagagaagacggctctacagagtaggcattacatacatataatatctcgactattatcttttgaatgttaaagctcaatgtgaaaaaaaaaaattggcaggtatgaagaatactttgattatctgttccctgaagaatcagggacgacgaatctcaagattcttgaagctgcttataaatggaagaagcttaaag

SEQ ID NO: 151336 - DNA, 2985 bp, Arabidopsis thaliana landsberg
atggctcgaacttttatcttgtggcttcacgggttgggagattctggacctgctaatgaacccatccaaactcaattcaaatcctcggagttaagtaacgctagttggctcttcccttctgctccattcaatccggttacctgcaacagtacgttcttccttttctatttttgatttgcattcatgttattgatttcgttgttcatggtttatggtttgatttgggctatagggtttggtctcctcttcattccattttgatttagcattatttgcctctgtgatgtgaaggagatttgtcacattctgttcatttgaatgacattgagtcaaatgtacacagtttgatcatttctctgtggtatctgttggtgtcatgcctcttaatccatatgtgtttgaaaaaatcttatgtctttctactctttcttgtgcagatggtgcggtgatgcgttcttggtttgacgtccctgaacttccttttaaagtggtattactttacttcactcttgatctatctaacgtctcttatagtatgaattggcaaatactttgtggactggtagctccaagttaccacctttttgtttgttaaaccttatgaggcaatatctacaatcagcacttgttcagcagtttgtgtaaagaacagaccactcttgcattttcaagagattttatgaaatcacaataagtgtgcaacttttatgtatgttagggctctccaattgatgaaagcagcgtgcttgaagcagttaagaatgttcatgccattatagaccaggagattgcagaaggaactaatccagaaaacgtgtttatctgtggattaagccaaggaggttgtttctcttttcatgaattctttgtcttttcaatattctttgtagagagacctttttatatcggtctgaatccacttatgtcttaagaaccttgcattgtggcgcctaataagaattttcttgtaggagcattaaccttggctagtgttctgctttacccaaaaactcttggaggaggtgccgtcctaagtggatgggttccattcacttcttcaatcatcagtcagtttcccgaagaggctaagaaggttcctcacttatgttttcttataaacattgataaaagttttttatgtttctgaggcttcggattttgcaatatgcagacaccaatcttgtggtctcatggcactgatgacagaatggtactctttgaagctggtcaagctgctcttcctttactcaaagaagccggtgttacctgtgaattcaaggtataacaataagaactcaaatcaaacactcatatatttgctcatataacagagcagtcaatactgatcacatggaaagatcttagaaaccgattcttggaaatgtatatctaaagagagttcgtttatctgcaggcttatccgggtcttggacactcaatcagtaatgaggagctgcagtatctggagtcatggttaaaacaacggatgcagagctcttcttcttcttcataaaatggtttttaaaggcaactttgtactcaaggtaacaacatcctagtacctatcaagattagaagaaaaatgataacatcagctcatctctggtccaagtttctctatcatgaaaaccggttctggttgaaccaatcttgtttggttatgtaaaccgttacttttgttaactacaacattttgcgtactttgcattgatttgaaaaattatatgtcaacactagaattcttttatttagtcaacaaatcaagtgactacataactcgaattgtgttcaaaatgcaaaatctgaccaaaacaaaacctgcatatgttcactcaaatttacagtttttgtcgggtaaatagttaccaatgacaattgtttacaaatttttgtgaaatggtgtttccgtaactataaaaattcaattatttatcgtagaaaagaagacaaagaatcatatcataataagtcaccatatacaaacaacgatctgagattctgaataatgaagttttagcatatatatggtcgacatctaagtttgaaaccatataaatagttaaatattattagatccgaccaaaaaaatccaaatgagtttgcatggtctgttgatagtacagggttattttcgtcaaaacacataatttcccatttgcgcccatattatctctttggattctctccccaagcacccaccgactataagtgattttcaagaattaccctttcaccatctcaaatattacagaatcttgacactatagtgacagctagaaataaagaatctgagtccaaagaaatattcaaatttgatttgatctagcccgctaatatttgtactgtactgtatatttttatagtgctttcaattagtgcaatcattaggaatttgattatatagatcacgtgtaatgtaaattaaaatttgcaattttagacaatatagtaacaagggaaagataaataacaattatacgtgcatgaacttgttatgattattgaaatgctggcattgggccgttggtgatggtcctaccaaagagaagtctattactttgttaatatcaatcgaatctatcaattcttgtgactccaacaacaaaactctaatcatcttcttttgaaacaaaccaaatactaacaaaaatttcgatctttcaatttgaagttcaaggttgtattgtaacaagggtcaaagtttaactttctcgtgacaattatcgaggcaaagatattggatattgatactattttttgaaatatatacaaagaccatagtccaaaatagtaattcttaaaatatcacatgtgatgggttttttcttcttgcattggtcaaattgaaatcattatatttggattgcagtctgtgcatgaacagttttcagttgtgttatataatacatagtttttattcatactactgtataaaattttcagaataaatttgaagtaaattagtttcaaatcgaaaattaaaac

SEQ ID NO: 151337 - DNA, 983 bp, Arabidopsis thaliana landsberg
ggctgctgctattgtcctagagaaggagctggagcaccagctttcgctattgcagttgtcttggcttgcgttgtgagttttcttctcatcttcgtttcctcttcagactctgtcttacaaatgccattacttgaacctcttacaaagtaactgccagtgtagaaaagagattttttgctttcattgtgaacagcctatttggtttcatagtatgaccaatcttttgtatgtttctgaattgggctgcaggttatgtatgatgcctctggtgtcaggcttcatgctggtcgtcaagccgaggtatagctatggaaaagttattaatctcatctgttttcatcttcttttatagccttttagtaggattattgttccatgctttcttaaaccgcaagcctttttcacttgattggaaatttcagctgctgaatcaaattgtttgtgagtttcctccggagcatccgttgtcaacagttagaccattgcgtgaactgctcggccacactactatccaggttatctatactcaccagtcatttctttttatcattctaatcattaaacatttttaagtccaatgactatgtcatagcaatgttagaattagacttggatttcataaagctgaaacattataactgaagcataggatgttacaatctattgctaagttatgagtttgaattacaggttgcagcaggtgggattttaggatgcgtggtagcttacttaatgaggagcacaagctagtcagtctctacacaagaacaaatcccgaattcttttgaaatcatagacccttcaggtactaagatagattcagcgatcaagtgacgctagattattggagtaaatggaaattgttaaatctgtgtaatatatagataatcttagttagacttgtcattgtttaagcttactccttctcaacatataatctctatatatatatatatataatctctctatttcctcttcctcct

SEQ ID NO: 151338 - DNA, 2159 bp, Arabidopsis thaliana landsberg
ttccaataacaccacttgatgaactgtaaattataccgttgtttctgtttcggggtaaaggcaagtaattccagtccttaactcgacttgtatagccggaagtgggaccaagttctcaacgtaaggagatataacagaaatgtcttcagggaggctttggagtttgtctttctctgaaatatacttgaacaacaagccttcatcgtcatagaagagaacatccccttgcttttgcttaaagagagtcacgggtgtgaaggacctagactcctcgataccaagagaagctaaactaatggagtgagtcttgctccatgtttctttttgtccatccatactccatatctctagctcgaattggtgaagtggatgggagacaggcatggctatggcaagacgatccccagtgttgacaatctgtgcttcatacatgatgcccttgggaagaggtggacgtcggacatcatggaactcttccgtgtggaggtccaatatcgtgtagagatgatcatgcctaatttgtaaccagtagattgatccgttgacacacgccgattttctaccgacatcatcaaccttgtaacgacgtggtttccaaagtctccgccattcaccagtgttgacatcaaggatatcgcaataggtaggatcacggaagatcctcactactttatagctacccttaacattgtctctaccgaatcccatcgcacaatatcccgggaaatacgtcgtccatgattctaaatatatatttcagatcatatacagtatgcatgatcctacaaaaaaaaggacgacttacatatgcgttattaattataaaaaaatctatagtccaattatttaattatattgataattaagggagcatatgcgttattataaattacaacctaacctactttaccgacccaaagcctaaaacaaagctgacattcttttgttttccctctctctagaagttcctgttttcatcttcttctctctctagcaattcaatctcgacttcgcttttctggcttttctgggaattttgatttatttgcccccatcgttcgcttgaattacgaatcagatatcgccgatcgtcgtagatctgcgttgatattgtccggctgagtaaacagggtgaacaaaaaccaaaaacagagagggggtttaaaaatcctgaagaaaatcgcatgaatttgtttggaagcctgattttttcatcttcgatttcgagccacttcacgacttgtcttctcatctttattcttcatttctctccccagcttaatagtaataataataataataatagtaatcgtaattccaataatctcgagagtaatcgtttgatcaattgaaaaaaaaatcatggagtccaggaaaaactctgatcgtcaaatgcgtagaggtactgttttcttcaacctccatcgaaaagtctgttacttttttgtgaaatcgcttacggattgttatcgttgatgtataggaaggatctagggttcttactctagattataatctgggtaatttggtttatcaaacaaaatttgattttttttttaatgggtcctcaattttatccctcgtgctgaattctctgtcggtgatttgattccttcgtggcgtttactagtttggatgtatctgctgattgccacaagttttgtttttgtggggttgtttaattctgataatcactattgtttctttgttagaagaattgatactttattggactttggacggtcgttaattcgtgtgctttgctttcatatagctaattgcttttcagctggcgagaggatgaagacaaggtcgccctccgtgattgtgatcggaggtggtttcggtgggatttcagctgctcgcactcttcaggatgcttcctttcaggtttgtgatgtttcatgttttatacaatatatcctgatagctgattttgatatctctttctcacggtgtggttcttggtgtttaggttatggtactggagtcccgtgacagaattggtggacgagttcacactgattactcatttggttttcctgttgatcttggtgcatcatggtaatctcacggctctttcatcctgtcattagatgatgttttggttttggtttttggttaactttaggctaacacagcaacatcgttatgtcaca

SEQ ID NO: 151339 - DNA, 964 bp, Arabidopsis thaliana landsberg
ttttgctggtaccatagctttcatgtttagttttgttgtcatgaacgttttatggttttgtatggcgcagtttggtgaaaacaacttaacctcttgtcctttgtaacaggtcgcagtcaaaatgatacaaacttgttccctgatgtcgacagtacctggaaagtatgtttctccctatctgtttatctacgttttgctttatctgaggactattgtttgtttcatttgcatgaatttccttggaatgaggtttacttatataatgcttgaattctcttttggccagacgtttaacgaactacagaaactgatcagtaagacatatggaaaagttgttggagacttgatgacaccgtctcctctcgttgtccgtgattctaccaatttagaagatgcagccaggtatcttcttctttatgttttcgctttgcaaacattaatttgagaggcttaggaggaatgagttcaataagatttttctggggacattataagcaacgttcttacaagaactgtaaccatttggtcttcaggttgcttctggaaacaaagttccgaagattacccgttgttgatgctgatggaaaactggtaagcatcccaattcttcttctttctgcagtttgattttggtctgatcttttcagtttctaaacacttctttttgctttccgtgcaagaagattgggatccttacaaaggggaaacgttgtaagggctgcgctgcagatcaaacgggaaaccgagaactctacatagctaggaagcagcagtgatggagcagatctgaatctgccatagttaatagcgaaatctatttattccattgatataagtatatatgtaaccattctctgtcaattttcggttttcagaagcaatttttgttactttaggagtaacatttctgagactcggaactgaagacaaatggtatatttgatacatatatgtttcttgtagc

SEQ ID NO: 151340 - DNA, 1461 bp, Arabidopsis thaliana landsberg
acaaaaccgtttgataaaccggatcactttttatttatcattcacaaattatagtccgtaacggtacaaactcaaaaaaataaaagaaaaccgttgtagactaactgtggaccgtttttaaactaaatccacaacggtttatagtctgccctaaaaataatatggattggattgctgacggattaagtccgtattaactacatcatctatttaaagcaaaaaaatttaagatgattaaaaaaataatgaagatgatttttattatgtgaaaaaaataaaataataatttattatgtttgacaggttttccggggaatgtgacggtgaaagtgacgtacatgttgatcggagaaaacaaactcggtgtaaaaatggaagcaaagccactcaacaaacctacaccaatcaacttagctctccacacttactggaacctccacagccacaactccgggaacatcctctcccacaaaattcaactcctcgccggaaaaatcactcccgtcgacgacaaactcatccccaccggcgaaatcacctccattgccggaactccttacgattttctcgagcctcgcgagatcggaagccggatccacgaattacccggaggttacgacatcaattacgtgatcgatggaccgatcgggaaacatctgaggaaaactgcggttgtgacggaggaagtcaccggaaggaagatggagctgtggacgaatcagcctggtgttcagttttacacgattaatatgatgaaacgtgtcgtcggtaaaggtaaagccgtttatgagaaataaggtggcttgtgtttggagacctcaggctttcccagatttccgtcaatctcaagaactttccgtcgcagattgttaaccccggcgagagttatttgcatgttatgctcttcagattcactgctcactaatcgggtcgggtcggctttttagggtttaatttttccgaatactcgccaacgtcgttgtaatgcagaattgcaaatgccaataacaatattcgacttttgcagcaaaataatttgttaaaagttgttcattctcaatggttcgattcgaagattgttaacaagattatttttcacaagaaagttctaaatgtttaggacgaaaacataaaacggtttcaggtttttttaaggaactaaggaccagagctggtagtagggggcttcttgaactcaatcttgtcgactttaacttctccatcaattagctcatagacatagactacagctcggaaaccatcgatgtccataaggacaaagcttgggttaacgtcttggtttatgctgctgtaagctccggttgctgagccagggtttatcaccactcctccctcgtgtttgtaggctgtgaactggtgggtatggcctgttacgagaatgtcgacgccgagttgtctctgaagcatggcgagtgagtctagatcaccccatgggatcac

SEQ ID NO: 151341 - DNA, 1771 bp, Arabidopsis thaliana landsberg
ccgctttgttctcttttctcttcctcgccactttctccgtcgttcttaactcctctcgtcatcagcctcatcaggatcatgtacgcatctctcaatctctgagctccttctttatttctctgcttttgattgattttgtaattcgaacaaatttagaaatgaatcggtggcaatttcattgaatctgagctttgatttttgctgtctggtttttagacattgccgagtatgggcaacgcatatatgcagaggacgtttttggctttgcaatcggatccattgaaaactaggttggatctgatacacaagcaagccattgatcatttgacactggtgaatgcgtatgctgcttacgctaggaagctaaagcttgatgcttctaagcagcttaagctcttcgaagatttggctatcaacttctcggatttgcagtcgaaacctggtttgaaatctgctgtgtctgataatggtaatgctcttgaggaggattcgtttaggcagcttgagaaagaagtgaaggataaggtgaagacagcgaggatgatgatcgttgagtctaaagagagttatgatacacagcttaaaatccagaagttgaaagatacaatctttgctgtccaagaacagttgacaaaggctaagaaaaacggtgcggttgctagcttgatttcagccaagtcggttcctaaaagtcttcattgtttggccatgaggcttgtaggagagaggatctctaatcctgagaagtacaaggatgctccacctgacccagccgcagaggatccaactctttaccactatgcgattttctctgataatgtcattgctgtgtctgttgtggtgagatcggttgtgatgaacgctgaggagccatggaagcatgtcttccatgtggtgacagatcggatgaatctcgcagccatgaaggtgtggtttaagatgcgtcctttggaccgtggtgcccatgttgagatcaaatccgtggaggatttcaagttcttaaactcttcctatgcgccggtcttgaggcagcttgagtctgccaagttgcagaagttttactttgagaatcaagctgagaacgcaactaaagattcacataacctcaagttcaagaaccccaagtatctctcgatgttgaaccatctcagattttacttaccagagatgtatccgaagctgaataagattttgttcttggacgatgatgttgtggtgcagaaagacgtgactggtttatggaaaatcaacttggatggcaaggtgaatggagccgttgagacatgttttggttcttttcatcgatatggtcaatacttaaacttctctcatcctttgatcaaagagaactttaaccccagtgcctgtgcttgggcctttggaatgaacatattcgatctcaatgcctggagacgcgagaagtgcaccgatcaataccattactggcagaacctggtaagtccattgtttaactatgtaatgtatgattcttccttagtaacctagacatgtcaaagctcttttaggtacttatcttctgttggttcttatgttttccgagcagaatgaagacagaactctctggaaattgggaactctacctccgggattgatcacattctattcaaagacgaaatcattggacaaatcatggcatgtacttgggttaggctataacccgggagtgagcatggacgaaatcagaaatgcaggagtgattcattacaatggaaacataaaaccgtggctagacattgcgatgaaccaatac

SEQ ID NO: 151342 - DNA, 4093 bp, Arabidopsis thaliana landsberg
  unsure (1)..(4093): unsure at all n locations
atgagtaaaaaacatacatcaaacaatgagaatattgattcttcatccaatccgccaaaaagaagcagattcgatcacttatattttcaaagcattaggatgtctcagtggaattcaccttcgtctcatggttctgtcccccttagctatgttttaaacacagtgcagcgtgatgtaagcaccacctctcagttacacaattcacctaatatatctgcgagacgaagacaaatgtcaaaaggtataaaataggatatgtacctgataaagaccaatttttatcaatatatttcaactcattctactgaacattacctctcatttaaacaggaatgccacttggatctcagattccgtctgcatctccaatgtcaagcataagtatgacatgttctactccttttgtacttagagatatcaccaattcatccgttgggccacatggcagaatgggtggcacaccgcttacgtgtccagagactgaaaaagacagagaaaaggttagtaactgattattcaaactgtgaatattttaatacatgtggtttatgctatacagttttcgcttataggcaaaaaaaagtatcaatgattcggagtgcttgacccaagaacaatcatcatgtgtcaacaccagtagacttaacatgccaaggaaaagtctgcacatagattttgctagagcaagttctgaatctaatgctgaaggtgaatgattatctataagtattcttatatgtactaaaacctagccaactctgtattttgactaatcatctacttaacattatccagtaaaactatcaagcacaactgtagatcacaatagcagtgatgaagaaatgtatgatgagacgaacggtatcaatctcaatgaggaagaggaactagaacaaaactatgacataagtagcagtgaagatgatggttcaccaatcaaaatacagagaatggatttggatgaggcacaagacatgggaacttgcccatctgtcttatctaatgaagctattaccctagaacaagcattacagggtttcataggtcaaaagagcggattatcagaatcagtaaagataaagaaaacacgtcggaggactacaaagagtatacctttaagtatggaatccgactattgcttataatttacatgccttttatatagacttattaagaaggctattgattatggttatttgtttctcagcttatcttgatcatggcgatcctacctatcagtgtaaatattgtggtgcattgatgtggtatgatgagcgaatcaacaaaaggcgcaatctaaaagaccctatatttacactttgctgcggacaagggtcagttaaattaccttttcttgaagagtcaccagagttagtaaagaaacttcttactgctgatgatgcacagggtcagaattatagaaaacatgctaggatatataacatggtttttgctatgacctctattggcggaaaagttgataaatctatgccaaaaggtcaaggacctagcatgtttcgattgcaaggaggtaactatcatttgataggcagtttgaaaccttctgaaggtgattatgcaaagtggataacagagctactgtaatcaggttagcattctcaacaccataatgttgtttgtataagcaatgatctaacaagtttggttcttttttgttaacatattttatggtctttctgtatttgtagaaagggaaatgatgcaactaaaggaggttgtaaggataatctgaacaaagaaacaattgctgccataatggatatattaaacaaagttaatccatatgtgaagaatttcagaattgccagagacagattcgaagctgctgactgccaacctttccataagagaatagcaagtggtcgtaaggagaaagatcaaaggacttacattaggcctactacatcagaggtagcagcattaatcctaggggatttcgaaaatgctatgccatgaccgtgatattgttattcaagaaaagacatacatgtcaccttactagaattagtccaatttatatttcctatctagctttgcaatatcctctaatattctgctatggggaagatggttttacccctgggatagagaaatgttacaaaggaaatggcgaatagaagaagaaaacatgcatcagtatgcgtcagtggtttgcattcagcattcaagagaagccaggagagtgtcataccatgctactatccaagagactatttcagcagtttctttgtgacgcttacaccaccattgaatctaaccggctagcttacataaagttcaatcagtcaaagataagatgtgacaacttaaactccataaaagaagctgcagattctggtgtgacaaatttagaagacgaagggaatcagcttttgattcctaaatcattcactggtggaccacgctatatggttcaaagttattatgatgctatggctatatgcaaacactatggatttcctgatttatttatcacatttacatgtaaccctaagtggcctaagataacaacatatgttaaggaaagaggattgactgctgaagataggcctgatattgttgctagaattttcaagatcaaattagattctctcatgcatgatctaactgagaagaaaatgcttcggaagactgtcgcatgtaagttaatttatttatgtatcattctgtacttaaactgttgatatcatttacttataataaatattgttttctgatcgcagtaatgtatacagttgaattccaaaaaagaggccttccacatgcacacatcctttcgtttatggactctaaaagtaaactgccaacagctgacgatattgacaagatgatttctgcggagattccggataaagaaaaggaacctgagctatatgaatttattaagaactgcatgattcatgggccatgtggtgcagctaataagaattctccatgtatggccgatagcaagtgttagaaaaattatccaaaaacgtttgaggagataaccaaggttggtaaggatgggttttcagtctatataagaaggcaatctgataactatgttgagaaaagtggttttagatgtgataataggtatgcggttccttacaataagatattgtcagttcgatatggtgctcatatcaatgtggagtggtgtaatcagaatgtttctattaagtacttattcaagtatataaataagggtccagatcgatttgcatttgtggttgagcctgataagccacaaacaacagagactaatgagaatgtcaatggcacagcagctggtgaagaacccttaccaactgagaaaaagaaggacgaaatcaaagattannnnnnnnnnnnnnnnnnnnttatatagtctttcccagctttgcatttatataaattgtcccgatatcgaatttatagtttatttcttttctatattacaatttcagatatgtatcagcctctgaagcagtttagaggatatttaagttcccaatccagcatagatcaactcctgtgcaacagctatcatttcatgttgaagggaagcaaccaacatttttttaaaaggaaagagtctataaaagaagttttggaacgtattgccaaccaagattcccaattcatggcttggttgacattaaacaggaatgatgctgttagtaaaaatggagaacgtgcacgtgatctcttatatgcagacatcccagcgtattttacttgggatggaataaataaaatgtggaacaaaagatcaagaggatttttattgggacgtataaattatgttccaaggaaattagaagatgaatattttctaagagttatgcttaacattgtcagaggtccaacgtgttttgctgatatcaagacctacaatggtgttgtctactcatcttataaaacagcctgttttgctcgtggtattcttgatgatgaccaagtttacattgacagtttggtggatgcaagtcaattctgctttggtgatttcttgaggaatttctttgccatgctgcagctatctgattcattatctagaccaaaatatgtttgggaacagacatgagagttattatcacaggatatg

SEQ ID NO: 151343 - DNA, 1101 bp, Arabidopsis thaliana landsberg
cacctttcttctctgaaaccacttctcgtctccaagacgaaacagttttcttctccttattccctgactcatccctctcctccgccgctcttcagtcacttcacttagaaatcatcgatttcgtttctccgtttacttctccttacatatggcagcacgagcctttctctctctcaatcgctctctcttcctcttgtgcttgtaccaatactgctatacctcatctccacgggaagctcaagtacggtgacaatctcgaagacgaatggttcgctgtgtttttactttttcgaatctccgccgcgtttctgtctaattcgattcgtgtttgggacactgacggcgagtttctcctaatcgaagctgcttttcatctcccgcgttggcttaatccggagactagtctcaatcgtgtcttcattcgcggtggtgacctccacatagttcccagaagccgtttgcctgatccttctttggttgcgtctctacggtttctaatcgagcgtggtaacgaatctcgtgcgtcggattcagttcaatctgcgttgaagaatcggatatctgattatcctgaaagagcgtggaggaatatgcatcgtgttagggttagggttccggtatcggtagctcaagtgattaggcatgaacctttcttgatctcacttgctgtggaagggttttacgatcgtgatatggattcaatgaaacacgcagcgaagatggagaagtttctgagcaaaggaagagaagagaagcttgtgcttgttcttgtcaagatgtctcgtgctatgtatgggcagctagtgcagcagaagtttcaagcaccgaattgttatccaatgcctagtgtcagtgacagggatgctttctctgaagctgagctagggatgaagatagcttgtggtatggaaatgatgtaccagcagaggaagaaggaaggagaagatgggaaagggattagttggagcaagtataaagacaatcttgagaagtatggttattttgaaggactgctttctggttcgaaggagtataagaggttgatggagaatgctgaggaataccaccagaagagttcttcgttttcgaggactaggtaaa

SEQ ID NO: 151344 - DNA, 979 bp, Arabidopsis thaliana landsberg
cactgcgtgcgttatacgaacttctacatcatttctcttttctctcatcgctcggtgaattcgaggatcctcgagctttttgatcggagactttttctctcatcgtcgttgtttgaattctccggctgagagatgcttgcttgacgacgaatctccaccgatcttttaccttttcgcacaacagtgagatctctctcttgttctctaatttctgttctacgatgattcgttgctagatccattgattttagtttcttttcagatgttatcatcatcctttggacattttcgtgtgaattgatctcaaagcttcctaggttaaagagaattgtgtagttttgtatagaattgatctcaaagcttcctagttgtgcttataagctatttaggtgatgatcattaggttaggttataaacttgcttggcagattcaaatggtttgagataattgcatatccaagctctgagatagttggtttttgaaatactgtaatggttggttactggaatttgatagagtaagagaaggatgtcgactccagcgaggaagagattgatgagggatttcaagaggttgcagcaagacccacctgcaggaattagtggtgctccacaagacaacaatatcatgttgtggaatgctgttatattcgggtaattgaactaaagtaacaaaaaaaaaacgatacttgataggtttctctgcactgtacttattaaagcttctgattgtggatttgcaggcctgatgataccccttgggatggaggtaaagttttgttattgtaatcacttaacttgagaattttggcaatcttttatgtatctggtcttatgtctcttttgtatggtcttgttaggtactttcaaattgtcactgcagttttcggaagattatccaaataaaccaccaacagtgcggtttgtttcacggatgttccatccaaacagtaagttggagattatcacatcatagttt

SEQ ID NO: 151345 - DNA, 1105 bp, Arabidopsis thaliana landsberg
gtatggagggaaaagaatgtgataaaaccagctcctggatagagaaagtgtaactgcaggaacgaggtctatcacagacaaattggtcctggaatgttccaacagatgacagagcaggtaaaggacggatatgttcaattgtcacagatggtcttgttccaacctaattactgtttaacgacgtatcctcttccccccctcaggtctgtgacaaatgccctaatgtcaaatacgaacgggagggatactttgtgacagttgatatcgagaaaggaatgaaagatggagaagtaagtatcgaacttctactaccctcattgtaaaatcaatcgaaactacgtttcatagtagctctttaattcattttgatttatttatgagcttatcgatttttccgatcttagtttctaaataccaaatacttttcaggaagtgtctttctatgaagacggcgaacccattcttgacggtgaccctggtgaccttaaggttagcctcttccctaaatttcactatccttgacttcactaaacatcaaaatcagagagaataaaccattgttgtacatttcgcagttccgaatcagaactgcaccacatgcccgtttcagaagggatggcaacgatctacacatgaacgtgaacattacactggtaaataaattcaacaaactactcttatatcagtatctctacatcatagaccaacaattgattcatttttctgattccaccaaatctcttttcttcaggttgaggcgctagttggttttgagaaatcattcaaacacttggatgatcacgaagttgacatcagttccaaggtaacactaatatctttccccatacacgcaaaacacttgaaacaatgaccatcaattatcatcttatgggttaaatattgtgtggcgacaacagggaattacaaagccgaaggaagtaaagaagttcaaaggagaagggatgccacttcactacagcacaaagaaaggcaacctctttgtcacttttgaggttttgtttccgtcttctctcactgacgatcagaagaagaagattaaagaagtctttgcttagtgctcttctctcgctttcgctctctctct

SEQ ID NO: 151346 - DNA, 2052 bp, Arabidopsis thaliana landsberg
atgggctcttgtaagtttgtaaccgaggcccaatacgagacgacgtcgttgtttgcaatcgacctatctggatcggtaggaaaagtgtgcaagtcgttttcattcaccaaagcgaagctttattcgtttgcttgagctccgaagagtggaaacaaaaatggaggaagaagagcacgaggtttacggtggagaaatccctgaagtcggcgatacggatgttcccgatccggatatcgatatgtctgcagccgatgaggacgccgttacggtctacttctgcttcgttcgattttgattttgttgtatatcgtgtgtatacatctgtttgatttttggtgttttgatttcatggaatcaggagcttgctgagatgaagaggagattaaaggagatggaggaagaagctgctgcgctacgagagatgcaagcaaaagtcgaaaaagaaatgggagctactcaaggttttgtgactctttcgttttttttttgaattcgtttgctcgagactatctttgaatttgatatactaggaggaatctgttgattgtgtagattacttttaggaaattgaacttctgtttcttgcttaacaatttgtttcagatcctgctagtatggctgcaaatcaagaaggaaaggaggaggtggatgctcgatcagtttatgttggcaatgtaagatagcttattttctacttcatggtatctcttctgtgcttgaatcattgtttcatctaaacggctttgatctgtttgccaatcttagtgtggattagcttaggctgactattttgttaacttaaatttcatctttgataaaagaactgcttgcaattgtgtcttagctttgttctttatcccttgagattactgttagaatctgtatcaagaggctttctctaaatttaatgttgtgaagtaggttctttattgtttctagtttaagagtttgacctctatgtcctatataatcgcagggttgttctcataaatgaagttcttaatagctctgggttctcaactaagttttgtgactgttttgctagtttccttgttgtagtgttaaaatcattcttcccgtgcaatttgatgataaaaaagctataaaaaaaatgttgaaagtaaaaagaaaagagaaggaaaaaaatttgaaaaaaaaaaaaaaagatatagcagaaaaatgtggagaaaaatattgcatgagcttgaaaaaaaaaagaaggatttcttgagaggaaaaagggagtctgagtgagttgggtgggattagaaagcaaggtttctgttatccttgaggagatggtctctgaactctgaagagctggatcaagatgccaagatgctggatgctttctaaacaagacccaaagctccgcagggaggatacttggagctaatacaggtttggttgtttgcggatttcgcgagatgctgcagtttgatgctggccttttatcatgtatttttgaactcacgctcataaaatgaagactttcatagcgtttatgtaccatacataacttaggtctaatgttagacatggaaaattgctttagaacacacaagtttgtctcttggcttcccttagtggggtggttaacttatctatctgttacgttctcagtaagtcatggttttagttgtaataagaatgcttgtgttatactaagacctcattatccaccctgcaggtcgactatgcctgtacacctgaagaagtgcaactacatttccaaacatgcggaacagtcaaccgggtaaccattctaatggacaagtttggacagccaaagggatttgcttatgtggagtttgtagaagtggaagccgtgcaagaagctctgcagctgaatgaatcagagcttcatggtcgtcaactgaaggtatcttctcgtactaagaccaatactgaaggaaatggacagttcattgatctcaactcttctcttttggttttcatttcaggtctcgcctaagcgaaccaatgttcctggaatgaaacagtatcatcctgggcgtttcaacccttcaatgggataccgctttcgcagac

SEQ ID NO: 151347 - DNA, 1452 bp, Arabidopsis thaliana landsberg
  unsure (1)..(1452): unsure at all n locations
cttttttttctcaattctcatttggttaatggaaactgttcactggattttgaaaaaggtattggcttgtcgaaaagctaaaggaagttaaagtagcggatgcgttgaagcatccaaactggaacatgggaaagaaaatcactgtggactctgctacgcttttcaacaaggttaagattattttcttaactctgattttgaaagtacctttgatcaaggtagatgagttcttgatttnnnnnnnnnnnnnnnnnnnnnnnnnnnnnngcattatttgtttggagctgagtatgacgatatagagattgtcattcatcctcaaagtatcatacattccatgattgaaacacaggtcttgctgaaaaataactaactgaattattatttttccggtttaaaaaaaaaattgtattaacatataactgttttgttctacaggattcatctgtgcttgctcaattgggttggcctgatatgcgtttaccgattctctacaccatgtcatggcccgatagagttccttgttctgaagtaacttggcctagacttgacctttgcaagtaagctaaccacatttataaactctctgtttatcaagtgtgaagctaagcttagttgaaaattttaattatcaccaagaaaagttccccaatcttgttttcagtttggttttaggttgtttagataagataaaaaatgaaaccgaatcggtcttcggtttggttttgcaattggttattttgctactgttttggtttggatcagttaaactgggttaggaccactgccttatctttcagcattcagctcctaaaaccaaaagttgtttacaattgtggattttggcagactcggttcattgacttttcaagaaaccagacaatgtgaaatacccatccatggatcttgcttatgctgctggacgagctggaggcacaatgactggagttctcagcgccgccaatgagaaagctgttgaaatgtttattgatgaaaagtaagaatttgttttcacttttgagcatctcaatgaagttcttgatacgaatcacaattgtttatattctcacttttgtttacaggataagctatttggatatcttcaaggttgtggaattaacatgcgataaacatcgaaacgagttggtaacatcaccgtctcttgaagagattgttcactatgacttgtgggcacgtgaatatgccgcggatgtgcagctttcttctggtgctaggccagttcatgcatgaagaattggttgttggaagaacataaggaagcttctgaggaaatgttgaaaaaagattagtgtagagaatggggtactacttaatagcgtttttggcaatgattatggattgtgtaggtaatttatctgtgatccgaacaagccaaactgataatttgaaaccatttttaccaataaaaccgagcttaattgtttcacatta

SEQ ID NO: 151348 - DNA, 555 bp, Arabidopsis thaliana landsberg; identical to SEQ ID NO: 33406

SEQ ID NO: 151349 - DNA, 1200 bp, Arabidopsis thaliana landsberg
  unsure (1)..(1200): unsure at all n locations
atctcctttggcacacctctttatttgacccattttcctgcacgaagccctataacggggattttgggagtcgtggttgcttctttccggaaatcacctgtcaaagtccctgaagacgccacacttctgtatgaaactcaagacaagaactctgctattgctggaagtagannnnnnnnnnnnnnnnnnnnnnnnnnnnnaatatccgcttcattgctttccagtaatgtatagctttacttggtttaacaagttattctggtatgatgcaggtatcttgacaaagccgctgttatctcagaagaagaatcgaaatccggagattattccaactcgtggagactatgcacggttacgcaagtcgaagaactcaagattctgatccgaatgttcccaatctgggcttctggtatcattttctcagctgtatacgcacaaatgtccacaatgtttgttcaacaaggccgagccatgaactgcaaaattggatcattccagcttcctcctgcagcactcgggacattcgacacagcaagcgtcatcatctgggtgccgctctacgaccggttcatcgttcccttagcaagaaagttcacaggagtagacaaaggattcactgagatacaaagaatgggaattggtctgtttgtctctgttctctgtatggcagctgcagctatcgtcgaaatcatccgtctccatatggccaacgatcttggattagtcgagtcaggagccccagttcccatatccgtcttgtggcagattccacagtacttcattctcggtgcagccgaagtattctacttcatcggtcagctcgagttcttctacgaccaatctccagatgcaatgagaagcttgtgcagtgccttagctcttttgaccaatgcacttggtaactacttgagctcgttgatcctcacgctcgtgacttattttacaacaagaaatgggcaagaaggttggatttcggataatctcaattcaggtcatctcgattacttcttctggctcttggctggtcttagccttgtgaacatggcggtttacttcttctctgctgctaggtataagcaaaagaaagcttcgtcgtagtaatgctgttatctatctactttcattacatacaaaagtttgtttctttcaactgtaactgtctctgtatcaataacaacattgctgtgtacttttcctttc

SEQ ID NO: 151350 - DNA, 1083 bp, Arabidopsis thaliana landsberg
caccacatctctctctatctatggaagcattaggaaactttgattacgaaagctacaccaattttacaaaattgccatcctcccaatggggtgatcagttcctcaagttttccattgctgattcggtgagcccatttatatctttccgactatcttttaacaatcaatgcacatttgtgtattccttatacgtacgttagatggctatataaagatctttgacttgtatcaacttccaggattttgatgtccttgaaagagagattgaagtactaaagcctaaagtaagagagaacatattcgtgtcgtcttccacagacaaagacgcgatgaaaaagacaattctttctattcattttctggacagtcttggtctctcttatcattttgagaaggaaatcgaagagagcctaaaacatgctttcgagaagatagaagatttgatcgctgatgaaaataaattgcacacaatctccaccatcttccgagttttcaggacatacggttactacatgtcttcgggtaagaatttttaaaacatatacatgttgtccggtaagtaatattttatatgagttcttatagtcttattgcatcgaattttcaaattctatttccatgtagatgatttcaagatattcaaaggagacgatggtaaattcaaggattttttattagaagatgtcaagggtatgctagggttctgggaagcattgcactttcggacaacgacagatcatatattggatgaagctctaagcttcacattgaaccacttggagctactatctacaggtcgatagcgagcccaccacatatttcaaagcttatacaaaatgctcttcacatacctcagcaccgaaacatccaatcgttgcttgcaagggagtataatccgttctatgaacacgaagaggaccacgacaaaacacttctcatgctatctaactctaaacatcaagattcttgcatcgttcaattacttacaagaaataaaaaccatctcaatgtatatgccatagacctaatcatcttgatcatagctaagggactgactgactgcataacttaaatcttttacat

SEQ ID NO: 151351 - DNA, 4825 bp, Arabidopsis thaliana landsberg
  unsure (1)..(4825): unsure at all n locations
acttgacaccttacattgaggactatccaacctattacgacgctattttgagtggtgtagagattctcaagctgagtattctgatggtaatcttgcggggcttaatccaattcctcaactaagtccaccaccacaatctataacgccactaaaaggaaaaggcaagtcatcacatgttttgccaataataattgcagtggttggttctgcagttgcgctagcgttttttgttcttgttgttgtcctcgttgttatgaagagaaagaagaagagcaacgagtctagtgtagataccacgaacaagccttctacgaactcgtcatggggtcctcttctgcacgggacaggctctacaaatacaaaatctgcctcatctcttccatcagatctctgccgtcgattctccatctacgaaatcaaatccgccacaaatgatttcgaggaaaaactaatcataggagtaggcgggtttggttctgtctacaaaggacgaatagacggtggagccacacttgttgcggttaaacggctggaaattacatcgaaccaaggtgctaaagagttcgatacagagctcgagatgctttcaaagcttcgacatgtacacctcgtctctctaatcggatattgcgatgacgacaacgagatggtacttgtctatgagtatatgccacatggtacacttaaagatcatcttttcaggagggacaaaacctctgatcctccattgtcatggaaacgaaggctagagatttgcattggagcagctcgtggattacagtatcttcatactggagccaagtacacgatcatacatagagacatcaaaaccacaaacatacttctcgatgagaacttcgtcgctaaagtatctgactttggtttatcaagagttggtcctactagtgcttctcaaacgcatgtctccaccgtcgttaaaggaacgtttggttacttggaccccgagtactatcgccgtcaagtcttgaccgaaaaatctgacgtgtactcctttggagttgttctgttggaggttttgtgttgtagaccgattagaatgcaaagtgttccaccggaacaagcagatttgatccgatgggtgaagtcaaattacagaagaggaaccgttgatcagatcattgactcagatttatcggctgatatcacttcgacatcgttggaaaagttttgtgagatagccattagatgtgttcaggaccgtggtatggaacggccaccgatgaacgacgttgtttgggcgcttgagtttgctcttcagcttcacgagactgctaagaagaagaatgacaacgtggagtctctggatctaatgccaagtggtgaggttggtacgaccacggacggagaagatgacttgtttagtaggactacaggacacgttgggaaatcgaccacgaccgatgactctgttctagttgttggtgatgagaggagtggttcgagttggggagtattttcggagatcaatgaacctaaagcacggtagatttgatggcttggtaaacaagtatcacattctggttagggttgatatatatttgtgtatgtataattgttgaataaacacattattgtatttaaattacattttgatgattatttagcagcttaaatttagatattatatacttgcttttatttgaccagagataaagttggatttttttttggcggttcgtaacggttgagaatatgtttgacatttgtctcaaaatgcaatcaaaaaagttttgcaatataaaattttgttaaatacagtcgttaaaaaaaacaaaattgttaaataagttccttcgccatttcacgtggctcttaagtcataacctagttatgaaaaatgaaaaacacctaatcttttctttttcaacttcaataccaaatgatccgtcacgaatttgttaatattctctattctcgtttccaccaccatagtaggagaaggagcaacgtcgacgtatgaacccaccgatgtctttctcttcaactgcggcgacacttcaaacaacgtcgacgttagtggccgaaactggacggcggaaaatcggaaaattctatcgtcaaatttagtcaacgcttcgttcacttcacaagcgtcataccaagaatcaggagtttctcagattccgtacatgacagctcgaatattccgatctgagttcacctacagttttccagtcactcccggttcaaattttctccggttatacttttacccgacccgatacggttcccaattcaacgccgtcaaatccttcttctccgtcaaagtcaacggcttcactctcttgaacaacttcagcgctgacttaacggtaaaagcatctaaaccccaaacggagtttataatcaaagagtttattattccggtttaccaaacgttgaatctcactttcacgccgtctttagattccttagctttcgttaacggaatcgagattgtctccatacctaaccggttttactcaaagggaggatttgacgacgttataactaacgttggtagttccgttgactttcacatagaaaattcaacggcttttgagacagtttaccggttaaacgtagggggaaaaacggttggagattcgggaatgttccgacgatgggtctctgatgatgagatcatactcagtgaaagttcaggaatctctccgatcgtaccagatataaagattaactacacggagaaaactccgtcgtacgttgcgccggatgacgtgtacgccacgtctcgcttaatggggaactccagcaacttgatgttcaatctaacgggtatgttcctcacagttgatgctgggtataactaccttgtgaggctacatttctgtgagactcttccacaagttaccaaagcaggccaacgtgtcttctccatattcgtcgaagataagatggctaagaaagagacggacgtgattcggttgagcggtggtcctcggattccaatgtatttagatttcagtgtgtatgttggtttcgaaagtgggatgatacaacctgagctacgacttgacttggttcctctcaaggacactaatcaaacgtattacgacgctattctgagtggtgtggagattctcaagctgaatgattctgatggtaatcttgcaagaccaaatccagaacttctagtgtctacggactcaaatccagatggttctaatgtaacaccaccaataaaaggtaagacacatgttttggtgataatcctcatagtcgttggttctgtaattgggctagcaactttcattgttaccatcatgttgttgatccgtcggaagaagaatgaaaaggagaatagtgtcatcatgttcaagttactactgaaacaatacacttacgcagaattgaagaagattacaaagtcgttttctcacaccgttgggaaaggagggtttggaactgtatatagaggaannnnnnnnnnnnnnnnnnnnnnnnnnntaaaggtcttgaaggatttgaagggaaacggtgacgatttcataaatgaagtttctagcatgagccaaacatctcatgtcaacattgtttctcttcttggattctgctctgaaggttcaagaagagctattatatatgaatttttggagaatgggtcactcgataagttcatctcggaaaagacttcagtgattttggacttgacggcactgtatgggatcgcgctaggcgttgctcatggtctagagtacttgcattatggctgcaaaacgaggattgtgcatttcgacattaaacctcaaaacgttttgttggatgataatctttccccgaaagtttctgatttcggacttgctaaactatgcgagaagaaagagagtgtcatgtcattgatggatacaagaggtacaataggatacattgcaccagagatgatctctcgagtttatgggagtgtttctcacaagtcagatgtgtatagctacggaatgttggtcttcgaaatgataggtgcaaggaagaaagaacgatttggtcaaaactctgcgaacggaagttcaatgtactttccagaatggatatataaggatcttgagaaggcagacaatggggatcttgagcatatcgagattggaatcagcagcgaggaagaggagatagcaaagaagatgacattggtgggtttgtggtgtattcagtcttccccatcagatcgtccaccgatgaacaaagttgtagagatgatggaaggaagtttggatgctcttgaagttccacctagacctgttttgcaatgctctgtagtgcctcatctcgatttttcctggatttcagaggaaaattcaatctcctctgagatatgattttctctgtaaactgtaactcgcaagcttttagcttatgagtaaatctctgtcgtttgaacgtaaattttctttgcataaaaaagaatagaacacatttgttgaattttctaaggtcagtaagtcatagacggtatttaatgcatgaacaaaaacaggttttggttaggagaaagtgtggtctatgtttacaaataagtccttccattcccactcaagatttagttccatgttttgcctcaacttcctagaaaattcttacaaattaaactgactcgtctttgataactctaattttctgtattattactattcggaaaaactaaagaaactaacttttgatttgtagatattacagatactatatatcattaggaatatagaatgagaattagattagaaatgatatagttgtttcgagaaggaaggtagtgatatcatccatactcagaaggaagcaacatactcgttttggttttaatctggacctattt

SEQ ID NO: 151352 - DNA, 271 bp, Arabidopsis thaliana landsberg
atgtatttggcgaatcaaatatcatggtctaataaagaataattctgattagttgataattttgtgaaagattcctgtgaaaaaggttaattaaatctattcctaatttatgtcgagtagaccttgttgttttgttttattgcaagaattctaaattcatgacttgtagggagggacttatgtcaccacaaacagagactaaagcaagtgttgggttcaaagctggtgttaaagagtataaattgacttactatactcctgaatatgaaac

SEQ ID NO: 151353 - DNA, 965 bp, Arabidopsis thaliana landsberg
  unsure (1)..(965): unsure at all n locations
ttggcttgtgaattaattaattcctgcgaaatggaacctcgaatcaatgaccttcaggtggaatctcgggttcatgagttgctcgattttccggttcatacaaaccagatatcctctgcaatctacgaggtatgtatatcatatcatattgatactactacaataagaacacaacaagtaatatacagatcctattgcagtgtcccaacgaccacatcgaaaaccctaagaagaaaccgtacaattgtccacactcaggagccaagtgtgatgtcacaggagatattcaaaggctactactgcatctaaggaatgatcacaatgttgaaatgagtgataagcgtagattcagtcacagatatgttcatcatgatcctaaacatcttcatcatgctacttggatgtacagtaaaagttatataactgattatcttgctctgtttctgcaactttgtgaatttttaagttttaacccacttgaaacgatgcagcttctcgattgttgtggtcgaaaattctgcttgtacttcgaagcgtttcacctgaggaaaannnnnnnnnnnnnnnnnnnnnngcagtttatgggagatgaagaagaggcaatgagcttcagctatagtttgcaggtcggagggaatggcagaaagctgacatggcaaggcgtgccgaggagcattcgtgacagtcacaagacggttcgtgatagtcaagatggcttaatcatcactcgcaaattggctttgttcttctctaccgacaacaacaccaccgacaaggagctgaagttgaaggtttcaggtcgtgtatggagagaacagcctgtttcgatatgaattcgataattaggttacagaattggacaactatagaatatttggtgacacaaatatcttttcttgatttaaaaattaaataaagcaatttcgagggaaatgtgtaggtaaactggtgattatggctcgatc

SEQ ID NO: 151354 - DNA, 487 bp, Arabidopsis thaliana landsberg
  unsure (1)..(487): unsure at all n locations
ggtcgatgttcattctactgaagagnnaccgttgnctttgcgggcggggaaagatacctatgcagatgttaattttacttgccgtgctccccccacaccattgttcccaaaggttagtgtcatgtgacgtatctattccatgaaactataagagtttcatttctctttcgggattctgtgagaaatttagatgttttttttgtgtctgttttgaaaatgttttcagctttgcaagacagtggtggaacatcccgatatagtgttccttaaagtaaactttgatgagaataaaccgatgtgcaagagtttgaacgtgagagtgcttccttttttccacttttaccgtggagctgatggtcagcttgagacattctcatgttctcttgctaaggtaaagaaggctatttcggtttcaccttttccgcaactagaactnggcataacgctttaaacaaagagaactacttcgttgttctttttcgatagg

SEQ ID NO: 151355 - DNA, 947 bp, Arabidopsis thaliana landsberg
  unsure (1)..(947): unsure at all n locations
aaacagagcacatttcattctctcataacaaatatatacatattaatcagaatcacgaaaagcgaagaagcgaaagagagaagaagatcggatgggagtggattactacaaaggcctccaagtcgatcgcagcgcaagcgacgatgatctcaagaaagcttatcgtaaacttgccatgaaatggcatcccgacaaaaatcccaacaacaaaaaggatgccgaagctatgttcaaacaaatatccgaagcttacgaggtacatatagatatatgtctgaattccaacaaaagattcatctttatgaatcttgttgctagagggcttttgagaaattcaacttattgtcttaagtagattctgttatagtctttagttatttcgtgctgttgcatatggtagctgcgtcctctgtattttcataaaatatcttcgaagttgtggattgattgttaggattacttgtctctattgggtacacgtatttgtgattttgcgtctttgttcctgtttactgattctctggatgcttacaggtactaagtgatcctcagaagaaagctgtggatgatcaatatggtgaggaaggtttgaaagggaacgtgccacctccggatgcaggtggagctacttacttctctaccggggatggtccaacgtccttcaggttcaacccgagaaatgcggatgatatatttgctgagttctttggcttctctaacccatttggcggcggaagaggtggtacaagattctctagcagcatgtttggtgataatatgtttgcttctttcagcgaaggaggaggcggtggtggtggctctatgcatcacggtggagctaggaagnnnnnnnnnnnnnnnnnnnnnnnnnnnnnnngccttgaagatctctacaaaggaaccaccaaaaagatgaggattactagggagattgctgatgtcagtgg

SEQ ID NO: 151356 - DNA, 767 bp, Arabidopsis thaliana landsberg
tacgcgagttctctgagtaaagctgatgtggccatgagcattcttctcactagttctacaactattgcttctgtaatctttacacctttgcttagtggtcttctaattggatcagtagttcctgttgatgcagttgccatgtcgaagtctatacttcaggtaacaagatttagcataggatcggtagttcctgttgattcatcgttcttgacgtccaatgatttactatctgtaggtggtacttgttccaatcactcttggccttgtgttaaatacttatgcgaagcctgtggtcactcttcttcaacctgtgatgccgtttgttgctatggtatgcacttcgttgtgcattggaagcccactttcgattaatcgcagtcagattctgtcagctgaaggtcttggattgattgttccaattgttacattccatgccgtagcatttgccttaggatattggttctctaagatcccaggcttacggtaactccaacatccatgttctttttgtatctcttcaacatttttcttaatccatagaacttcgaaaatttattgggttatgttgttggatcatttaaccagacaagaggaagaagtaagccggactatctccctttgcacgggaatgcaaagctccacattagccgggcttcttgcaagccagttccttggtagcagccaagccgtgccagcagcttgctctgtagttgtaatggccataatgggtctatgccttgcctcgttctggggcaatgggtttcgaa

SEQ ID NO: 151357 - DNA, 404 bp, Arabidopsis thaliana landsberg
ggtttgtttcgaatcagctctaagcgggttacttggctcatgagtttctcaacaatggcacactcttcggagagctttggaatccaactaaagcccaagccggcccattaacgacccaatctattgaccctagaaagaataagccgagccatgatatagagccgagtgatcataaacggaggagatatgtggaggttgctaacatactccgggtagatgggacccatttgcccggtatcgttaacccgtcacagcttgcctggatcctaaaattgtgatgcgtaaatccaggtggagttgtattattggttcgtcgtttagaaaaacaaaacagctgtaacaccgaaacattcctcttctcaatcttttattttttgtccattaatgtttttttgtaaaaagct

SEQ ID NO: 151358 - DNA, 650 bp, Arabidopsis thaliana landsberg
ttgaaatgcgtctggataacagtggttttcgattggggatggctttgactattcctcaagcgcgccaattagttaatcatggacatattttagttgatggccgcatggtccatgtcccaagatatggctgcaaaccgcgcgatagtattacagagaaggatgaacaaaactctataactttggttcaaaatcttcttgattcatctgccctgaggaattgccaaaccatctgactcttcacacattccaatatgaagggttagtcaatcaaataatagataggaaatgcgtcggtttgaaaataaatgaattgcttgtcgtagaatattactctcgacagacttaataaacctaacttaagtaaaaaaaaaaaaaaaattactaaaaacaagagttcggacaactccccttttccattaaaaataaaaaggcacaaggtaagggattttgtcaaagaatatttttcctattcatgtatcatagattggtagggagattgggatcccttgtttgctcttcccagcattttccatatgaaagaaattaggaatagagaatctatttcaaaatcaaaacaaggtagatcttatatcgattcttttttattggatttgatacattgtggtcaatcacgtaagattggtgaattt

SEQ ID NO: 151359 - DNA, 1362 bp, Arabidopsis thaliana landsberg
ttgtgtattagaatgaagttgtaaagctatcacagcatgttggggcattagagatgtggaagatgaagagttaagaaggtttttctttggaatgtccacatggcaggtgctcattttagtttcttgtttgtttttgaaacctatcggtattgaacgttggttttgaggttttagttattttctacagtttatactcattgtagtggcgagttcaataggagaagagctcttttaccgtgttgctgtacaggtttggttttatttaacttcgcaaagtatagaatctttgattgagttatcactgattgatctcttgtaatgtctgattctcacagggtgctctgtctgatatattcttgaaaggaacacagttgatgacagattctagaggcatggcatctctggtaaatttaatctctacccttcacatttattctatgtttagattctcccatatcttctcatagacttgatattgtttgttgttgttacctctagaccggagtgtttcctccatttgtcccatttgctgaagtctttgcagctgtaatcaccgcgactctcacaggctctctctactttcttgctgcgtctccaaaaggttaggatttgatcatgtacttgatctgttaattgcctagtgtcttagttgattacattctttctgattcttgttttcgttttcagacccgacatacatagttgccccggtttaaggtcacggcgagatgattttaagaagcttttgtcaggaacttgttctcttcttggtctgatcatatttgttttgagaaagaatatgaaagataaactaatagaatagcttagagaccaaggaaatatcaaccggtttgttctgttgctcatgaaatcctctttgtcatttgctttgtgcagcttggtatgagaagagacagatgaagaagatttactctccactccttgaaggactcttagccctctatctcggtattgaatgggttcaggtaaattctcggttcggtttttgtttttgttcggtttggtatgcaataatttgctgaaaaaccaaaccgcttgattaattcaaaatttattcaaattttcagacggataatatattagcaccgatgatgacgcatggtatatactcggcggtcatattagggcatgggctgtggaaaattcacgatcaccggagaaggttacgccggagaatcgaacacattagatcggaggccacggataagttgatttaaatcaaatatagatggtttaattggttgggggtggatttgtgtgtattttaatggtaaagggtcgtatagtgattagggaaattagctaggacctcttccaattaatagagagctacatgataca

SEQ ID NO: 151360 - DNA, 1713 bp, Arabidopsis thaliana landsberg
tatatttagatcaactgctgcttcattgttctttgagcaatataattatatacttgatgatgatacgatgctctatctccaggttagtggcgtcttggtgtgtgaagcaggatgcatattagaaaatctggcaactttccttgacacaaaagggtaatagaaccatgtcttcgtaccttcttttagcaacaatgaactgaaaattaatagaagagtgtttcattattactcaactagctcggttgttttgtcagatgtagcaacataaaatttatgcttcctcagttttattatgcctctagacttaggtgcaaaaggaagctgtcatatcggtggaaatgtttcaactaatgctggtggtttgcgtctaatccgttatggctcacttcatggaactgtattgggtaatgacttacagttttagttactttcgatccatctgaaaacatttggatttcatgttctcatcatttttattttcttcatctcaggtctagaagctgtcacagcaaatggcaacgtgcttgacatgcttggaactttaggcaaagacaatactgggtacgacttaaaacatttgtttattggtaggtattatattggcttgtgcttgtacaatgatttcaagtatcacttcatcagcaaaatagactaaatcatcttgattttttctctttactggtttccacaggtagtgaaggatcacttggtattgtaactaaagtttctattctcacacaaccaaaattgtcttctgtaaatttagccttcattgcttgcaaagattatctcagctgccaggtttaatacaatttcttttgtactcctgtaattgaattctatctacagaggagatagtgcgtgaactgttatctctcattgtgtttcctttgtttgcagaaacttcttgttgaagcaaagagaaatcttggagagatactctcggctttcgagtttcttgataacaattccatggatttggtaagcttttaggaagttactaataggaactgtttgcattcctgacactttatcttgtgcacaaggctttgattttgctaaaccctttctgtttttaattcattcaacaggtactgaaccacctagacggtgtacgtaatccagtttcctcttcggagaacttttatattctgatcgagacaacagggagtgatgaaactaatgacaggtattgagaattttctggtctttctgtgactttcacaattttccagtaccatttaaatgaattctaagtatttcagatcccttgagagagtttttgtctgattcaaaaactaatgcagggagaagcttgaagctttcctgttgaagtcactggaaaaaggtttagtttctgatggtgtaatcgctcaagacattaaccaggcatcctcattttggcgcatacgagaggtaaaacacttgagagttatttcctctgaaaaagcttgatggtacacgacgaataaagtcataatcataaccctgcagggtataacagaggcgttacagaaagcaggagctgtttacaagtatgacttatccttaccggttgaagaaatttacaatattgttaacgatcttcgagggagattaggtaagatatatatcaatacattgtctcctaattacttgaaaccgaaagattcaatgaaaactgcaaccaaatatgcaatgcttcaggtgacttaccaaatgttatgggatatg

SEQ ID NO: 151361 - DNA, 1081 bp, Arabidopsis thaliana landsberg
caaataaaagactcatcttgatatcaaccaacgcaggtcaaggtgggagtacgaggggccgaggaatttggcgagtacgaagagtggttcaactaccgactctcaagggccgctcctgacacctgcgctgagtttctcggaagctttgtcgccgacaagaccaatactatgtttactaaaggcggcaaatggcttgtctggaggttcgaggtgtggtcttcttacttacccttacaatgaatctgctgtttatagttgcgatgatgatgatgaatgaaatgttttcttcaacagggagaccgtgatctcgctgattacatgaaagatcggagctttccttctaatctggagtccatcatgtttgggcgcgttctccaaggagtcgagtctgtgaaacgtcgtgcactgatcattaagcagattatgcgccagatcattacatctctcaggaaaatccatggcacgggcattgttcaccgggacgtgaagcctgccaacttggtggttacaaagaagggccagattaagctcatcgactttggtgccgctgctgatcttcgcattggcaagaattacatcccggaacgcactttactcgatcctgactactgtcctcctgagctctatgtcctcccggaggaaacgccaagccctcctccggagcctatagccgctttgctttccccgattctctggcaggtggttttcttattcttgtttgccttcttttttacttgagtctttgcctgatttggagtgctgattcttacagttgaacagtccggatctgtttgatatgtattctgctgggatagtgcttctccaaatggcggttccgaccttaagatctactgccggtctgaagaattttaatctggagatcaagtctgttgaatatgatcttaataggtggcgggacaggactcggacgaggccagacttgagcatactagatctggactcgggcagagggtgggacctcgtcactaaactcatatccgagagaggttctctgagacgtggacgcctttcagcagctgctgctctcagacacccttattttttgttgggcggtgatcaa

SEQ ID NO: 151362 - DNA, 3018 bp, Arabidopsis thaliana landsberg
  unsure (1)..(3018): unsure at all n locations
ctgcataaaatttgtcttctaagctgtggagtagctgcaggtagttaaaaaataatgtttttaaagtgatgaaatgccaacaattatctatagtcagtactgagaatcttgggtgtaaatttaggtcttggtgcagcatggaatgttgctgatgtacaaaaaggttcaagtgttgtgatatttggtcttggaactgtcggtctttctgtaagtatagatacagaagttttgatgattctgttttaatggagtctgatgtgggattaatctcctatgagtaggttgctcaaggtgccaaacttagaggagcagcnnnnnnnnnnnnnnnnnnnnnnnnnnnnnctaaggctgaacaaggtatatcatggcagtaagatataacgcggttctggactggttttgagtgtttcttatttgttacagcaaagacatttggtgtcacggatttcatcaattcaaatgacctctctgaacctataccccaggtaattacagtatcttcctatgtacttataataggataacaaaagccggtgttttcgataaaatggtgttcccatgttggttacattgtagtaattgctgatgtataagtttgaaccattgggattttaggtgatcaaaagaatgacaggaggaggtgcagatttctcatttgaatgtgttggtgatacaggaatagctacaactgctttacaatcgtgctcggatgtaagattttatgttctatttgctctctcaacttgtttgcattttgcttcactgtattgtatagaaatgccttttaaaaactttttcaatgtgaatatctcagggatggggaatgacggttactctaggtgtaccgaaagctaagcctgaagtttcagctcattacggacttttcctttctgggaaatctttaaaagggactctttttggtggttggaagcctaaatctgatcttccttcactcattgacaagtacatgaacaaggtatatacgtgtgcagctacattaagcaaaatcacttctagtctatgaatagtttgtttacgttttcactcttccgtggcgcaggagatcatgatcgatgaatttgttacgcataacctgtcatttgatgaaatcaacgaagcttttgatcttatgagagaaggaaagtgtctgcgttgtgttcttcacatgccaaagtaatctctcggaaaacacatgtgacagtttcaagaaagattaacaagagatctgtatattctacagctgagttgttgtatcaaacaaaaatgatggttttctatagagctatgagactttttttttcttttggtttgttgtgaagtgatcgttcatacattataagatggattgtcacatgatgaatccaacgagttcctagaaccaaggacatcgatcttaaattgataacagtgtttcaagtatacacttttacaaaacaaaactttttttttttgcagatcagaattgccaaaacacaaagtttgagtttttattcattgtagtctaaactctaaccggtttgagtagcttttactaaatggtgagacgcgaccgtgttttaaacgcgattctaatgtttttcaacgataccttaaatgttacaaacgcactttactggtgatcgctacggtgaacagtctctgtcgcttcatcggagcattgagcaacacaatggaggaggaaccggagagaaggaaagctatcgctctcttcatggctttcggtaccaaaggcgatgtctaccctctctctgtaatctccctctctactctcagactctgtatcgaattgtgggacctcttagaaaacaaaaccaaagaaggtgctgcactctttgcagggccattgccgcagctttcgctcgtgttcaacaacactacactgtggttttgatgtcacatttggctcatgaggttgggttttcttcttcttcttctcttaaagttctcgacttgcagaaactacgttctcaaagatatagatgttgatttgttgcagaacctaagctcccatttgagtaaagcaaaagtttcatattttcctatcaattctcctcctgctctgtctaatgaacctcagggtactcaaaacgtcacaggtcaatactctgatgttaatttcttcttccaattctggttttcttcttacttagctagcttttgactattcatctattctggtttcaatcagactcgctgaggaaaatgtttttggaggaaaaagaaaggataaaaagggaacacagacaagagtgtcattctgcattcagaaccattttcggaaaggatccttgtatggagggtgatttcgttgtcataaatttctttgcattggtacatctgcttaatatactctcctttgtaccaagattgattgattgtgtctgctttatctctatcaatgacaatagatttgatgagtgtcaataactgtggatcttctgattgtacatttaggaaggatggagcctagcagaagttttccagatccgttgtgtggtggctgctccttatgttgttccgtataggtaactttgtagcttacaagtacgagtgtcacatcctggaaaatggaagttgatcacttgaaattcttcttttgaacagtccaccatcaggctttgaaagacagtttagaaaggagctaccagatttatacaagtacttgaaagaagcccccataggcaaggtattccatatgattgtgatacaaacgtgcaattggtattattttctcctgaaattttcgtttttctgtgtgttttgcaggttagctggagtgatgtaactcattggatgtggcctctttttactgaagagtggggatcatggcgatacgaggaactcaaccttagttgttacccttttgcagtatgtattttctaaacatagagacctagaaatgtacattttattgtgaaaaatgatagtgtgaactgtcacctgatttacttatttgattcaggatccagtaacagaccttccaatttggcatatccggccgccatctcccttggtctt

SEQ ID NO: 151363 - DNA, 1102 bp, Arabidopsis thaliana landsberg
aaggaggttacccggattgtagccctgtggtttaccagattcaagatagtctcaaacaacctgtcttcagctgcaaattcagctccgatcgtaacggaagatcttggtaaatttctaatagaacttggttacaatgtcgcaataggcgttgaaatttcctagagcgtaattgttctgtttttgtgtgcgataggtctataccatcaggatttacatatagtagtagaggatggattgcaagaacattatcaggtgaccagtgggaaaagaaacaagcgagagaacgtaaaggttggatgataacgatccatgatctttcgggatcacctgtagcagcagcttcaatgatcactcctttcgtggcatctccagggtctgatcgtgtttctagatcaaaccctggtgcgtggctaatccttaggcctcatgggacttgtgtcagtagttggaaaccgtggggacgtcttgaggcttggcgtgagagaggagctattgatggattgggttacaagttcgagctcgtgagggataacagtactagcaccggcattcctattgcagaaggtaaatcatatattataagttgagataattaattagtactataatgtgggtcaaatcaaaattagcaggtcttataaccgaccaaatcattcattatggtaatacgaataattaaagctacctaaaatacaaaagcaccttcaagaggtaggttaatatattagtttgtgttaatgtgtataatgttctaattagcattggtgatctaaagtactatgagaaacacaaattaacatataacttaggaatatatttggatatacggtataacaaatgtccaatatacccttatacatgatttgctaataaactccatgaaatcattagtgaatctaataatgtatataaatggacagggacaatgagcacaaaacaaggaggaaagttcagcattgacaggagagtctcaggccagggagagtctccggcaatatcatcgccggtgaaagggttcgtgatgggttcgagcgtcgaaggagaagggaaagtgagcaagcctgtggtccacgtgggagcacagcatgtgacttgcatggcg

SEQ ID NO: 151364 - DNA, 317 bp, Arabidopsis thaliana landsberg
ctgctggtggcctctggaagatgcaccattggattgagcagaggaaaactagaactttctatgatttgcttgagagaggtgagatcggtgttgtcgcctctgaagagtgaatgggaatgcctctctctcactctcaatgttgttggctcgatttttctgtttttatggtttcttgagatctcagataagttacctaagaagttggttgcttgagaaataaacaaccactcagacatcaaaattggatatttgttaacacattgttttccggagatacagtggttgaaacttgagacatctgtcttgacttttcctta

SEQ ID NO: 151365 - DNA, 588 bp, Arabidopsis thaliana landsberg; identical to SEQ ID NO: 2510

SEQ ID NO: 151366 - DNA, 6212 bp, Arabidopsis thaliana landsberg
atggctgggaataaagctaacgacgaagtcccgaggaagcagcatggtccagggaaggagaagcgtgtattaagagtttccccgcggagaaaacgctctgcgacaaaggcaacggaggaattgggttagaatctctaatttaccgtttgttgtctttgggtgtatcagaattgtaaagcttgtttgattaaagtgttagaatttgtcggaatttagcatatctttaggatgaaaaattgagaagtagaattggaaatctctgtttccgccaaaaatatgattttgagttataatctggaaaatgtctgtgtacgtacactacttctgtttgctcaacagtatatgacttttaattgcaggtagtccaagtgttgctccgactgaagatcttacagttgaagatttaccaccaagactctttgctctagaccggtacccttccgagacgaagatgaacgcgtactctaaaccggagtacatttctgacatagcaaaagtactaaaggggaaaccagagatgcagtttcttctcgattcttcatttgggaaactttttaaaatacccaaaaacaaggcatctttcaatgctaagcttgtccttggactaatatgccgtcagttagtgacaaagaaggtgaatgagatgtggattgtattcggcggtcatccaatcagatttggattaagagaatttagtatcctaactgggctggaatgtgggaagtatcccaagaagaaagacgttgatgatgttatcagtgtgaaacctgagtgtgagagtgtttggaagactctgtttgatgagaggtttggggacacggttccaacaattgctgatttggtgagctggctgcaggaggaggaaagcatggaggggtggaagcaactggcactatctcttattattttggttgacggtgtggtagcggcccacagtaaccccaacaggcctacttcgaagactgtcgagatgactaagaacctggagtttttctgcaaatacccatggggaagggtgtcctttacccgtactttggggaggatagcaaatttccaaactccttacgatgctcagaaactaataaggggtatacttgtagggtcttatgcactccatggtttcccattagctctccagcttttagctttcgaaacaatcccatcaattgctaagctaggacctgatgatgtacctaacaggacatttgctgagaggtctatccatcgtcttgcctctctgcgagcaatccggacatctcgcattttggagtgtgaggctgctgatgaggtgtgttaaattgtgtatgtacgtacataataagtaaatgtacattatctatggttaacatacttatttgtgtaggttgaggtcaactatattgtgaaaccagctgataatgtttgtcctccatctctttcatgggatgatgaagttgatgatccaagggttgattacattgaggcactgttgatagatgggcaccagtggcaggaggatgaatgggttggaggctatgctagagtaccaaagcagtcgcgcccaccacaactagaagagacaggtaagtataagtataaatgtttttacaaatttttttggtattgcacctagaagaaaaccaattaatagcagcaattggtctattgtagatgttaagaggaaacgaaatgcaccgggcccgagccctaaagaacctgctatgaaaaaacagaaatctgaaatggactgtgataaagaagagactgctgaggattgttttggagagcctgtgcctgagaggtttattgttgaaatgaggaggtctttgaaggagctggaagaccaaatgtatcaaatgcatgaagatatgaaagactttgtccgtgaccagatacgtgctgcccttgatccaaaaggcaaaaggccagaacaaaccataccttcccatgattcgcgggaaccacctacttctatggataaggcaccggttactgcgaagaagccatcgagaaggatgtctacaaaaggaagcactggaacgagaaagtcttcaaggctgactcgtgtttctcatgatgtggacactcctgcactttctgttggctgtaattccaaagaggaagatttggatgtccctggagtacataccactgctttcggcggaagaagaaaaccttcaaagccgaagaaaaatgtttcttttgctgttgacactattgaggaacctgattccaataaggaagatatgcaaggattcattgatgaacaggtaagtcatgtacgtacattgctaaatattttataatccatatgtataactgtactgtctggttcgatacaggatggcgctaataatgaaagtgattttactgcaaatgatggattgaattcttctgccgctgaagaagagatattagacactggatttttaatagttccttatgctggatccacacaatcccatctggtatgtcgtctactaatactcttaacaatctgtttaaatggtgtacgtacatattcgcttaagaagttagttaaactatgtttcaggatagaggaaatgtctgttgttggtaagactgtcttcttaggttcaatgtctgggactgtctttgtaacacaggaagagaggcctgtggaagaagctactgttgacaccgagatggaagaagttccatctaatgtgtctgcaagagtttcagaggtagatcttctggtaatcgttatatacagatttccatgactatatgcatatatattacattaatttcttcacttatctaacgcttaactctatggtagcctatgtttcaggataatggaccaaaggatgttgttgaacctggcttagttggtacccatacaagtgccgatgaaatagctgatgctgacatagagatggtagacaatccatcagttttaccttcaacatctgcacaggtatgtgttagtcacttgttctttttccatatgtgtacgcccataagactttgcaaattatttttgtttcaggaagaagcaagagatgccagtgcatcgactgaagctaatggcagcgagtcagaagaaacttatgagccttctgatggagacacagctcacgtacctgccacaagtgtacgtacatttttgtcactatgttctgtgtacatatatattgtttcatacattactaaaaagtttctttccgatgctaaattctacaggttgaggcggcaggagaatccaaattagtgacagtgatggaagttgaaatacctgagaagacccacagtgatcccccgtcaccatttcaagtagttaacaatgtaagctaactcttgcaacaaataaaatgtactatttactgttcaaatgtataaaatttatattatgcaggtcatacgggagttggataccaaagccgttggtgatttagctgcagccactgatttggaggtaacaatttgtgtgtttcaattcctattttcggaatagcatacataggattatatgtgtacattatatatacttgtgtacgttaacttgcacaggtagtcatggaagagccgtgtattgtcgaggggtctgtagaaactgaggatcctaacccagggtcagatgaagcagacaagaccgatattcctaaaaataatgtatgtacctattttaaacatagaaaaacgtatgaaactgttgttgacaatcatatttgttaacaggatgaatcagacaatgctgctgctgtcgaagcaaaagaagaaaaaaaatcgtccccaaagaaagtgaagaaacaacttgtctatgaactagatgatgcccatcctcatggttttaaggcaaaaacagtattggtgtccgatgtaccagctcaacagatagaggttgttatcagggctggaaatgtctcatacaaccccctggacgtggttgacccttcaaaagtagaggaattcaacaatatcattaaaggaccctctgtctaagtacattatagtaaaatggattatttaatatctcaatcatcatttttccaagtcttaaggttgttatcaaatatttttctggattttacaggattcacactcttttcgggtttcgaaaagtgcccaacgagttttttgcgaaccttctaacacctggtgaatgggatgtcctcaaagatgcaaacattttcagcatgtgcgacgatctcgatgacttctacgcggcaggccacgatccaaatgacatcaactccgaaggtcgctattgacccttcgtcaaacggtgcttacaagctggtaaccccacggctatttaccatgaaggactgcgtctcgttacacatgagtctgacattcagggagctatcctacacttagagcgaatcgccccaaggaacgccgctgcaacccttgcatgcgcaattctttacatatgtgctggtaatgctcacatgggtggtgtctaccttcggctcttcggaagcaaccattatgctttggaatcggaggaggcacgtgacatttgtgaggaggtgctagaagatataaagaaatatgctaatactttaaaatacacatacgctaacagtttttcgtacccggaatgtggtgacgtaagcactcctgaatgcgcggagatgtgttacatgagatcgagactcttcaataatctttgataatatgtttttatggtcaattatcctaaaacaccaatcatgtcattgtagtattttacgtgtcaatccaaatgggtgtgatacaaacagatgagatgtgatcagaagtcactaagtcaagccaagcaataacagttttggggtttctaacattcctaagcgaacatgcagaaaacagaagcaataacagaattactaaaatcacttgaccacaataggctgattccagaagtagggtgtggtcgagtatactggtcgagtaaccgacagaaaacaagacaatcttactcgactgcacattctgttgccagacactgggtgtggtcgagtgagttggtcgagtgattgtaaaaactaagaaacaggcaatgagaacgattaagcgataacgataaaacagagaaataagatagaagagaaattcctaaggatggggtaatcgaatagagtggtatcctagcctattcgaatggttaacaagcgcaatcaagttatccatagacgacaggttcaacaagtactctatcccatccttaagaactctatgtcactactcagacaacatgctcaaagacataaacgcagataaatgataatattgcataagtaaagagataaagagtagagaaacaagatgccagatgaaatcaaatgcggaatctaaataacttggaaaaatctggaattacaggtttcaaaagcaaaagcggcgcagctagagtaaaacataaaataaaactgaagcaaaaactcaatgtcgactagatgtcccaggacaaaaccctcagacacctatttatacaaaatgaaataaaatgatagtagacggtccagtaacctaatcgcccggcccatagagtgataatgggccgagatgggcttcgtgatccgatggagctccaggctgtttccaaacacttcttcttctcctattttcttctttgttctcagcttgtctggttaagtgcgaatttgagttaactctgaagatgtgatcgagtgcttgatcgagtgatggtgatgattggtgaaggataacgtggtagagtgaatgaccgagtggtggtcaggtggcgtggccgagtggtggtcaggtggatcgagtggagtcatcgagtggcttagatgctgttactcgagcaggggatcgagtagatgggaagaatggctccaatgtcactcgaccagggggtcgagtaatggtgctggatgtactcgacctgtgggtcgagtatgtcctctagttctggctcgcttcttccagtttgctcgacaacagctccaaatcacctgaaaacaactcagaaatgcaatatgtatgcaaagctatcctaatcatgcaaagtatgcaagaatgatgagaaatgatatgaaacagtgatgaataatatgaaactagactcaaaacgatgatgaatgaacactgagaacatgcaaattatagacatatcatttggtatagttaaatgaattttttttctaattttgttacgatttaacatatttattttttactaaattttatataattttcaagtaaaaaatcatatttataatgtttgtattataaacggcttaaccgcctaa

SEQ ID NO: 151367 - DNA, 1499 bp, Arabidopsis thaliana landsberg
tgtttgctttttaaatgatatggacgttttggtatttacctcaggaattcgtatgctacattttcatataaaccaagagaacctcgagattagaaagtgaacacattccaattagtcaataattcagcaactagtagaagaaagtagaattgattcatttgagaaaaggactggcactatttgatatatacagtatgctgataatatatattaccattatgcaataatataaaccttatcacaacaaatctttatccgaaccaccaccaatggaagatgttcaaaactcagacaagaacctttgaaagtcacgtgtgcggatcatatgactcacatccaaatatctgacgtcacagaacctgcgagctccgcacatgtaaactcctgccggagttcatctaacgacacgcggcaatatgtgtgtgggttaacaaatgtggattttgtggggtcaagcaacctatctgttatacactcggatggacagtccagttactatgtggcccttgaggctatgttaatccggcccattaagcttaaccccaatttaatttgtaaattttcaaaggtagaaaaaaattgaagtgacacagcgaagttcgagtatgatccgcaagagagataaaccctacacaaacagtcacacaccggtgcgaatttggaaacgccggcgaccatgggcgccttcgtcatcggagcacgataagattatcgacaaaccgatcaccgaatctccgccgccaccggcgttggtagttatgggacttcccgccaactgatcagatctgaagctaaaatctcgattcgagatgaacggaaaaatctcccgaatccgaatcgataaagacggaattggctccgtttcgtatcgaaccgccgagtcagcagaagccgccattgctggtagtcacgagccttctttcggtatctccatcgattccaaaaaggtaactcgatcacttcatcgatttgatctaattaccagtttaaaatttgggaactagggtttgattgggtaattgtttgttgcagttggaggtggtttgggcgacggatccattggtgaagtggaaggaaggtgtgacggcgagagaaggaaaggagagaacgtcgtcgttttcgtcgaagcttttacgacctgtgatgcctttgagaaaacatgggagaagcagtaggttagcgtcagctattgttaatccgagaagtgataatactaaaggaattagtggagatggagggatatcatctccggcgacgacaagtgaagttaaacagagaaatatagtaacctacgacgatatcgtttaacaccattctactacaattatagtaactttgattcttttacatattttggcaattttatgagtttagctaatcctgttggtaatctcagttgtcgaatgttgtgaaatgagttgagttttgtttatttgtatgattgtaacttataagaaagagaaggattccaaaatgggtagaagattcaaactcaaccg

SEQ ID NO: 151368 - DNA, 1467 bp, Arabidopsis thaliana landsberg
ttgaggtaaccatgttctatcactaatcagtcgaaagactattgctttgatcttaccaattctcactaaactcggctcctttatcaaagttatgcgtctatgagtttcagatattcatatagtacttctcattgttgcaccacagtacacttggacaagggcttgaaaccagtacatacccaatggagattatattttccatatctctcgccatttctgggttgatcctctttgctcttctcattggaaacatgcaggtgagtaattatggtgcaaccttagctactttcgtgatcattagaaatttcttgtaagctctttcaatggaagcatcatgcataatttgtttcctctgcataatgactatctaacaacattttgcaatcttgggacagacatatctccaatctcttaccatccggcttgaagaaatgagagtaaagaggcgtgattcagaacaatggatgcatcacagaatgttaccacaagatcttagggagcgtgtgaggcgttatgaccagtataaatggttggagacacgtggtgtagatgaagagtatctcgttcagaatcttcccaaggatctccggagagacatcaagcggcatctctgtctggctttagtgcgaagggtaagttctccccgctgttccttattcaagcttctcacatagatcacacaaccttttgaacatctaggacccattgaataacagtcggctcataattaaaacgagctcttgaccatcgacaagctagcttggttcatgatactggcgtttttaccataatatttaggttccattgtttaagagcatggacgacaagctgctggatgcgatctgtatgcggctgaaaccatgcttgttcacagagagtacctacttagtgcgggaaggagaccctgtagacgagatgctattcataatacgtggtcgcctcgagagtgtgacaacagatggaggcaggagcggtttcttcaaccgcagtctcctgaaagaaggagaattctgcggggaagagcttctgacatgggcattggatccaaaatcaggtgtaaatctcccgtcttccacgaggaccgtgaaagctctgacagaagtagaggcgtttgcgctgacctcagaggagctgaagtttgtagcaagccagttccggcgcttacatagcaggcaagtgcagcacacattcaggttttactctcaccaatggaggacttgggctgcttgtttcatccaggctgcctggcgtagatactgcaagaggaagaaaatggaagaggcagaagccgaggccgcggctgtgtccagctcaaccgctggaccttcatactccattggggctgcatttcttgccactaagtttgcggctaatgcgcttcgcaccattcacaggaaccggaacacaaagattagggatttggtgaagctgcagaagcctcctgagcctgatttcactgctgactga

SEQ ID NO: 151369 - DNA, 2357 bp, Arabidopsis thaliana landsberg
aataatttattatgtgtggttctaagctagatcacaataataaaaagttgttcttagcattattcattaaatgggtactgtagtgtgttgttcataacgcttctgatggcaactcattgacatttaatttaaggatagcaatatgttccgtccgacaatatttatgtatgtgacgtcttcgtctacattacatttcaagtgaataatgatccaacgactcgaaaatattaatagtgtaagtatttttgttgttgttgttgttgttgtaaatttggtaatgtactaaactgaaaattaaaatgttttggcaaagggtggtggtccaagacttgtttagtttacaaacaactcttcagtatttttcttttttttcgaccagccactatggtcttgttatcgatttgagtgtcaatataacctttctgaaacattacactagggtcactaagataaattggtctcttctccacttttattatttcatatacaaatttgtatgtaccaagatcttatccacaaaatttcgtttttcccaaaactattataatattattaaagaggtcaaaatggtttgtgcttgtttacaatatattcaagtttttttttgctaagtttcttacaacatttcaaaatgcatgacaatgattttacttaactcatttaagcaaataacttcgcgatacaaacaaaaatcaagttactattatataaaaatcaagatagaaactgtagaataatctatataattgttgagtacaaactttacaacttagccgaactattgattagagttcatcgggaaatgtcatatttgagtattgttggtggactcgcaaatgaacaatttagaccaccaaatagagctacattttcttatggtgaagactcaaaatcggtttgggtttagcgcatagatgggctttagtttcggcccagtgaaactctgtctcaatccttctcacctgtaaacttaaaaaaagaaacgaagaagctctttttctcccctctgaagaagaaaagcaaaatccacgagagaaacagatagaaagttgcaaaagtgcgttcgatttttgcttcttcttctgtttcggattcggatttggatttggaatctgctcctttagcagaaccagaggaaatggtgacgtacgtgagcgcgttgttctacgcattcggagggatagtcgtcgccggagtggcgctgctcgtggctttccaggagaagcttgtgtacgtcccagtgcttccgggtttaagcaagtcttatccgatcactcccgctaggctcaatctcatatacgaagatatttggcttcaatcatccgatggtgtacgtctccacgcttggttcatcaagatgttccctgaatgtcgaggtccacactctctttgatcattgagtctcctttcgattcagtttttttttcctggtagatttgattttacattttcgaataagcttttgaatctactgaattttgagggattttaggtcttgatgtctctgtctttagctaggttttgaattccttttctcagatttgtgatccctaagtcattttagctttagtttggaacttatctgtcacctaaaatctagttgcttgcggttgctagctttagcctaatgcgaagtctttctaatagattatgtttggcatgcaggcccaaccattttatttttccaggagaacgctggaagtatcctttccagagccatttcttggcttttgtttgtctatatttgtatgctctaggaacctattttatgttccatgtctgtcagctgggatactttgtcttgttacgaccttgaccttagaatcccagacatcgctcatcgtctggagatggttcgcatcatgatacaaaaattgaagtgcaatgtattcatgctttcatatcgcgggttagtttcagtttgctggtttctggtctatctcttatataaattgtttgtttttgagtctaaacattggatctgtttatacaatgcttattgattttcccgtgcaaccagctatggggcaagtgaaggctatccttcacaacaaggtatcataaaagatgctcaggtttgcttgtctccctaaatttatccacatatctcttctgttgcgtctccatgtattcattattcattttcttgcctgatattttttgttaggctgcattggatcacctttctggaaggactgacattgatacatctagaatagttgtatttggaaggtcccttgggggagctgttggagctgtgcttaccaaaaacaatccagataaggtactattagtacatactgctattggtagcatttcatgagtagggagcatgtattttattcacagagcagaac

SEQ ID NO: 151370 - DNA, 1856 bp, Arabidopsis thaliana landsberg
gcgatgatggtctcgactatatctttgggcacttatcgataaaggataagaaagatcagattgagattacgcggaacagcctcgaattgctctctagcatgttgaatactgaagggaagccgaatcacacagaggtagttgctgcgttttctgttcatttaacttttgacaatttctttaacaaatgtctgagtatggaatatggattgagttatgagtatctcctggtttacattattgtttccttggatatatgtgcttaaagtgaaattgacaggacagtgataagtaataggtttatatatattatggttacaggacgatctaacggttagcctgatggagaaatgcaagcaatcgcagccattgattcaaatgatcatagagagtacaacagacgacgagggagtcctgttagaggctctgcatctgaatgatgagctccaaccagttttatctacttacaacaagcctgatgaaaccgaaaagaaagaagcctccattgcggaacaagaatcatcaggaagcaaagatactggtccgaaaccaacagaacaagaagaacaagagcctgtaaagaaagcgggtgctgatgatgacaaaaaacattcagaagcatcaggatcctccaacaaaaccgtcaaagaagaaaagcaggccgtgaaaatagaactggggctttcgagtgatgaagatgaaaaataagcagtctgtgtttgttgtcttcttccgacatggatatcagaatgttgcgaagaattgttcttgatggtttacttttaaattataacaatgtacttccattataagtgtggaacctttttagcttcgtttctcactttctgttttaaagtggtttcttagacattgttaaaccgtaggtgaatcttcacccgaaacatttatacgaggtgttttggtttgcacttagcctattgcttatgtgttgagaggtgagtatctacttctcctctggattatataaatggcttgataaaattcacctcactctccgataaactcgctcgaaatgataaaacgaagtctaacctttaatgtgtttaatgtgttagtcttctaaattcaaataataatcggagttttggtctcttggacgatgcttcacagtgatattcaaaagtttacccttatcacccaccaactagagaagccaaattaggtcttttaccaactgtagggtaaagaactgtcttcatgtaatcattataaccaccaccatcttgttatgctttgtttcttcttcaaattccagctttcaatatacaacccggtttacgttctggtttacactttagacgtttcaaatttacaaaattgggccgattgacagatattggacctggcccatcaatctaaaaatgcgctattttgaatcaaagacctatttaaatcttccgacgacgactccgttcacatagcagaaacagtggcgacaaaccctatcacggagccaacccgcattttcctctagctttcgcaccgcctctcgctctctctccccaccggttcgtctctgacattttgtgcttgatttggccgttacaaaattctgattgctagttcatgagattcctttttgacaggtgacataaagatggatggtagcttatatgatgagtttggtaactatattggacctgatattgattctgacatagatagtgctgatgaagtagaagatgaaaatctccaagataagcatcttgaagaaaatggattacacgctcgaggtgaagagaattcaatcccatgactaagttctttggagtctcttatgcaacggcctgttctagtgcctccacatggtagctatccggttcctaatcaagaacatc

SEQ ID NO: 151371 - DNA, 655 bp, Arabidopsis thaliana landsberg
atgatcactggtggtgttggtcaaaatgtttccagtggaacccaggaaaagctgtatcagaacgttagaactgggatcagttcagctagtgatctgttgaaccccaaggattctgattacacatttgcttcagctggtcagaattcgatatcaagaactagccccaatggaagctcagaaaacatcgaaatcttggatgacttatctccaccacatttggagaaaaatggtctaaatctgacaagcgttgattccttggaaggaagacatgaaaatgaggtctcccgcgaattagatttaggtcactacatgctcacatctattaaggtcaacacaacaccggaatctggacctagcattcctcagattctacatatggttagtaactattgtcacttctgctaaatgtcgttatcgttgttttctctggtactaaaaagcatatctgatgattatgctttcacagatcaacgggagtgatggaagcccttcttctagcaagaaatctggactccagcaattaattgaagcctctgtagctaacgaggaatcagtttggaccaaggtataactaatgaaccctgccctagttggaataattggtcccgacatttataactaaaatattcatttctactgctaagattgtagtcca

SEQ ID NO: 151372 - DNA, 3256 bp, Arabidopsis thaliana landsberg
  unsure (1)..(3256): unsure at all n locations
atcctatttatgttcctcccatctgcaaactagcttggacctctcacagaaccacacaattgataccttctattgcagcctggaagtcgggataatttcttgctgtattggccagccgagctgtacacagctgttccaagccgacctttttttcctagggggtttttgtgggacgaaggtttccatcaattgttgatctggttcgttcttattaatcatttgtctgttgaagatttctttgctatgctattgccacttttgtttgaccaaatattattacaaaattacaagctatatttctcctactagttgatcatactttggaatttgttgtgtgtgctttgatcaggcggtgggatattcgtataaccttggatatcgttggacactggttagacctattgaacatagatggatggattccacgtgagcaaattttgggtgctgaagctttgaggtatttactctctctcactaaccgtggtagtcatggttattgttgtaattgttttatagtgtttctctacctgcagtaaggttccagaggaattcgtagttcaatacccgagtaatggcaatccaccaactctgtttttggtgatacgtggtaagaatctgttgttcttttatctctacttactttttcgtttgtcattgctctctttgtttcatgtatgcctttgtgtcataaaaattagtttattttactaccaatccttgaccagcatttattatagaagagggaatcagcaatatcgttatcagcttccttccgtttgttgtaccgatatttctgttcctactacaattagatgtttagaactttgtagccaagatcataagagtgctttcggcttcctactaattttgtggattgaaaatgtgacctatccttgtaaatatagataaaggcttacaattaattcagctccatatagtgacaatctctttttttcagatctgattgacgctataaggatggaaaagtttgtcgcatcagaaaaggatgaagtattgtcattccttgagcgagcttctgtacgcttagatgcttggtttcagtggtttaatacttcccagaaaggtaacaacatggatgtcctctagtgtatagatttatagaatcctttcagtcttcaactgctatgtgttttagagttagtagtaatatcttaagtgactattgcttaccaatcacaattggatttcttgttgttaatcacgatccgtagatgtgatgagtttttatatagaactgatatttttataggcttaatatggttggagtgggctagttcatatgtttagtaattaatgaattgattaaactctaggcaaggagatcggaagctacttttggcatggcagagacaacacaacaactcaagaacttaaccctaaggtactatttctttgtttctcataaactgaaggctctatttttaaccctcacatagactctgtcgagttttaaggttttctctgactttagctgcttccgtatgctctatatcaatatatgataccattgattgatgaatttttgctgcagtatattcttgttagcgacaaaatgtctcaaaatttattgggtgtgtgagcgaccatttttagtaggattgctactgtgtcagctgtttatttgcggatatggtagatcaattgacagatcctcagagatgaatttgatatcttaaatttcttgcagacgctttcgtcggggctggatgattatccccgggcttcgcaccctagtgaagatgagcgacatgttgatcttagatgctggatgtaccgtgctgcagattgcatgcattccatcacagagcttttaggaaaagaagacaaactttcaaaggttagcacaagatggaaaagaaaggggcgtcttttttttttttttttttttcacatgttactgacgtaaaaaaaaaaaatcctgcaggagaattacaattcaactgccaagctgctttcaaatttcaatcttctgaatcaggtttattctctatcagatgccaacaattttctcactttaacttcattaattttctttttcttctcaccattctctattctcattcatggataatttctgagcagatgcactatgatagtgactatggggcttactttgactttggcaatcatacagaaaaagtaagagaagcttcataaatcaacaagtctgagtgtcaaatttttgtcatatagaagaagaagaacggatgattctnnnnnnnnnnnnnnnnnnnnnnnnnnnnnnaattgatccccaggttaagttgatatggaaagaggtaattcaagaaaatggtcaattatctcgacaacttgtaaggaagacttttgggaagccaaagctaaaattggttcctcacttgggttacgtcagcttctttcccttcatgtttagaatcatcccagctgtgagttatatgtattgtgcattcgtatttaatatgctccattatccatatgattgttgaaacccttgtggaggacaacataaacataaatctttacatttttgttgcttgatgaaaggattcttcgatcctcgacaaacagctcgatctcatttcaaacgggaacatcgtatggagtgactatggactactttcacttgccaaaactaggtgagcttgcaagaacaaacatacctgagaaatttcattcttctatgattccataactactcgcttttcttcatgcagttctttgtacatgaagtataacagtgagcatcaagcaccatactggagaggtgctatatggatgaacatgaactacatgattctttcttccctgcaccattactctacagtggatggaccgtacaacagcaaagcacgaacgatttacgaggaactaaggagcaatctaataaggtatgcatgcttgtattaggtacagttgaagatatctgagcatatatggccttacttatattgtgttgttgatgcaggaacgtggttagaaactatgaccagactggaattatctgggaacactacgatcaaacaaaaggaactggagaaggtgcacgtgtcttcaccggttggtctgcacttatcctcttaatcatgtccgaagaataccctctattttaaaaaccattatgattaccaacatttgtaactttgaacatcaaaaactatccgctcgtgtttgtgaacaaaataaggcagtctctttcaaaggctttaatgaaaactatatcacaatacatcaagatttatagctcagctactac

SEQ ID NO: 151373 - DNA, 738 bp, Arabidopsis thaliana landsberg
  unsure (1)..(738): unsure at all n locations
atgaatccaggatcagtgcanaatccttacttattcgacatcgatttccccagaggtcatatcggcctcaaggctttcgatgctgaagtggttgacgaagcgggcaaacccgttcctctacacgagacctatctccaccattggattgtcgagccatactatgtacgtaaaggttccaagcttccacagagagaaatgttcaggaatcatggattttccagggaagatcctgaaagcaatcttgattccaagtcagatattattcttgtgaaaaatggagggttgtgcaggagtttaacactcagacatttctttggtttaggatcagaaacccgcgaaacctcgacgtatgttcctgatccctacgctattgaaatcggtaatcctnnnnnnnnnnnnnnnnnnnatgaattcaaatggcttcttaacattcacgcgatagacaccagaggtgtggaagataagaaaggatgcatagaatgtttgtgtgatctgtataatgttaccattgatgagtatggtcgagctataaggcctggatacaaaggaggtttatactgctgctatgataagactcaatgtcgggtgaaaagcggatttgacaatggggagaaaacaagaactctgtatttgaagtataccgtgagatgggttgattgggacagctcggttttgcccgctaaggtttatattttcgatgttacagattcttggaaagatcaaaaggagatagccgag

SEQ ID NO: 151374 - DNA, 2856 bp, Arabidopsis thaliana landsberg
  unsure (1)..(2856): unsure at all n locations
tatgttggtaagcagacgcatcgtatgtctacttttattctgaaacgacaagcatatgagatatacgtacacaagagtcgatgagcaggagagaaatatatctatcaaggcggttccaatgtctcttgtccttgaggacagtagatccaaatcatacctgtgcaatatcatggatacacctggacatgtcaatttctctgacgaaatgactgcttctttaagacttgctgatggtgctgttttcattgttgatgctgctcaaggagtcatggtaactagtctttactctctcttttttcaagtatactatttgtagtactaacgctattaatcttttttcaggtaaacacagagagagctatgcggcatgcaatccaggatcatctccctattgttgttgtgatcaataaggtacatcatgcctaaagtgtgaaattttatattttcatacatttgcttgacctttgctttttgtctgcccaacaggttgataggctcataactgagctcaaactaccaccaagggatgcttactacaagctgaggtatacaattgaagtcattaataaccatatatctgctgcttcaacaaatgctggagacttacctcttatagatcctnnnnnnnnnnnnnnnnnnnnnnnnnnnnnnnnagccggatggtccttcacattgcaatcttttgctagaatgtatgccaagcttcatggtgtggccatggacgtggataagtttgcatctagactttggggagatgtatattatcaccctgatactagggtattcaagacaagtcctccagtaggtggtggagaaagagcatttgttcagtttattctggagcctctatacaagatatacagccaagtgataggtgaacataagaagagtgtagagaccacccttgcagaattaggagtgactctgagtaatagtgcatataagctgaacgtcagacctttacttaggttagcctgtagttcagtgtttggttcggcatcagggttcactgatatgttggtaaagcacattccttcacccagagaggctgcagctaggaaagtggaccattcatacactggaaccaaagattctcccatttatgaatcaatggtagaatgtgatccatctggacctctcatggttaatgtgacaaagttgtaccccaaatcagatactagtgtttttgatgtgtatggaagagtttatagtggtaggcttcaaacagggcaaagcgtacgtgtactaggagaagggtattcacctgaggatgaggaggacatgactataaaagaagtcacgaagctatggatatatcaagctaggtatagaataccagtaagcagtgcccctcccggttcctgggttttaattgaaggtgtagatgcatccatcatgaaaactgcaactctgtgtaatgcaagttatgatgaagatgtctacatattccgggctctcaaatttaataccctcccagtagtcaagactgcaactgagcctttgaatcctagtgagctgcctaaaatggtggaagggcttaggaaaattagcaaaagctatccccttgcgattaccaaagttgaggagtctggggaacatactattctaggcacaggtgagttgtacttggattccatcatcaaggacctcagggaactctattcagaggtccaagtaaaggtatctctaatttggctctatgactgtgatttcgttgtgcaactgattactaagatttgtttgtttcctctcgctttcttaaatttgtagacgtgggtatgtcacatctgatgttcctcaacccggtactcctgcttatatcgtgaaggttagtttggtttgtgtctttctccttccttactttgttcctgttatttgagtgagtgatgattcattgagtatattctttggtgttgatgcaggcctttctgcctgtggtagagtcctttgggtttgagacagatctgaggtaccacactcagggacaagccttttgcctatctgtgtttgatcactgggccattgtgccaggagaccctctagacaaagccatccagttgcgcccacttgagcccgcccctattcagcatctagctcgggaattcatggtcaagacccgccgtagaaaggtattatgatttcctttgtttcaatgcacatcccaaaacttagtgggttttatgcggttaaagatacgaatgaaaccataaactgatttgttactctagtgtttggttaaatgaccccagtaaaccctcacaaaccaaaggatccccgaaactactgtttacaaacccggcccttgctaattactctttaaccaagtaacaccagctataatttgctggatacatcctaggctagttatattgtatgactcgttgggtgtttggatcatcagtttcagactctcacgatatgtataatttgttggttatgcagggaatgagcgaagacgtcagcggaaataaattctttgatgaagcgatgatggtagagcttgcccagcaaacaggcgatctccatctgcagatgatttgatgatctctgcacttttttcatataaatcgtgattcaggactagtagtagtatcttctcttctctatatatgtgaaaggagaacaagaaaatccggctcagttttgtaattgatgtgtcaaatttacgtttaaagttgagagattttaatgaactccatgcacagtccacatggtcacactcacacatgactcgcaaacagtttacgggaaatgttcataaatttttgtaaattgtaagcgaattcaattatggtaatggaagtgacaactaaccaatcataaattggactattggaaactgaactaggttatgat

SEQ ID NO: 151375 - DNA, 798 bp, Arabidopsis thaliana landsberg
ctttaccggtgacggaatcttacctctgacctaccaatcacgtcattccacgtcatctacccgtatcttctcacgtccttccacgtgtcccctctactcaccgacgccgtctccttcccgttgacccctcccgaacagaatattaacccaaaccctaaccctatctccctctttcacgagcttctgactcagatccggcgatatcgaattccatggaggacgatgaagacattcgatctcagggttccgattcacctgatccgccttcctcgccgccggcgggacgaatcacggttacggtggcttcggcaggtccgccttcttattctctgactcctccgggtaattcgtcgcagaaggatccggatgcgttggctctggcgctgcttccgattcaggccagcggtggagggaataacagcagtgggagaccaaccggcggcggcgggagggaggattgttggagcgaagcagctacggctgtgttgattgatgcgtggggtgagagatacttggagcttagcagagggaatctgaagcagaagcactggaaagaggtggctgagattgtgagcagcagagaggattacggtaaaattcccaaaactgatatacagtgtaagaataggatcgatacggtgaagaagaagtataaacaagagaaggtgagaatcgctaacggcggtggccgtagcagatgggtgttcttcgacaagcttgaccgtctgattggatcaacggcgaagatcccgacggcaacttctggagtcagcggtcctgtcggaggattgcataaga

SEQ ID NO: 151376 - DNA, 3621 bp, Arabidopsis thaliana landsberg
gggaaacaggaaaagcctgttgtatctgatggagctcaaaaggttattgttgctgttaaagcatctagggagtattcttttgactgccttgatttgggctttgactcatgttgttcagcctggggattgcattacccttattgttgttgtcccttctcacaactccggtacttttcctgcgtctgtttcgttgatctttagttgtttgttctggtcttgtgttgtggtggttgattcttatctcatttgctttctgatgaatttgtaggacgaaaactttggggtttcactaagagtttccctatgtttgctggggattgtgcaagtggtcatcggaaatcacattctgaagcactaccggagattaaaagtgatctcactgacacttgttcccaaatgattctccagcttcatgatgtctatgacccgaataaggttagctctttatgtatctatgtttagctatgatgatctcgtgaaatcatctcatgtttctcatgctcttttgttgttctttgtgattgctttgaagataaatgtcaagattaagattgtttctggatcaccctgtggagcagttgctgctgagtcgaagaaagcgcaagcgaactgggtagtaatggacaagtaataatctctactttcatatatatcctgttactttcctttagttttgtgaacattttaaagttgaaatctcttaatgatgggttacacaattatatttactttcaccaatttacactggtgttgtgtggtttgttttgcagacacctcaagcaggaagagaaacggtgtatggatgaattgcaatgcaacattgtggtgatgaagcgttcgcaggcaaaagttctacgcttaaaccttgttggatctcctaagaaagatgctggaaaagagtgtcccttaccatctggaccagaagcagcatctgagaaacactcaaagaacactaaaggattgttagataatgatagaggactacctgtcactcctactagcagccctgagctgggacaccgttcacaagtacagaagccgggacttcatctgtgtcgagctccgacctgggaacttcacctttcttcacattgggaatgaacggatacatgaagaaggatggagcattggtgatcaaggagaatgatggtcttgatgattctggctctgaaacagagagtgaaaaccaatcattagcgtcaacgagtatgagattccagccatggatatcagaatatattggcacccatcgccactcatcccaggaggccgaagaaagcttattatggaaaaatgatgacagggcacaaatatccactacaaaggctttgcttgaaaagttctctaaacttgatgttgaagttgggttgtcgtctagtcgaaggatggatttagagtttagtggaaacgtaagagatgcaatatcactctctcgaagtgctcctcctggtccacctcctctctgttcaatttgccagcacaaggcgccagtatttgggaaacccccaaggctatttacatacgctgaattagagcttgcaacgggtgggttttcacaggctaacttcttggctgagggtggttatggatctgttcatcggggtgtgctaccagaaggccaggtagttgcagtaaagcaacacaaattggccagttctcaaggagatgtagagttttgctccgaagtggaagttctcagctgtgctcagcacagaaacgtcgttatgctaattggtttctgcattgaagacagcagacggctcttggtctatgaatacatttgcaatggttcacttgactctcatctatacggtaatatttgcttaaaattcacatgtgccttgggtaatactaattcatattttatccaaaaaaaaatgttgcttaaaatttccattgaagctcttgtggtgaaaaatgtttgctcagtatcaagctcttttctaggtcgtcaaaaggaaactctggaatggccagcacggcaaaagattgctgttggagctgcaagaggtcttcggtatcttcacgaagagtgcagagttggctgtattgtccacagagacatgcgtcctaacaacatcctcatcactcatgataatgagccactggtatgtataaatatggtcttgctcattcatcgtaacagcagatatccactgtttcatatgctttttcgtcctgagtcaactttgataatatcatcaggttggagattttggtctagcaagatggcagcctgatggggaaatgggtgtagatacacgagtgataggaaccttcgggtgagacacctactaaagctatcattttgctcctgaaacttaacaatttgtctgttgctaaaagaaattgcttggttggtgtgcagctatctagctcccgaatatgctcaaagcgggcaaatcacagaaaaagctgatgtctactcgttcggggttgttctagttgagctagtcactggccgcaaagccattgatatcaccaggccgaaaggccagcaatgcctgactgaatgggtaatgatttcatatctttagttttcagcaaagtaacagaactgactctccttttgtggcttgtgatctcaggcacgtcctctactggaagaatatgcgatagatgaacttatcgatccgaggcttgggaaccgttttgtagaaagtgaggtcatttgtatgcttcatgcagcttcgttgtgcatacgtagagatccacatttgaggccacgcatgtctcaggtaaccagaagctcttcttgaaatcactcttcagtctcagtctcaggatcattcagtttaagtttctgatgatactaaaacttctggtaaataatgaaggtgttgcgtatactggaaggagatatgataatggatggaaactacgcatcaactccaggttcagaggcaggcaaccgaagcgggaggttctgggcggatcattacagcggtcagctaacgaatgatggctcggataggttcagtgaaaggctgtctgttgaaacgccaagactagctttgagggagagggaaagaagccagaggtttgaactaaaccataacaagcaatactaatcacactactttgctttatgataagtttagttgatagggtatttagtaaagtcctctgttttaagtgatgtggtccaaagctggcaacacagctttttttgtttgtatagtggggtaagatgcaaaaacagttgctaaatatgttatcaaggaatttaaaattgtttttggtaaaggagtattaaaagaacaaaacaacaagagaggctttttctccttttttcgaatttgaattattggtttaggagagtcaatagaattgttctgcagaagaaaacaaaacaatgagagggcttccttctccttgcgacatcgacattggaagtcttcaaaattgtaataatggtgcatgagagagaagtcatgtttgaatctgactttgcctgtcaatacagtgatgcgttggtcctcagtatcttttctacttatccgcatcaccaattatcaaaaaaattcaaaattgaacacacaagaaaagcccaaagatggcgaggactttggtgggtcagtacgttcagaggttccatggattttactcactggatcatga

SEQ ID NO: 151377 - DNA, 1454 bp, Arabidopsis thaliana landsberg
  unsure (1)..(1454): unsure at all n locations
atatggtactgcaacgaagggattatcacaaagagttgctgtagtttcttctccatgtcctcanatttatcttcaaattctctagtgactataagtctataaccaatggatttcgtcataggtatgtaacattgttgttgtagctcgattgctcaatgcggctctcgtcattcccaaattcatgttaagtgacgtttggacagatgcaaggtaactattgtaagctctccgtcctctatctctcattttctagccatttttgaggtttttacatttgtaacgatgtattgaactttaattaatacttcatatatagtcagtttggagatatctaccaagaggaacattttatggagtacttgtcgcccgatattcggatagtaaaggagctaccaaaagagcttcaatctcttaatcttgaagaaatcggtagcgtcgtgagttatacatttctccccaaatcttgacgcgaacagtctcatctttcttctctttttgttcatgttttgtcacttttacctcttaaggtgacagatatagaagtgatgaaagaagccaaaccagacttttatatgacacacattctccctatactactcaagaacagagtaatccattttgtcggattcggaaaccgcttannnnnnnnnnnnnnnnnnnnnnnnttacaggtagacattttttttactctacgcgcttctatatatctctgattatagcttctttatctaaacctttttggaagtagaggcttcggtgcagatgtaactttcatgcgctaaactttgtcccgaggatacaagaaactgcggcattgctcgtgaagagattacggggcagtggatcttacgttgcaccacttgatctacatctcctcggtccaaaatatgcttccttaatcttggacaataaggctgattctccggtgcaggaggaggcggcttcttcttcttcttctaagtaccttgctctccatttacggtttgaaatcgacatggtggctcattctctatgttacttcggaggaggtgaaacagaacagaaagagttggattcttaccgccaaaaacactttccatctctttcaactttaaccagaggaaaaaagtctgttcatcttacttcacactcatgcttccttgtcttcgattctgaacctaatttgctctgctggtgtctctgagcagaattcagactccgatgtgaggatgtatagaggacagaaggacttagtgacgtaacacccgaagaagccgtgcttatgcacgcggctcttggcttcaaccgcgaaacccgagttttcgtagctggtgcagacatatatggaggatcagaacgttgagccgtgttaactagcttatacccgaatctagtcaccatagaaaagttactaacagaatccgaactactaccgatgcaaaaacttttcatctcaggtaagacttagacataga

SEQ ID NO: 151378 - DNA, 1903 bp, Arabidopsis thaliana landsberg
cttctctaaaagaacatggcgtttcttaccgcattgttcctgtttctcttcttctctttttcgagttccgccattgttgatcttagctcggaaacaacttctctcatctccttcaagcgctcactagaaaacccatctctcctttcttcatggaacgtttcgtcttccgcgtctcactgcgattgggttggcgttacgtgtctgcttggacgagtcaactcgctctccttaccgtctttgtctctgagaggccagattccgaaggaaatttcgagtttgaagaaccttagagagctttgtcttgccggaaatcaattctccgggaagattccgcctgagatttggaatctaaaacatctccaaacccttgacctctcaggaaattctctcaccggacttctcccgaggctactcagtgagttacctcagcttctctacctcgaccttagtgacaaccacttctccggttcacttcctccatcgttcttcatcagcttacctgcactttcttctcttgacgtctccaacaactctctctccggcgaaatccctcctgaaatcgggaaactgagtaacctctccaatctttacatgggactcaactcattttccggtcaaattccgtcggagattggtaacatctcgttgctgaagaactttgctgcaccttcttgcttcttcaatggaccgttaccaaaggagatttcgaaactgaaacacttagcaaagctcgacctttcttataatccactcaagtgttccattcccaaatcgtttggagagttgcataatctgagtatactaaatcttgtctccgcagagcttattggattgatcccaccagagcttggtaattgtaaaagcctcaagtcactgatgctgtctttcaattctctctctggacctttgccattggagctttcagagattcctctgttgacgttttctgctgaaaggaatcagctttcgggttcattgccttcatggatggggaaatggaaggtactggactcacttctgttagctaacaatcggttttcaggtgaaatccctcatgagattgaggattgtccaatgttgaaacatctcagtctagctagcaacttgttaagtggttcgattcctagggagctctgtggttcaggttcgttggaggcgattgatctctctgggaatttgctttctggaacaattgaggaggtctttgatggatgttcctctcttggagagttgttacttactaataatcagatcaatggctctattcctgaggatctttggaagcttccattgatggcacttgacttggattccaacaacttcacaggagaaatcccaaagagtctctggaaatcaacgaacttgatggagtttacagcttcttataatcgtctagaaggttatttgcctgcagagattggtaatgcagcttcactgaagcggttggttctcagtgataatcagttaacaggtgaaatcccaagagagattggaaaactcacatctttgtctgtcttgaatctgaatgcaaacatgtttcaagggaagataccagttgagctcggtgattgtacttctttgactacattggatctaggcagcaacaatcttcaaggacagattccagacaaaatcactgctctcgctcagcttcagtgcctggttctctcttacaacaatctctccgggtcaattccatcaaaaccctctgcttatttccatcagattgagatgcctgatctcagctttcttcagcaccatgggatatttgatctctcctacaatagattgtctggccctataccagaagaacttggcgagtgtttggtattggtacagatttcactgagcaacaaccatctcatggaaagattccagcttcactctctcgtttgaccaacct

SEQ ID NO: 151379 - DNA, 297 bp, Arabidopsis thaliana landsberg
atggatagtggaacgataaacattaagaaatgggtagtgatatatccagtctatattaactcaaagaaaactgtagctgagggaagaagaatcagtgtgagtaagtcatgtgagaacccgaattgcatcgagattagtgattgttgcaagcatttgaaactccctagtgccgtcgaggtaattcttcttcttctaattggggttataggagaatgttatgtctttaccacagtccctatttgagatttctggttttaatagaatacaaagaacccggagatttcatcagtaggagag

SEQ ID NO: 151380 - DNA, 468 bp, Arabidopsis thaliana landsberg
agtcctctttcgccttattgtcatcgtagaagcgatcgttggtatcctctaccttgtatttagaccaaaatttccggatagcaatattgaccggttacagctcacccggtttcaactaaaccaagacttgagtttatccaccgcatttaacgttaccataaccgcgaaaaatcccaacgagaaaattggaatttactatgaagatggaagcaagattagtgtcttgtacatgcaaaccagaatcagtaatggtacgttaaaaattaaaatctgttcgtttggtcggtttaaattggttcaaatagttaaaccggatttcgttatttctacagggtcgttgccaaaattctaccaaggacatgagaatactactattatattgagtagaaatgactggttttactcaaaatgcaacaagtttaatgacgacattgcaagagcaacaacggttaacaggaagtacttaga

SEQ ID NO: 151381 - DNA, 1730 bp, Arabidopsis thaliana landsberg
agaaaagcaagctcttatcagatttagagagctcaaaagaggaagaggagaagagtaagaaagcaatggagagtttggcttcagctttgcacgaagtgtcgagtgaaggaagggagttgaaagagaagttgttgagtcaaggcgatcacgagtatgaaacacaaatagatgacttgaagttggtgattaaagccacaaacgagaagtacgagaatatgcttgacgaggcgagacatgagatcgatgttcttgttagcgcggttgaacaaaccaagaaacatttcgagagctcaaagaaggattgggagatgaaagaagccaatttggtgaattatgtgaagaaaatggaagaagatgttgcttcgatggggaaagaaatgaataggctggataatctgctgaagagaaccgaggaagaagccgatgcagcttggaagaaagaagcacagacgaaagacagtttaaaagaagtggaagaagagattgtttatcttcaggaaactctcggggaagcaaaagctgaaagcatgaagctaaaggagaatctgttggataaagaaactgagtttcagaacgtcattcacgaaaacgaggatctgaaggcgaaggaggatgtttctctgaagaagatcgaggagttatcgaagttactcgaggaagcaatattggccaagaagcaaccggaagaagagaatggcgagctcagtgagagcgagaaagactatgatttgctaccaaaagtggttgagttttcttctgagaacggtcatagaagtgtagaagagaaatctgctaaagtcgaaacccttgatcacgaacctccacaagagcagatcagcaatggaaacagcaatggcaacggtatggaggagaaagaagtgaatggaaaacccgaggtggaaaccgaaaagaaggagaagaaagatgagtcccaagatgatgacaaagatgattcggttgaagttatattcaaaatgtgggaaagttgccaaatcgagaagaaagaagcttttccggacaagaaatcagaactagagtcacaagaagaagaagaggattcaagcaaaatcgatgaaagcgacaaaacctcaacagagaacatcgatgaaaccggaaacgctttaaccgcagaagatcagcttacgatggagaagaagatcaagaagaagaagactttacttggtaaagttgggaatcttctcaagaagaaagcacctgtaaaccagaaataacaaactcttcgaggtaaggcgaaaaaaaaagtaaatcttatcatgtaaaacgtatatctgtataccccttttgatttcatcagtgttctttaatctttatatatatatatttgttggttcttgattcttttcttcttttcgattttaacaacaatgtcttccgatcttttgtttataaaggtttgcgtttttcttttattccgctttatataacaaaccgcagttttatataattaactgcaacaacaaaccgcgattttaaaaccactcaacctccatgaacgcgaacgagttctttgacaagcaactttgatgattcaaaagatcccaaaactccaagaacacacccgagaacaacgaaaccaagattggcggctcgtgtgaacttcgtcatcccgtcccagcaaatcttcaagtagaaagcagacggtaatgtcacagcgattgtgacgctaaccaaagagcccgtaaggctcaagacataaccgaagtaaggga

SEQ ID NO: 151382 - DNA, 1091 bp, Arabidopsis thaliana landsberg
agaatctataggctgagattcttcgagatattgaacctatttctcttctcgctaaagaaattcttcatttcgataggtaatttcttcaaattctttctgattattcttcaatagctgttccatgtttggattagtattgaaggtataggctcatagcttcttccagtagcttaatcaaacaacatagagacaccatatggccttttgaggtgactattacacatgatgatattcttggcttattgttgaggatcctttagcaatggatgataggattatagtggtcattgcagaaagtgagagatgctcttgtatatatcttcagtttacttgaacattaggcaaattacaacttttttctagtgaactattgacatttgaagctagcttcagagcatacttgctgttttctttgtgtagattactttttgcagttctagtgagctgttttttttttcctttttggtaagcaggtatttggatggagaacgcttagattttgaggatgagaaaattgtcatggaaaagcttcttccttatcacccatattccaaagacaaaattggttgtggtcttgattttataatggtacgtaaattcgagctaacccgatatctctctctttaagctctactcatatagaaattatcttgaggtattgtgcatagttctcgaatcaccatgatagatatatgacttacttacatgctctatccataaatcttcatttgctttatgtgcatggacttatgagtgtgctactttgttactggcaggttgatcggcatccacaattcaggcactcaagatgcctctttgttgtgagaacagatggtggatggatagatttctcgtaccaaaagtgtcttcgagcctatgttcgagataagtacccgtctcacgctgagaggtttattcgtgaacattttaagcgtgctagtagctaaaaatctgtataactgtcccactcatcatcacagcaaattctcataaatttttagctgaaataacacaatcagctatgaagctttgttgtacaaaatttataaattgctcaatctattggaagacttgaatgagttaggaaaata

SEQ ID NO: 151383 - DNA, 1657 bp, Arabidopsis thaliana landsberg
  unsure (1)..(1657): unsure at all n locations
ttttgtcttgtatcagtcttccgtggcaaggtttaaaagctggtacgaagaagcagaaatatgacaagattagtgtaaagatgatgcttacttctgtagaggtacatcattgttaaggttatgtatgcagatgatgttttcagatgtccagtagttctgacatagcatgattttacgtttttgcagactctttgcaagtcgtatccatcagagttcacatcgtacttccattactgtcgttcattgagatttgaggacaaaccggattattcatatctgagaagactttttagggatcttttcattcgtgaaggttgaaacttcttgctttgtttgttctctattcactctctattattagattgtttatggtctatgcagtctagtgggattaaaagaatcatctctagctttcttatacgcatttaatggaatggactatgcaggttatcagcttgattatgtgtttgattggacaatctcgaagtatcctcagattggctctagttcgagaccaagggttagttctattattgatttaacgtgtggagaaccaagtctcagaacaattgaataatccaaaatcttatcctgctattgttatctatgtgtctatcatttacaacagccaactccaagaccagcgttggaccctccaggaccacctgcagaaagagctgaaaagcctacaggtacattgatgttctctgtctcttatattggagggacgaatacaaagagatatatcaaaaagtttattttaagttgtaaatttatgagacagtgttgacaattttgggtgctgaaaaacgtgcactatctcacttgacccttcagatattaacattcatatgttgtttcccttagaagattttgaatttgtgtccagagatttaattaaattgttgaatagtggaagatctcaaactgagaacttctttccctattctgtttagtcggacaggacctgcgaggaagatttacaggtgcaattgaggcattcaccagacgaaatgtttcaagccaaggcgctcttggtgatcgctctagacacagatcttctgatgatataccctcttctgccaaggaagtggttagtttgtgttgttatttctcttgttgtaatgatccaaagtaattctcagaataagtagggaatcagaacatgagaaagtttgtgtgttttgatttgctggcttcatttgcagcacgagtctcgaaatggaagtacctcaaagagaggtgtgatatcaagcaccagacctggctcatcagctgaaccaagcgagaaccactcaagccgactattttcaagtggnnnnnnnnnnnnnnnnnnnnnnnnnnnnnnacagagctatgaatctgcagctgcagcaaggcctgggcatgaggatgccattagaaacttcgagctccttaccatcggctctggaaagaagaggaaatgaagatagggaaggagaagtttgatgagagtgaaaagacaacattcggtgctgatggctctctcctctgaaaataggaaagacatgtcctcgaattgttttttaaccttgggaacaagatgagaaagtgagagagagaaagagagttaatgtaatctgcctctcccaatctctcagtctctgtttttaaaagaatctgttaataaagcttt

SEQ ID NO: 151384 - DNA, 737 bp, Arabidopsis thaliana landsberg; identical to SEQ ID NO: 43481

SEQ ID NO: 151385 - DNA, 860 bp, Arabidopsis thaliana landsberg; identical to SEQ ID NO: 24936
  unsure (1)..(860): unsure at all n locations

SEQ ID NO: 151386 - DNA, 1225 bp, Arabidopsis thaliana landsberg
gtagatagtattcaagatcgcgggattaacaaggtttatataatcggtgaagatggatcacagaaaggagcagctgctatattcgaggtaggcataactacttctgatcaataattgcgttggttatttctttaatgactgtctctgcaggagattaggaaacgcaagcttaaagttgcggttgccggaatcccgaaaacaatcgacaatgacattcctgtaattctttttttccccctaatggtttgagatttcgatattgtatcgtagattcttatggttgtttgggataatgactgtttgttctttctcggtacagattatcgatagatctttcgggtttgacacagctgtagaagaggctcaacgtgctatcaatgcagcacatgtcgaagctacaagctttgagaatggtattggtcttgtgaagttaatgggacggtacagcggtaagaagtttccctagacttaggtagttttcacccaagtttagctgagcaccgaagagatgtttacggattcttaagggtttgtgcaggattcattgcaatgcatgccactctagccagccgagatgtggactgttgcttgatcccggaatctccattttttttcttgaagggctcgggcggggctttttgaatttatcgataaacggttaaaggagaagtggtcatatggtgatttgtaattgcagaaggtacgggacaagatttgttgtctgaaagcatgaaagagtccacaactctcaaagatgcctttggaaacaaacttcttcaagacattggcctatggatctcccaaagagatcaaggttaacattattgacattcctaaaaacagaggattttcgtgagacaaaaactgagaaaatgatttgctttcctttgtctcttcttatataggatcattttgccaagaagatgacccttaccctcaaatatataggtatatagatatcttatgagtttttcttttgtgtatgtggaacataatagataaagtttcttcttcttttttggtgtctttcagatccaacctacatgatacgagctgttccgagcaatgcatcagacaatgtatgctgcacgcttttagctcaaagcgcggttcatggagtgatggctggtccccatggtttcactgttggccctgtcaatggaagacatacttacattccatacaatgtgagtctcaggaccaaatactcatacctgagcatctc

SEQ ID NO: 151387 - DNA, 976 bp, Arabidopsis thaliana landsberg; identical to SEQ ID NO: 11570

SEQ ID NO: 151388 - DNA, 1678 bp, Arabidopsis thaliana landsberg
gcaattactttcatatcaatagctctattcatagtcacccaattatgcttcgtttcttgcgtgctaagtcaacaaaacgaaaccaaatttctctaccacggatttttcgaagccaatctactcaagtatggatcctccaagatcctccctagtggcatcttggagctaacaaacagctcacgaagacaaatgggtcaagccttctatggcttccccatagccttcaaaaacagtactaactcatcaaactcgttttctttctccacaagtttcgttttctcaatcgacgcaccaggtcatggcctaaccttcctcatctcgccgtccatggatttcacgcaagccatgccgagccagtatctcggtctcttcaacactacaaacaatggaaactccactaaccgaattctcgcggtagaatttgacacagtaaagtccaacgagtttcttgacatcgacgataaccatgtaggcatcgatgtgaacggtttggtctccgttgaatctgcaccagctgcatttttttccaacaagcaaagcaagaatataagcttgaagttatcgagcaaagacccaattcgggcttggatcgaatacaatggagtagaaaggcttctcaatgtcacattggctacccttgacacttctaagcctaactttcctcttttgtcaagacagatgaatctttctgagattttcatggagaaaatgtatgtaggattctcggcatccacaggaaacattacgagtaatcatgatgttcttggatggagctttagcagagaaggaaaaccacaagactttgatcttaaactacttccttcgctttcaaccccgtcgccatctgactttgatgaccttgatcccattccagatcctccttcagattcagcaaccgtaaagcctaatcacaccaagacgatgatcataatctgcacacttgcaataatgatctttatgatatgattgaaggaagaggcaaacacattggtcttatgataaagttggatgagtactctatttatgtagttacatatatcgcctctaaacctttggcaattacattgtttggtctgcttttttttccaaccacgcgtaaattggtttgttgttgttacacaagttaattaatttttgattgccaaagaaaaagttgtaatttcattctcaaactctttgcttgtcataagtttttagatgatttagtttttaacagaatggatcaggtgaagtcaacgaggtgtcatataaaaacgtaaataacaaactttttgtattcattaaattttttaaaatcaattttccttttgtattttttgcatcttttttgtctgaaaaagagagaaaggaaataaaatctcaatcgtggagatgatagcacgtgtcaatgttgcgacacgatctgatccaaacctatttatattcttcgctgctttttctgtcttgaccgctcttcttctatcgatctctgatctcctcttctctctgtcttctgagttctgtctacgcttcgtcgccgatcccggccagactccgtcttaccggcacaaaccctaggtgagcctcaagagtttggattggtttgttgtttttgttctgggggaattttattgcgtaaactcacctataatggtgttactgaagaaattcatttttccggaggacgaatttcaatttt

SEQ ID NO: 151389 - DNA, 1160 bp, Arabidopsis thaliana landsberg; identical to SEQ ID NO: 4880
  unsure (1)..(1160): unsure at all n locations

SEQ ID NO: 151390 - DNA, 1749 bp, Arabidopsis thaliana landsberg
aagtataattttctctttttgcagtgccctgataccaattacctgtttatgggatactatgtggaccgtggttattattctgttgaaactgttacggtacgaagatgaaatatttagacttcctttttttattcatttaagagtaggctgattggcaagccagtcattgtctttttatattggtaacaagataccattaacttgacggatatttttttctttacaatgtatatattttgggtgtgactatgaagtatgctgatactgtttctctttcttattctctttccagctgttagtcgccttaaagatgcgatatcctcagcgaatcactattcttagaggaaaccatgaaagtcgtcaggtagactaatgctttatgattttattactctggttccacttgtaaattcaccttctgatgttaaatacagtacttcattgtgtatccagtcttttccatcgttgagatcttggttgacacacaatttccttttttataagtctctgttttgtctacaaaattcgttttgtgcacatttttttatcatcttactattttaatctgacacaggcttttcttctttttcttccatctcgcagattactcaggtttatggattttatgatgaatgtctgcgaaagtgagtctcctggaaaaaatccttatactggaaaaaatatccttattttctaatgcatgcaaacaatttttttaattattattagcattactattgtccttatatttttgctgttgcattgtatgtgtgtatggtagcctgtccaaaattgtcttttctttctttacttcctgtttctgttaatcctttgggcttatgattacttgcttatagtattgttctatgttgtataatcttacacatcctagtttgcagcttatttgggatatagattttgcaataaatttaacaaaccatgttttcctttttaggtacggcaacgcaaatgtttggaaaatctttacagacctcttcgactattttcctctgacagccttggttagtacctatcatacatgtctcacatttttcttccttttttgttagtgggggttcacatataagtctatcctcgtccggtagtcaattaatatagatgatcagttctttgtcttgtgctggcagtattatttggaaccaaagtagtacttttgtactgtgctgtcgtatttcttttgctagtgtcacatcaattgcaagacgttagtattctgaaaaatgcaaagaatggagatctgttatatatggaagatttcatgtatgccttatctgactaaatcgttggtgttttctacacaaatttttgggaatcatcaaatcattatgttttttccctgcaggttgagtcagaaatattttgccttcatggtggattatctccatctatcgagacccttgacaacataaggaatttttgatcgagttcatgaagtgccccatgaagggccgatgtgtgacttattatggtctgaccccgatgaccgatgtggatggggcatctctcctcggggtgccggatatacatttggtcaggtaattacaagtcttacgtctcagaaacagtcctgatcttctctgttcttaaagcacgtgttgaactagacttttctcttttgtcatctagtaaccataggatatatctgaccatttcaatcacacaaacaacttatagctgatcgcccgagctcaccagtcgggtatggatggatacaactgggctcacgta

SEQ ID NO: 151391 - DNA, 513 bp, Arabidopsis thaliana landsberg
  unsure (1)..(513): unsure at all n locations
ggtcaacagatgncggcgagagtaattacatttatggcggttatggtggttactgcctttacggccaacgccaaaatcaccggagtttacaccggtggtccttggatcaatgctcacgccaccttctacggtgaagctgacgcttctggcactatgggtacacacacacacactctctcccacctcctctgtttttttttcattatagacataaatgtttctattattcactaatgatacgactttgtaggtggtgcgtgtgggtacgggaatttgtatagccaaggttacggagtgaacacggcggctttaagcactgccttattcaacaatggtttgagttgtggctcttgctttgagcttaagtgtannnnnnnnnnnnnnnnnnnnnttcctggaaacccatcaattcttatctccgccactaatttctgccctcctaactttaatcaagctagcgacaatggtggttggtgtaatcctcctcgtgagcactttgatctcgctatgcaa

SEQ ID NO: 151392 - DNA, 517 bp, Arabidopsis thaliana landsberg
caccaaccgtaaaccccatcctaaaccaccaaccgtcaaaccgcaccctaagccacccaccgtcaaaccaccccaccctaaaccacccaccaaaactcacccccacccaaaacctcccatcgtaaagccaccaaccaagcctcctccgtccacccctaaacctcccaccaaacctcccccgtccacacctaaacctcccacgaccaagcctcctccgtctactccgaaaccaccccaccacaagcctccgcctacaccatgcccaccaccaacaccaacgccgactccaccagttgtaacaccgccaacaccaaccccacccgtcataactccaccaacaccaaccccacccgtcgtaacaccgccaacgccaactccacccgtcattacaccaccaacaccaactccacccgtcattacaccaccaacaccaacaccacccgtcgtgacacctccaacaccaacaccacccgtagtaacaccaccaacaccaactcctcctacgcctattccagag

SEQ ID NO: 151393 - DNA, 938 bp, Arabidopsis thaliana landsberg
gaggaatgaaaaagatagaaagaatagggataatgaggcggggaggagcagaaagcatcggcataagagacggcgaaaagatgaaggcgccattgctagtggcaaattagtaagcagtgaggtcgagttgttagagaagagctgccagactgtggaacttgagcttcaaacatcgtctcagaattcttgtgatagcactcttcatagcaatgagagaccaaagcaaattcagagtcagccccttgatggtaggcataacgactctggtgagcttgtttgcttttacttgttgttgggtctgtttgcttatggtgtcattctttcttggtttaaagaaaccagcatacggactcggttacctgacaaagggcaggaagatcctgaggatggggtgatgatgaccagcaaggatcaaaaacagcgcttttcccgggaaatgttagatgcttctcaagctgctactgctcctaatgagtctgttggtcattcaagggtctgtcaagagaaaagaatagatccaacttttggttcgtcgagagagatcacaacaaaactcaacaaagagaagaagtcagttccttcgaaagataacagaaaagttagtaaagagaagaagatgccatcattatcttcatgtaaccctctggaacaagagaaaccgacctctagtcatcaagaaacccctggaccttccaagctattatgcaggaaatgccctccttccatggctgggcaactcttgaatcttatcgagaactgggctcctgatcgggttgagagcaagctcactgactctgaagatcaagaatggtggttgttcatcaagtttggagccaaaaggccacaagttagcaatcagaaaaccaaccagggaagtagttccatggtgtggccgactgctagatctcttcctgaagcccaagtacacgcattgcctt

SEQ ID NO: 151394 - DNA, 536 bp, Arabidopsis thaliana landsberg
  unsure (1)..(536): unsure at all n locations
gttttgcagactattcgggttaacccgaannnnnnnnnnnnnnnnnnnnnnnncaagactgttatcgtcaagcttaaatggggaatggaatacaaaggtagatttttcttcagaatgcttttgatgataagtatccagagcttatatagctaacagtcttccttctacttcacaggttttctcgcctctgttgactcctacatgaacttgcaggtatggtcttagcttctatgttcaactcgagattgctaatgttatatcatgttcttgtcattgattttgtaaacagagagtaatattttcaatgcttagaaaatctaccattagtgtgtatgtatacatatacgtagatcgtttagggcttgattggttctccttccaaccacccgcaaacgcagcgtttgcgggtggtagcggttattagcgattgccaccaatcatagaaaacgctagataccgctctggaccgctcaaaatcgtcagatttcaaaagctccttcccgcaagcgtttgcggttgcgggcggtagcggttag

SEQ ID NO: 151395 - DNA, 1861 bp, Arabidopsis thaliana landsberg; identical to SEQ ID NO: 1211

SEQ ID NO: 151396 - DNA, 1675 bp, Arabidopsis thaliana landsberg
  unsure (1)..(1675): unsure at all n locations
cagagcaaagagtttttgtgtggctagtggcatcaatggagctctcgatctcacaatcaccgcgtgttcggttctcgtctctggcgcctcgtttcnnnnnnnnnnnnnnnnnnnnnnntccttctgtgcatttagctgggaagtttataagcctccctcgagatgttcgcttcacgagcttatcaacttcaagaatgcggtccaaatttgtttcaaccaattatagaaaaatctcaatccgggtatggtttcattctaggtttctctttcgttgacaaagcatattagccgttgctttgacttttaagtcaagatgtgtttatgtgaactatgagattcctaaagatcaaatcttggtatacttaatactttatctgaaactgggcagctcataaagttcaaatcttttggccatcgatttgctccaattaggaaaatgttttctttaagggattattgaggtccaataagattactaggattggaaatggtgaatgtttgttatagaatctggaaatttttattctcttaaacaacatcttatcttacttctctaagatttgctcagttctcatgtaattctattattcagttttatttagagtgtttgtgcgttttgtaatggcactcacaaaagtagatactaccaggcatgttctcaggttggtgctgctgagtctgatgatccagtgctggatagaattgcccggttccaaaatgcttgctggagatttcttagaccccatacaatccgcggaacagctttaggatccacgtcagtatttttgttgcatatttatttatgaagaacttgatagtttctgctctcatttatcttgactgtaattttaatggcagtgccttggtgacaagagctttgatagagaacactcatttgatcaaatggagtcttgtactaaaggcactttcaggtcttcttgctcttatttgtgggaatggttatatagtcggtatcaatcagatctacgacattggaatcgacaagtatgcagcactattagatgcagatgtacattggtcactattattatttaatctaacatcactatgaagtagcatgttcctaacatgttaaatgatcttaagctaattgtcaaaactcttcactgatgtgcatctacaaaattttgttatcttggaactgttattagattctttattgtttgcttcttgaaaatattaccggtctactcatatattattcatttcttaagttcaagcttttggagcatcttgatgtgttattttggtttgaatttgaattatttgttttgcagagtgaacaaaccatacttgccaatagcagcaggagatctatcagtgcagtctgcttggttgttagtgatattttttgcgatagcagggcttttagttgtcggatttaactttggtccattcattacaagcctatactctcttggcctttttctgggaaccatctattctgttccacccctcagaatgaaaagattcccagttgcagcatttcttattattgccacggtaaatgctgttttatgcttcttaatcaatatacaactatcaccttatgtgatatttttcgtggcttgggaacttttaataacataattctgtattgacatttcttatcaggtacgaggtttccttcttactttggtgtgtaccatgctac

SEQ ID NO: 151397 - DNA, 2765 bp, Arabidopsis thaliana landsberg; identical to SEQ ID NO: 31612
  unsure (1)..(2765): unsure at all n locations

SEQ ID NO: 151398 - DNA, 1128 bp, Arabidopsis thaliana landsberg
  unsure (1)..(1128): unsure at all n locations
gaaaaaacaaaaagaacaatctttggtatctctcactcttcctcttcttattttgatcttcctcacttctgtttgattcctaataatggaacacgagggcaagaacaacatgaatggtatggagatggagaaaggaaagagagagcttgggtcaagaaaaggagttgagttaactatgagagtgttggctttgatcctaacaatggcggctgcaacagtacttggtgtcgcaaagcaaacaaaggttgtgtctattaagcttattcccactttgcctcctcttgatatcactactaccgccaaagcctcttacttgtcggcatttgtgtaagtctctctttctttccccctttcacacacacgtgtggctcgcatgtacgtttcgattgtttccaattaaggcttgtataagcccacttttaaaactacagatataaaagaattcaacttttactcctagtttctttttgtaaaaagtaattttctagtgtagaaatttttcgtttggctttgacgttatatattgagtagtaagcttaaaaaaactccctaactataatatgtgattcacagatttggtatcgaaaaatttagtaaaattgacaaaaaaaaaaaaaaactagcatgtcaaaattataaatagaagtcatgtgaaataacatgttatccgatatagtaataataatataaccgataaatatatataaaaaattatttagaaaaaatcaattaattacgattttacctttttcacagatgaaaaagtagaatttggttacgtctacatagttgaaaataaaactattaattacggataaagtgataaatttgagacgtcgaggctgataattgattagagtcttacctgttggttgcatgcgggaaaggactgctgaactaatattttgtataattaannnnnnnnnnnnnnnnnnnnnnnnnnnnnnnnnncataattaaatgttacacataaatgcatatataataccaatcatagaaaaatgactagtatactgtatacagtaaaatttgtagctaatcataaatgtccaactacccaccatgtgacacaacagcaatgttggccaaaagaaaatttttacctgacatttttccagctcttatgtt

SEQ ID NO: 151399 - DNA, 800 bp, Arabidopsis thaliana landsberg
gttatcttcattccgaaaattgctccggtgaaaccagcagccaccgccacctctttctccttctccggcgagcatctctctttccgccggtaatcatctgagacttcattattgtctccctcttcgaccaaactgacacttattccgacaaaaccctccgattagaccgtcggaatggaatcacgggttttgttctctagtcaattcaacttcccggtgaattcaccgtttaagacccgtgaaacctcgattgctccgctcacaccttcccggaatgttctctccttctctttccgtagtcccgcagagagatgtgcgatgaggattgtaccgcttgtaaaagctgcttcgtctgctccacagatagtagcggaggtcgatggttcgagagacgaaccaagaaggaagaagcttgctgtgtttgtgtcgggaggtggttcgaatttcaggaagattcatgagggatgcagtgatggttctgttaatggggatgttgttttgttggtcactaacaaaaaaggtatcacctttcttcttcttcttcaagttattgattttggtcttctatgttgcaattctagtttctctttgtgttggttcttagagttaatgaatcagaaaagaactgctaatagatgattcattagttagtggaattcgaatagcttacttgcttaagttcttcaatttagattgtggaggtgctgagtatgcaagaagtaatggaattcctgttttggtattcccaaaatcgagacgagaaccatctgatggactatctcctccagagcctgtagatg

SEQ ID NO: 151400 - DNA, 1354 bp, Arabidopsis thaliana landsberg
ttttttgtgtttatcgtatgtttcacacagtacacgcttcagtgggagttgttgggtgatcggtccgaggcgacatacaagatgaccggaaactcttttaactcgatgaaagatttcctgaagcagacaggcggctatgcggtaatagacggagggcttgcaacggagttcgagagacatggagcagatctcaacgatcctctctggagcgccaaatgccttgtcacctctcctcacctcattcacaccgtaagcagtaaatccttttcttctgttgtcagtgaaatctgaatccaacgtccagctgcgggacaaggccttgtgcttttcttattttgggtgtgaataaaccctaggatttttaggtttactttgattgattgagtaaatgccatgggtactctaaaggtggatgaagtaaagcattctcatttccatcaatggttggttgctccttggacgtttcaagcagatttagaagattactgattcaactgttgttattgacaatatttaaagctgtaaacttgtgaaccctaaacccctttctagtgttcatgttgctccattgtgtggtaatatctactcattatttgctatttccagattcagttccatggtttcttttgcattctgagtcgggaaacagggttaagattttgtttgctactcagtgatcgctttgctattagatatgattgattgtagcttacttagctgcttgtatttcctgatggagcaggtgcatctcgattaccttgaagctggtgctgatatcatctccagcgcttcttatcaggttctttacctccatcattctatgtttctttgtttatctatctcttttttggacactaacaacttggattgatgataattctgaacaggccacgattcatgggtttgaagcaaagggattttctagagaagagagcgaatctttgcttaaaaagagcgtagaaatagcgtgtgaagctcggaactcgtattatgacaaatgcggaactagctcttccatggatgataagattctcaaaaagcggcctatattagttgcagcatcagttggtagctacggtgcatacttggctgatgggtctgaatacaggttattgcttcatttttctcttatctatgtagatgatatgagtttgggttggaacaagtttctaaagctcttaccacttgccctattcagattttgatttttgtggatttcgtgtatttttgcactatctccttaaaattatcttttaactgttggtggttattataccactggaatctatggtgatttgatcacgctatggaagctgaagggattttcaacgcagacgactccaagttctggcgg

SEQ ID NO: 151401 - DNA, 1063 bp, Arabidopsis thaliana landsberg; identical to SEQ ID NO: 10535

SEQ ID NO: 151402 - DNA, 449 bp, Arabidopsis thaliana landsberg
gactataaatattcaactccaactctttcctctccacacactcaaatatctctccaacactaaaataattgtaccgactctctctctctctctctctctctccgtaacaaaaaaatcaccaatggcaaaacaatatctctttgtactcctctcaatctcctatctcttatcactggagctcacggcggccaccgcagcctcacagaccggagcttccaaaaaagccataaacttcatccaatcttcttgcaaaaccaccacataccctgccttatgtgtccactcactctccgtctacgcaaacgacatccaaacaagccctatgcgtttagctgagtccgctatagccgtgtcactaagccgagccccatccccggatgctcttcgtctcgcgtctaacgggggtggagggtcttaagtagaatgaaaccgaccccatcaaagattgg

SEQ ID NO: 151403 - DNA, 936 bp, Arabidopsis thaliana landsberg; identical to SEQ ID NO: 51111

SEQ ID NO: 151404 - DNA, 1123 bp, Arabidopsis thaliana landsberg
ccagtcaaacaaaaccttcacattctcaattattcttccgattttggtttctctcttccaatcatccttcaagctcatctttttcttctacccaataacgaaagtctcctcctttactaatgggttgcttcagcagtaaacaccggaaaactcaaaacgacggcggagaaaaatcaatcccgatcaatccagttcaaacccatgtagtccccgagcatcgtaaacctcaaaccccaacaccaaaacccatgactcaaccaatccatcagcagatttcaacaccgtcttcaaatccagtctcagttcgagatccagatacgattttaggtaaaccattcgaagacatcaggaaattttacagcttggggaaagaattaggtcgaggtcaatttgggattacgtatatgtgtaaagagattggtactggtaacacttatgcttgcaaatcgattcttaagaggaagctaattagtaagcaagataaagaagatgtgaagagagagattcagataatgcagtatttgtctggacaacctaacattgttgagatcaaaggtgcttatgaagatagacaatctatacatttggttatggagttgtgtgctggtggtgagttgtttgataggattatagctcaaggtcattactctgagagagctgctgctggtatcattaggtctattgtcaatgttgttcagatttgtcattttatgggtgtggttcatcgagatctcaagcctgagaatttcttgctttcgagtaaagaggagaatgctatgcttaaagctactgatttcggtttgtccgtcttcatcgaagaaggttatctagagactcaatatagccttttttggtctttggctatggattgttagtgttcagaatctataagcttgtatagaatctttagtggcaaagattaaaagtttggcagttcattgcattgtgatctctagcttgaatacttcttgttttccagaaacagtgagagtgtcatgaatgaaacaagcgatattgagcatggtctagtgattgagcatggatcatattatttggtatgtaagaccttgcaactgtatatttgcgctggacatgagatttattgttgccatatgttgcaatg

SEQ ID NO: 151405 - DNA, 729 bp, Arabidopsis thaliana landsberg
agctgatggagatagattcgtccagcctatgagaagctaagaagataaagaaattgtccaacgtgagaaggcgaagagatgtgtataagactcttggacatggtacagaagctgagtctgcagctattctagcatttgggagcctcttcacagctccatacaaaggctcagagctgtatatcgatatccataaatctccaaagataaaatctttggttgagaaggtcgatttccttccttttgttcgagagataatgatcgcgggaaagaaatttgcttcagaaaccataaaggcgccgtttctttgtgcacaacttagattactagatggccagttcaagaatcatcgggagagcacttttacgggtttatatcagaagttggaagctttgagcgttaagaatcctggtctaattaatgtgtttgtaatgacagaccttcctgaatttaactggaccggaacttacttgggtgatttgtctaagaactctacaaatttcaagctccactttataggggaacaagatgaattcttagcgcgaacagagcatgaacttgattcagcgagtcacggccagaaatttgggtctattccgatgagtcttgatagtataaaaaagatgcagagccattgttaccctcatggaggatccaatgtgcagctttacatagaggaagctgtttgaactgtgaattcactgggttttgttggtactccagggtctcaat

SEQ ID NO: 151406 - DNA, 1525 bp, Arabidopsis thaliana landsberg
  unsure (1)..(1525): unsure at all n locations
agcgtatagcgaggcgaggaaattatggtgcattcttgatggataatcttcctttggtgaaatcacttgttgaaaagttagctcagaacctcaatgttcctgtctcctgtaaaatccggatcttcccgaacctggaagatacactcaagtacgccaagatgctagaagatgctggttgctcgctcctagctgttcacgggcgaacaagagatgagaaagacgggaagaaatttagagctgattggagcgcaatcaaggaagtgaaaaacgctatgagaatccctgtcttagcgaatgggaatgtaagatgcatcgaagatgtcgataactgcatcaaagagacgggtgttgaaggtgttctctctgcggagacgcttcttgaaaacccggcggcctttgctggnnnnnnnnnnnnnnnnnnnnnnnnnnnnnnnnaagaagagggattcgtcgatggagggttagaccagggagatttagttgttgagtatttaaagctgtgtgagaagcatccggttccatggaggatgattcgatctcacgttcataagatgttgggagaatggtttagaattcatccacaagttagagagcaacttaatgctcaaaacatattgacgtttgagtttctatacggacttgtggatcagctaagagagcttggaggaagagttccactctacaagaaaaagaagatagatactctgactccacaagactctccacaaagggtttagagagttgaaactatacgttcttgattcattgggttttatcatttatgttgtaacaccaaatcatcagtatccaaatactatagtggtattttaaacgaattgttgtacctcgaagagatattttgaaattttaattgatctgattgaattttcacatagtttaaaaagcaggaaaaaatatttaaaggtagaaaaacgtattattttacacaaactccttccgcgattgacggtgtcaatgaccaccgtcgtgtcggttggtttgactctccacagtccacaagattttagcgcacatttaactcaagccgatggagaagaaacagagcgtttcttcttacgaccacgacagaactgcgtgctgtttttatccatcttctccaacacgtagtgcgcaagcagatcattagattccacaagattctcccggcaaagaaactcatccccacaaagtctctcaacatctctgtaataatcatgaacaaacacatgcgtcttcggattcccgccttttttactccgagcaagaaccgccgccgtgaaaatcgacgacatcctccccggtacatcttcaccgtcgccacgtggtccatcaactaagatcacatcccaatcaacatcgtatacatgattcggcaaatcattgagtcctaatttacaatctgaaaagagaagattctgcactggacgacactcgttcctcgccgcttctttaaccgccgacacaagctcacgcgcctcacgagctttggtcgtgtacttgacatcgaagacttcgatctccggtg

SEQ ID NO: 151407 - DNA, 1379 bp, Arabidopsis thaliana landsberg
  unsure (1)..(1379): unsure at all n locations
gaacattgagttttggctcttttcttgttcaccaatctcttaacttgggtgcaggcgaaaatgttttcttcaagcacgcattctctactcgataagaagatgatgtcaactncgatacaagccatcaagatatcaaagcaactaggcaatgtcattttttatgacttgaatctccctttaccactatggcactccagcgaagaaaccaagtctttcatacaggaagtgtgggatcttgcagacgtcattgaaatcacaaaacaggaacttgaattcttatgcggaatcgagcctactgaagagttcgatacagaaaacaatgacatcagtaagtttgtccattacccgccagaaactgtggaacagctttggcatgaaaatctcaaggtcttgtttgtgaccaatggcacttctaagatccattactataccaaagagcacaatggtgctgtttccggaatggaggatgttcccattactccttttacaagggatatnnnnnnnnnnnnnnnnnnnatcgttgcaggtacattttcacttgtgtcatttgtttttcatagcaatttggaagttatgcttgcgattaactgaaccacactactctctatttcaggtctaataagaatgcttacggttcagccagatcttatgaacaataaagggtacctggaacgcacagcgagatatgcaattgagtgtggtgttattgatcaatggttgctggcacaaacccgaggatatcctccaaaggatgacatggaagaagaagaagaagatgatgaagaagaagatgaagtggaatcagatccaaacggtataagatcgataacagagaaggaatacagaacctcaaagccttatgatgaaccagatggtccatacgttatgaaaccagtagaggaaagggagtacaagaagttagagcttgttggctcaatgtttgaagatggtagtttatgattttcataagatttgataatgtttctgttagtcagcttttttttcctgttcacatcttacaacatcttagtagtgtgaatttttgtcatatgttttgatatctcactcaccatctcaactaatacaaaatcacttgaaattatccggaaacagcaatgtgaaactgcagtgacgatgaacttactttaatagcaactctacttctacgtctacttaactaatccaagtagagatttatcttcttgtgatctgcgaaaggcagtgtgattctcaagtccttttgtttccggcttaacggtctgcctttgctttcgggatctctgttctcccttacatctgctaatttccagacacagttatctgattctgcatctatagactccaagaggaacactccactctttactgctttcctcgag

SEQ ID NO: 151408 - DNA, 2230 bp, Arabidopsis thaliana landsberg
gcatccaaggtggttctggtagtcgagatttctcatcaacgaagaggaaaccgttagcttcctccaatttgagtagttccagccaaagtgacagtgatagtaggtctcagagtgatgatgaaggctcgaatggaggaatgctagacagtgatgatgacaggtcagatgtgcctacgtttgaggatgttaaggaagataccattagacggtctaagcttgccaaatggctaatggagcctttctttgaagagcttatagttgggtgctttgtgagggttgggatcggaaggtcaaagagtggtccaatttacagactctgctgggtgaagaatgttgatgcaaccgatcctgacaagacctacaagctagagaataaaactacacacaagtaccttaacgtcgtctggggaaatgaaacctcggcggctcgatggcaaatggctatgatctcagatggtcatccgctggaggaagagtataggcaatggatcagagaggttgagcgaacaaatggtcgcatgcccacaaagcaagatatatcggagaagaaagaagcgatacaaagaacaaacagttttgtttactctgcggaaactgttaaacagatgctgcaggagaaaaaatctgcgtcagtcaggccaatgaatgttgcggccgagaaagatcggcttagaaaagaattggaaattgcgcagagcaaaaacgatgaagcaggtgtagagaggatcaagtcgaaaatcaaacagctcgacgcttcacggaacaagaaaggggtagataaaaaagcgcttaaacttgctgagatgaacaagaagaacagagccgagaatttcaagaacgcatctgaggtaaaatcaataactgctagtctcaaagccggtgaagcagggtatgatccgttttcaagaagatggacccgatcatcaaactactacaacgggaaaaacaaggggaaagatggagaagagaacgaggcagcggttgcagcagcggttgagaccaatggagcagatgcaggagcaggtgttgaagcgacagaagcagctttagaagcagctgcagaggcaggaaagctaatagacacaagagctccaataggtcaaggagcagaacacaatcagcttcataactttgaattgtcgttatcgctaacggctttacagaagtacggaggacctcaaggagtacagaaagcgttcatggcgaggaagcaactgaccgaagcaactgtgggatgcagagtcgcagagaacgatggcaagagacatggccttacgttaactgttagtgattacaagagaaggagaggtcttctctgatttatttgcatttttttcaagtctcagtgtttcattatcttctgaaaactgcttcttggttcttcttttcttcatatctttcttttgtactccacaaaatatgtttagatgagtttgttttttcttgaaatatttttgtactcgtttttgtgtgaactctcctgattagtgtatgactgcatgaaattagaaaatcaagtcttttgcagttttgctactcttaattagatgaatttagttatgagctaattaacagttcaatattagtttggttttgtagaagttagtgattatgcaatcatcatgctcgtgtatggatcgtggacgataaaaacaaattactcgtaacacaattgaaagagaagtgttgacttatcaataaaatccaatatctgtcattataatgcaaatatattttataagaataaaatcttttttatattaataatttattatacaaaaaaatataccattgagttttaaaatacatttcaaccaccaaccttattattgcatatggtgagtcaataattagtgtttcaattgctcaagaaaccgattaaagtcatggttatgcttggaaactatctcttgcatgtgtttccaagtaatgaatcatataaggtgaataatatttttctaattggtctggtctgattgtttcttgtgagtttcttccatggataaccatgattggtcctaattgacatttttagctacttaccttattaaactaactaaaaacctaaaataatacttttattaattctagtaatttgatacatcaaaactagaactctaccacactctttatatgatagttaagtaaaaaactattcgcacttattataatactattttgtattggtgatctcactaatactaatacacacaacctctagccttacaaa

SEQ ID NO: 151409 - DNA, 473 bp, Arabidopsis thaliana landsberg
  unsure (1)..(473): unsure at all n locations
acctctcagcagccaacaacagttatcaaagcttaagccgttttagggttttatccttttgcagagatccaatcatggtgagttcttcagtctcaatatctgactgaatcttcttctctgatttacatttttcgattgctgaacaattaatggtgaatgttgtaggcggatgttgaaccagaggttgctgctgctggagttcccaagaagaggacgtttaagaagtttgccttcaaaggagttgatctcgatgctcttctcgatatgtctactgatgatcttgtcaagctcttctcttctcgtattcgtagaaggtatatatcaaaccctagactagtctcatttttagattctgagattgatgtttgacttcattttgactgtttgtgaaatgttcataggtcctctagaggtttgcaaggaagccaatggctctgataagaagctgaagaaagcgggnatcatttcatttc

SEQ ID NO: 151410 - DNA, 568 bp, Arabidopsis thaliana landsberg; identical to SEQ ID NO: 15141

SEQ ID NO: 151411 - DNA, 830 bp, Arabidopsis thaliana landsberg
tgacaaagattggtaaaaggagaagaagaagatccattaaaccgtatctatcttttctctctccacttctatttccatggcggagggtgaagagaagaacggaattattgattcgattcctttattcgctaaggagcttattgccggcggcgtcacgggtggtatagctaaaaccgccgttgctccactcgagcgaattaagattcttttccaggtaccaacaatcattatgggtattgattctagattaccagaactaagattgatttgtcctctgactctgagtcatgtactcaaattcaagcatcgaaattagaaagcttttagtgtttgtattctgaattggttacacaattgctggattatagaagctcatgatcatgtattgatcttttgtcagaccagaagggatgagtttaaaaggataggacttgttggatcaatcaacaagattggcaaaactgaaggtttgatgggtttctacaggtacgtttgtctttagtgttagatgcgttttgggatctagttcagtcagatgattctgtaactttcgttttggtttgtgaacagagggaatggtgcaagtgttgctcggatagttccctatgcagctcttcattacatggcttatgaggaatacaggagatggattatctttggtttcccagacactactcgaggcccattgcttgatctcgtagctggatcatttgctggtggtactgcggttctcttcacctatcctcttgacctggtccggactaagctcgcttatcaagtaagctgcttcagatcttgagtttttatgtctcatctcgagataatacata

SEQ ID NO: 151412 - DNA, 547 bp, Arabidopsis thaliana landsberg; identical to SEQ ID NO: 2711

SEQ ID NO: 151413 - DNA, 1525 bp, Arabidopsis thaliana landsberg
  unsure (1)..(1525): unsure at all n locations
cagccacagcaaatcacctattgttcatatatcaagctttcaaatcagttgattttaatggaggatatgtccacctgttagttgataatcttgtaagctttcttcaagcatactcatcctctgatttcgctggattcaggtatgctataacggtgacaaaaattgttttttctctagagtagtgaacagaatcatacagattttatttttatttgttaaggtttgctaggcatagaaaaatttggggtgaatgatgtaaatcttttttacctgcagctgtacaattccgcacaaagaagctgcattgcaatgttgtgatgaagttgatccattggcaaaggtctgatttnnnnnnnnnnnnnnnnnnnnnnnttcgcaaccccaatcactatcagatagcataaatagccatcctgcttcaacctgaatgtttacttttaatatcatacagtctataggagctgtgaacactatactaaggaaaaaaagtgacggaaagttgttgggttacaacacagattgtattggttccatttctgctattgaggatggcctacgaagtaagtctatgttcacagctttttgctccatttggagaagtttcggttttagtcatggagccttctcctctgtttgttttttcaggttcaggtgatccaagcagtgtaccttcttcttcttcgccattggccagtaaaacagtggtggttattggtgctggtggagcaggcaaggctcttgcttatggtgcaaaagaaaagggggccaaagttgtaattgctaatcgaacttacggtaaaatacatgtccttaattggaaatttcgctttgtgaacaccttagattattctattaccggtcatgctcgaccttgacaatactcttcttctcctcgtcttttattggttataatgttagatgtagtaactgatgatatgatttgttttgttcctgatgttgtgtttctaaagaacgagcactagaactcgcagaagcaataggaggcaaagcgttatctctgacagatttagataactatcacccagaagatggcatggttttggcaaacaccacatctatgggtatgcaaccaaatgttgaggagactccaatttctaaggtaagctctccttgtaacagctcatccttttgttttctataggtaatgaaggaactgttctatcctttttctgttattgaaataccaaaagccagcttatcgcatgcaaactttgttgaaatcttaaatctataagacaaattagtaagctagcttgtctttgtttcccccaggatgcattgaagcactatgcactggtctttgatgcggtatacactccgagaatcaccagactgttgagggaagcagaagaaagtggagccataactgtctcagggtcagagatgtttgtcaggcaggcttacgagcagtttgagatcttcaccggtttacccggtaagtgacactaatactggaacaaaaccatgtgttgtattaaaatttaaacaaaagaagcctacttaa

SEQ ID NO: 151414 - DNA, 719 bp, Arabidopsis thaliana landsberg; identical to SEQ ID NO: 39481

SEQ ID NO: 151415 - DNA, 1972 bp, Arabidopsis thaliana landsberg
aaagaaaaaaaaactgcaacgccgtttgttgccgatctgcagcagcgcgatctctctgattatagagagctatcatcctaggtgagcttcttcttcgatttggtcttgtacaatatcctttcaagttcgatttcatcttctttcaccaattattggttttgcttccttcccgtagtttcgtttgttttctaaggttttgtgtcgatctcaaagtgagtccagggattcatatacctttagactagattagccgagatctattagtgttgatctccgtcatgtagaatccctaattaatttcagtggcctcagatccagctttcattttattgataattttgtatccttgaagctttttggatgttgtgagattataacagagcttttcctttcagcagaatagaatctctcagctaaaaggctccaaagatggcggcgtcagaagagaatagcgcattgtttcccatttttatcttgacgattatggcaattcctttggtgccttacaccatggtcaagttaagcggtgctctctccaagaaacaaaggaccattcattgtcagtgtctcgagtgtgaccgttctggaaaatataagagatccttgtttaaaaaggttactttccactcaatctcctgctctgtaatagattattgcatgttcctaacctcttcttcacttatctatctgcagatctctaacttctctacgtggagcaacttgacacttgtgctactctgggtcgtgatgattttcttgatttattacactaagaacatgagccgtgaggtaatcccattgcttgctgttgaacttgaatgcaccgctgacttatatcaactaattctacttgcttatttaccttcttttgttttacaggctcaagtttttgacccattcagtatacttggactggaacctggagttacagattcagaaataaagaaagcatatagaaggctgtcgattcaataccatcctgataaaaatccagatccaggtcaagtttttccccttgttatttttttttcccttttgatcattacggaattttggttgcagcttttgatcctgatagttttttcttctctgcgcatattgttgatctctacagaagccaataaatattttgtggagttcatatctaaagcataccaggctttgactgattcagtatcccgtgaaaactttgagaagtatggtcatccagatggcagacaggtaaagaatacatctcctttcccttcgcatgtgctcccgtcttattgacaagcctattgagactaaaatattgtaatgtgatcgcagggatttcaaatgggcattgctcttcctcaatttcttctagacattgatggagcatctggtggcatattattgctttggatagttggtgtctgtattctcttgccccttgtgattgctgttatatatctctcgaggtcatcaaagtataccgggaactacgttatgcatcaaacactctccgcatattattatctaatgaaaccctctctggccccaaggtatattcactcatacccatatacattcaagtgatgctattggtgcatgacaaatgggctgtgttttcgtttgtttgtatgacatgttttaaaaattttattgtccagcaaagttatggaagttttcaccaaggcagctgagtacatggagattccagttcgtagaactgatgatgaacctctgcagaagctctttatgtctgttaggagtgaactaaatttggacctgaagaacatgaagcaagagcaagctaagttttggaaacagcatcctgccatagtgaaggtgaattttaaaattatgcaactgtaatgctaaatattggataaactgaaatactcacttcctcaatttctgtacagaccgagctgttgatacaggcccagttaactcgtgaatcatgagtcctgtctccagcccttcagggtgatttcaagcgtgtgct

SEQ ID NO: 151416 - DNA, 1604 bp, Arabidopsis thaliana landsberg
atggccacgtggcacaatctatcacataataacgacaccgtcagaattcatcatggtaaacgaacggtcatgatttaatcgcgatccaacacaggaaagtttatgagtgtgcaatgacgaatgtatccctacagagttcagaatatcgccggcgacaatttctctctccggctaacttttttctagagaaagctatggcggacgaagaagatgagttactggagacagaactaagttacgaccagaaaaaggaaatcgccaagtggtttttcctcaacgctcccgctggagaaatcaattacgtcgctaaaggtacttagatgcatcgtacatacatatttccgacgattcctccgatgtgtccctcaatgagaaggcgagatcatagattctccgtgtgcattttgttttgttttgagcatcatgcgtgatttgacatctttgtttcgatttctgtaaatcttttggacttctgacagatttaaaggcggttttgagcgatgaggaagtgtacaataagcagccatggaagcatttccagtgtacaacaaaactcacatgatttgccttgaaatgcccagaggagctggtgatgtgagttagcatcttattctggttctattctacttagttgaaattttcatttgttgtgtcataggagttgaattgtcgaacattattgacttgtaatctctgttatgtggaattagctattctcatgatctattaagattcttagagaaatgtggctaatgaaaaggggaagagctttgaacaatacttagtggatcactcagaaggagagaactcaagtatagtttgtggtatttgtctctcttagatgtatattgctttcctagggtttttgcttcgctagctgcaaagaggctagagattagtcgatcttagaaattagggattttaaattctagtaggagttcttcaatttcgctgtttggattgagaatttttgagctttgagtgtcttggtcgtgtgtctttttctttcctagagagtttttaaaaacttgcgactgatatctacatgcaacactcttatgctgactattgttgatcaaattggcaatcaacataagtcctgcatcaccttttcatattttttgaagatgttatgggaaaaccgtttagtgtttattcgctgcgagatatagtaatactgttttgttgaatctcaggtgattgtctcatcttacagtgaaattaatgaaaatgagtaccttgatccaagaactgcccaggttgccatagttgatcatgttaaacaggtacattattttattgttgttgttcttcattatggtgtgccatgatctgtgaatctaatttaagcttacctctcctctctttgaccagatttgtacaaaggtacggcctgcaaatgatgaagaacttccttctttgtatattgaggagtacaggtatggatttttacacccagctgtaggatttaagatcaggttcatgcatcaccattcagttcagaattatcatatattcgtagcctaagttcttatggcaacaaaggcaaacatataaaaaagcactttcagaagtttaggaataaagggcaatgaagctggagt

SEQ ID NO: 151417 - DNA, 1216 bp, Arabidopsis thaliana landsberg
  unsure (1)..(1216): unsure at all n locations
agagagagcgattgtttcggtgttatagaacttaaaagcgcttctctaacgttcgagaaacgtcttgatcgttggagaagtgtagatggatatttctagacgaatgtagagaaaagcgattgattcggtcaggcccaagaccaattcgttttcaggcccatatgtattctgttttggatttagtaaggatgttaaatttatccggtttggtacgatttcattcgaatttagtgtataaaattgattgaaccgcgtcaatacggttgaaacgcaaacgcagaggattcatgagtcatggcttttgtgaggtgaagtatcaatatcatctacctacctatatgatcatcggactaaagggaaatgaagtcagcaatttcatcgtcactcttcttcaattcgaagaatcttttaaaccctaatcctctttctcgcttcatttctctcaaatctaacttcctccctaaattatctccgagatcgatcactagtcacaccttgaagctcccatcttcgtcaacctcagctttaagatccatttcctcttccatggcttcttctttcaaccctgaacaagctagagttccctctgctcttcctctcccagctcctccgttgaccaaagatagctcctttcttttcatttacctttgggttttcaatcatttcagcttttgattgatttcttcgttccatggggtattttgtagttcaacatcggattgtgtcagctatctgttacatctgacaaaaagagaaacatctctcatgctaaaaaagccattgaagaagctgctcttaaaggagctaagcttgttctcttacccgtaagtttttcttctttgtatcttagctcatagctctttgtgagttcaattctaatgttctgttgctcaaatgtgtaaaatttacaaaaagtatgagctagtggtatcgtctctatggggtttaaaaccattcaatgggtttgnnnnnnnnnnnnnnnnnnnnnnnnnnnnncaatgatagttttccagtttatgcggaggagattgatgcaggtggtgatgcttctccttcaacggcaatgctttctgaagtttccaaacgtctcaagattacaatcattggtggatctataccagaaagagttggagatcgtttgtataacacttgctgtgtctttggttccgatggagagctaaaagctaagcatcggaaggttagattttttgagatt

SEQ ID NO: 151418 - DNA, 3179 bp, Arabidopsis thaliana landsberg
catggatggacacaagtgttggagaaccccaattgggcccataataaaagccaagcccatatgacaaggtatgcctgtacatctttagggggtttatatgtctctgatgagtacaacaaaatctgaatatggttgatgagcttgaattatatattgtcttaattccttcgaaaacataagtaaatcatttggtaacttgacgtctctctactcaacctttttttttgttggcgttcttgtctctttgtatagaaaaagatgttcatatgtttgtgtactctacgttacttcttcttcttcttcatgtgacgatgatggggattacgtgcaccccttcttccttaaacaaaatccattagggagttactttttgttttgatagtgtagttgtagtggagcactgagagttatcaaatgaatgaggatctcttgaataataaagaattggagtgtggaattaggatggatctaatttcattaattaaagaggagcatgattatcattttttgttaatttaatttaataatggttaatgtgaaaaacagaggaaactagaagaagagagttttggcaggagatgtaggtggcgggagtgggttgggcgagagagatgatggtgacggtgcagctccaaatcttctctaatcttttgacacttttctataaaactccccaaactgattctctctgactgcctcataagtcattataatagtttcccccggattgctttttctttctttttgctaatcatcatcggtttcttctaatcaaaaaaaaaaaacaaaaaaaaaagagggacaacgttcgtacaatcccatccttggtatggatttctggccggagtttatggcgaccagctggggaagagagttcgtcgccggtggtttcggtggcgtcgccggcatcatctccggctaccccttggacaccctcagaattcgccagcaacagagctcgaaatctggatctgccttctccattctccggcggatgctcgccgttgagggtcccacctctctctacagaggcatggctgcgcctttggcctccgtcacttttcaggttctttttcaaagattcaccttacttttgatcacgtcgcaggaatatataaaaagattcccctactttttgatcacatctcaggatattattccataaagcaaacgaaaagatgctttcttgattcacctcttttgtgtaagatcattcatttcattactctcatacagtattatattgttgcagaatgctatggtattccagatatacgccatattctctcgctcttttgattcctctgttcctctggtagagcctccttcctacagaggcgttgctcttggtggtgttgccaccggtgctgttcagagcctcttgctcacccctgtcgagctcatcaagattcgtctccagcttcagcagactaagtccggtcccatcaccttggccaagagcatccttaggagacagggccttcaggggctttacagaggcctcaccatcaccgtgctccgagatgctcccgctcatggcctctacttctggacctatgagtacgtcagagaaaggcttcaccccggctgcagaaagaccggacaagaaaacctcaggaccatgctcgtggctggtggccttgctggagtggccagctgggtcgcttgttatcctcttgatgtcgtcaagaccagactccaacaaggtcatggggcttacgagggcattgccgattgttttcgcaagagcgtcaaacaggaaggctatacggttctctggcgtggcctcgggactgcagttgccagggcctttgtggtcaacggtgctatctttgctgcttatgaggtcgccttgcggtgtctattcaatcaatcgccatccccagatattgtcacaggagattgagtgagtaaagggcaaagaaggttcattagttgcagtctggacctgtgaatgtagttaatattagcacatagtttgagatggatttggattgcatagcattggtcaaacaaatctgactcgctttagggatcaggcagtttactaatcacagttgatcatagagacgttccagaaatgattacaaaccccaaagaaaacagatgaaatgaaaattctgttactatatacttctctctccacttctttgctaatggtttttgtagatactcaaaataagagtgccaaggaagtcctccaacatgttcccatagacacggtcactaatgctgattggtttcggatgaattttcaacatttttatgtttaaagaattggtgcaacagtctgtgaacatctccatagcctttggtggaataaataagacgatctttgatccactttgggagcttgttggatggatgagaatgagatgttcttttggatggatcattagaatatcgagcatctaccagtaaaatggatgcatagtccttttcgtgtctgattgccctacctgaaaaacaagccgggaagaacattctgtttcagtcccattatcaattaataaaacacaacctccacttatatcgtcacatatagttgaaaccacaaactcaccgattgattggttaactgctttcatacacagattttcatagtattctttccctctccttttgcagctctttaacacgccaaatcctgcttgaacatctccactgtagtaagaatcatcaaccaaagtcacagaaggttttatggaatctgaatctgcacgaccttctatatgctttattctctctaacaactctatgtcagacgggctgggatacggcaaaccaaccatcacaacacaccgacacatgctgtcgctgaagttgattccttctgacaccttcccaccaaccacagctagcattattgcccctctttcgctttctatcacttccttgtagtctctgagaacagcttctacttcagtgtttttcctgggttctctgaacacacgcttcttcttcactattcttctgagtatccctgagttactccacgctgtgtgcacctgtgtttcatactcaaaggaggagaagaagacgataattccttcaggaaccactgccacaaggttgctcattaagagtcctaactcctgtatctgccaaccatacccagaaagtcaaaatcataggttactctcagtactctttctgaatcccattaatgttaaaggaaa

SEQ ID NO: 151419 - DNA, 2569 bp, Arabidopsis thaliana landsberg
gactccgctagaagcgtgagtgctataaatggccatgcaaagataatattaggctttggcgaaaccaattttacaatgccaaggggaactcattttaaagtaaatgatgcattatattcccctaagtctcatagaaacttgataagtttcaaagatattcgaagtaatggatatcatatagagactatgaataaagagggcatggaatatctttgcataaaatccgagaggcaatatatattagaagaattgccaatgttatcctccggattatattgcacaaaaataaatataatcgcatcaaatgttacagtaaactcgagtgtcacagtacactcaagtgagtttactagtacatttaagatatgacatgaaagacttggacatcctggttcagtcatgatgcgaaaaattgtgcaaaattctaatggccatccattgaaaaaccagaaaatatataaatctggtgagttttcttgtaaagcatgttttcaaggaaaaatcataataaggccatcgccaaacaaaattgggaatggaagacctgaattcttgtcgagaattcatggtgatatatgtgggccaattcacccaccgtgcgggccgtttcgatatttggtggtattaattgacgcatcaagtagatggtcacatgtatgtcttttgactacacgaaacacggctttcgcaagattcatttcccaaataatcaggttaaaggcacaatttcctgattatgccataaagaaagtcaggcttgataatgctggggaatttacttcacaaacctttaatgactattgtgtatcgatgggaatcgatgtagagcatccggtccctcatgttcatgcacaaaatggcatggccgaatcattaattaaacggttgcaactcattgcaagaccgttaatattgagaacaaaactcccaattctatatggggtcatgctatattgcatgctgcggctttggttcagattagaccaagcgcagataatgaatattcccctttacaaatgacttatggtcaagttccaaatttatcccatctccgcatttttgaatgtgcggtatatgtgcctatagcaccgccacaaagaacaaaaatggggtcccaaaggagattgcgaatatacgtcggttatgtatcaccgagtataataaggtatcttgaaccacaaactggtgatttgtttacggcatgttttgccgattgccattttaatgaagatgaattcccagctttagggggaggaattcatcaaatgcatatgcataaagatatagaatggtgcgcaccatctttaaaatatcttgatccccccacgaagcatcgtgagctggaagtacaaaagattgtacatttacaaaatatggcaaatcaattaccagattcgttcaccgatacaagaaaggtgacaaggtcatatatccccgctacaaatgccccgtcaagagttaaaattcctaatgagctggaattagatgggagcaaaattaatgaacataaggttcaattaaagcgtgagaggcatattggctcaaaagataaaaatcctcgaaagaaattgcaagaagaaaataaaaaggttcttcaagaagaaccaagtcctcgggacgatagagaaaatcatgagatttccatttattatgcccatgatggtagcgtccgggatgacgatcatacgaatgtcgttcatccattgcttcgcccgtaagatatggatgctgggcatccattacttcctccctaatatatggatgatgtttatccattacttcttcgttaagtaatttacttcttagctaagtaagctctactatatataactcatttcattcatttgtaagttagagagaaaacagagagaaaacaataagaaaactcttgtttcgagttttattctctctagtctttattcttctttcttactttaatcttttataacaagtagtttattttccctctattaatttgccattcttttttttcttgaatcacaaattaaagttgatcattgactatttgactcttttgaccattcataagttaaggatcttaatctttcttcggcctcatcaaatgacggagtttaggaattaaacggcccgatcgagatcctgacaccaactcttgataacacatacaaagatcgagataaacacatgacgcgggagaaacgtttgatagctgtagcatgacgtggggggcaaggatactggtcgcccaatagaagaagaacgccgatattaaggaaatgatgactacaaaccatttcacgtgcccaaccgcagtaaccacaccacaaaggaatgccaatggcatgcagagtagagaaaaaagcagtaagggcaaggccacatttaaggatgatgaaacgagtgatggatcacccaactgcgcccatataagagtacatattgatgcaactgatgtttgcattgccaatatgtcaaatagcagaaaaaagaagagatttgggtcagtggtcaaagttgctcttcctaagtgtggagcagagctattaaagcaacctggtattgtaaaacctgcagcaaacgtcattgg

SEQ ID NO: 151420 - DNA, 878 bp, Arabidopsis thaliana landsberg
tgcaacttataacattcttatgggtgggtatgctagaaggatgcaggctgatatcattgagacacttctgcgggagatggaggatttaggtttagagccaaatgtgaaatcgtacacgtgtttgattagtgcgtatgggaggacgaagaagatgagtgatatggctgctgatgctttcctgcggatgaagaaagtaggtttgaaaccttcttcacattcttacacagctcttattcatgcttactcggttagcgggtggcacgaaaaagcttatgcttcctttgaagagatgtgtaaagaggggattaaaccggcggttgaaacatacacatcagttcttgatgcattcagacgatcaggcgacactggaaagctgatggaaatttggaaactaatgctgagagaaaaaatcaaagggacacggataacatataacactcttctcgatgggtttgccaagcaaggactctacattgaagcaagggatgttgtatctgagtttagtaaaatgggtttgcagccgagtgtcatgacttacaatatgctgatgaatgcatacgcacggggaggacaagatgcaaaactgccgcaactgttgaaggaaatggctgctcttaacttaaaacctgattccatcacatattcaacaatgatctacgcgtttgttcgtgttcgagacttcaaaagggcattcttttaccacaagatgatggttaaaagcgggcaagtaccagacccaaggtcctatgagaaacttagggcgattctggaagacaaggcaaagacaaagaacagaaaggataagactgccatacttggtataattaatagcaaattcggtcgggttaaagctaagacgaaggggaagaaagatgagt

SEQ ID NO: 151421 - DNA, 1101 bp, Arabidopsis thaliana landsberg
atttttaatatttagtcgttatcagtatctagctttgatcaaatgttgtctcagatacttcaaaggtcccgaacttctagttgatttacaggactatgactattccttggacatgtggagcctcggttgcatgtttgctgggatggtgagtaccttgcgaaatgctaggcttccaatgctacatttatatatgatcattcttttcaaaaattttccaaaatatagtatcgtaatgatgaagtgtctaaattatcttttcttgtagatattccgcaaggaacctttcttctatggccatgacaaccaggatcagctcgtcaaaattgccaaggtaatcaaatgcgtgggtaaatgtgggaattttagagggattgagtgttttttcacatctttagagtgtatgtttgattcttgactcaggtactcggaactgatgaattgaatgcatatctgaataagtatcagttagaacttgatactcaactagaggcacttgttgggaggtaagcagaactcacatattctctctatagtataagagtagattaaagcagtgccaatgaccaatcctctttccacagacatagcaggaagccttggtccaaattcatcaacgctgacaataggcatttggtctcacctgaggtttgtttactttgttctctgtattctataagaaacacaaacgcttttgtttgttgccatggtttctctctcgagctgtaactttgttttaaatgtaggcgattgattatttggacaagctgctccggtatgatcatcaagacagattaactgcaaaagaagcaatggtaagtatcatataacgtaactcaaacaagttttcgttctcatagtctgctaaattgtgatggttttatgaattgatgacaggctcatccctatttcgctcaagtcagggcagcagaaagcagcagaatgaggactcaatagagatgtctcggccgatttttgtttcttcttcttctccagtgtgctcttttgttgtttactaatacattttcatatacatagttacatacatggatttcttttacaatgtcgaaattactttaaattatggatttctatatatgagaa

SEQ ID NO: 151422 - DNA, 924 bp, Arabidopsis thaliana landsberg
ttctttttttataaatgcttcaatataatatcaaattaaatctatatgccttgttgctaatttttgtttgttaattttacagaatgagctcttattttctgaaatcgactacatgcagaaaagagtaagaaataaatcttaacttaatttctattcttaatatgttcttataataattttgctcatttgcattgcaccgattaagcaggaagttgatttgcataacgataaccagattcttcgtgcaaaggtaaaagtacacattatatatcaatttctataattttccctattgtttcaataaatattatatgaaaacgattaaaatggtgaaagtacttgtagataaatagtttatgacatatatttgtgtaatgtagatagctgaaaatgagaggaacaatccgagtataagtctaatgccaggaggatctaactacgagcagcttatgccaccacctcaaacgcaatctcaaccgtttgattcacggaattatttccaagtcgcggcattgcaacctaacaatcaccattactcatccgccggtcgccaagaccaaaccgctctccagttagtgtaaggacacaaaatcttgctccgatcaatcattctagtcttatattattaatcggtccattttgtaaaacttgacagcatggatttggtcttttatgctgttttgtaggtaatattggctgaaggaaatggcctggagtgaataaaaaccagaattgggttgagcaagcaatataaagctaatgcatgttatatatatatttatcccatgaatgttgtatcagtgaattctatgcttatgttgatgtgaaattaatatcttaaagacatgtcattaatgtgcttaatttgcttcaaaacatctatgtgtataagtgtactattagttcaattgttgtatttaatta

SEQ ID NO: 151423 - DNA, 3250 bp, Arabidopsis thaliana landsberg
  unsure (1)..(3250): unsure at all n locations
cacactactccaatgacgagagactctatcaccgttacgatcaccgagtatttcgcagctcgtggatgtcccgatcctagctcattcgacaccctaacactgaaagaaacatctcgcatatatatataagtctaattaacgccttcttttagaagacacaaagattgctttcgctttttaccttatagctgcattgattcctatgaacaacattccttcccatccattaatgttcatactgagagaaacaaaagtgttatcagttatcagaaaaagaatgtaaatctttgagtttgtgaagggttctaacggttaaccagattgagagagatccaacggctatgacagggtcttcaagatgtccagttaagacaatgatcgtcatgaagtaccaaatctctagacaaagcataaccgcagacgcaaacgacagtttcaaaaacggccaaacgtcttgaaacgctaaccaagacagccctttccaaccgtctttacaccacccgacaacataaacaacctgagcgatcgcgattccccaagccgagacatcaaacgcagccgctgcgccgtttagcccccacttgaaaacgtttataaagaggtagaggatgaaaatgtgaagggtcaaagcgaagaaacctatccatgccatgatccctactttgctctgtgactggagaaacttctgagtcgggaaattgatagcgagcgcaaacatttgagggatgatttgtgtagtgaatttgccagagatctctgcgatttcgggttcttggccgagtaaaatgagaagtggagttgcgtagatgtagagaggaagcaagcagacggaagttccgaggaggataagccaagaacgctgcatataaacacctaacatatccatttgtcccgctccaaacgcttgtccacataacgtttccaacgcactcgccattcccagctgcagtttttttctagaaagttagagaaaacgcaagaaacagaggaggaaaaaagcagagtagaggaaggttattttaatcaccaagaaaccaaaggagaaattagagacgacggagagagcgatggcgacggcagaaagctcaagatcgccgatatggccaacgaagatgcttgtgaaggagttaacaccgtaattacaaagaatgttgaaagctataggtgcagctatttcccaaagcttagacgtttcaaccacacaaacaagtttagcatctctaaagctttgaatgggaggaaaatcagcgtctcnnnnnnnnnnnnnnnnnnnngttgacggcgcgtggataagcttggtcgtctcatgctctgtttcgaagacagagactttgacgacaagcggagaggatggaccgctatcgatggcgtcgtcagctgctaaggagatggtttgttgtaatggtccggcagaggatgaggaggatcttctctcctctcgaaccgggatttccattttcaccggttgtggcaatatttgtcttagtttttatatttctctacttggggaggattagagacatgaggattgaaagcagacaagacaagagattcttttttatgtttgttcttgtaatttgtgtttctggtttgcctaagattaaggttagccgtggagtagaagaagagagaacatgggtttattgtgcccgttcatatagtttaaagtatcgacatgggttattgattcaatcacgtaatgattctcatacaatacattctgtattttatcatgtaatgattcaatcacgtaatgattctgtagttaacataatgcaaggtacaaaggtggttgttgtcactttcagtttcagtttcaggaaatggattctcttgtgttgccgttgtttttacgcaggagtgacaaacacttggtcagattgagatttatggcattggttctgatgttgagatgcttagagaagctgttttgaagaatggaggtgggtggcacgggcatgggtgggtggcacgggcatgggtgggttggtgatggaaaatggattgtaaagaaaggtaatgttagctcaacaggaagatgtttgagctgcagtgagcagttagcttgtgaagataccaatgaggtagaaacacagaagtttgtcgattctttggtggctttggctatggaaaggaaggcaaaaatgaattcatgtgagtcagatgtggtcttcagcgagtttcaggttagagaaagaattgatgattccttgattctcttagcttgcttataataagtcttggacattaaataattgcatgagatagaaattccagagaatgaaagtttattctttgtttacaacattaaatgttggtatctatttggcaggactggcttgagaaacatggagattacgaagctatagtagatggagcaaatattgggctctaccaacaaaattttgtagatggcagtttcagtctttcacaggttctcccatctatttttgggtacttgtttttcttcctccatatatttagaatccattccttgctatactgatgacacatacatgtgggatagagcagcttgaatctgtggtgaaggaactttaccgcgaaagtggtaataacaaatggcccctaattctattgcacaagagacgggtcaaggcgctgttagaaaacccaactcaccggaatctggttgaagaatggattagtaacggtgtcctttatgcaactccaccaggttccaatgatgattggtatgaacttttttagcttttcttacagtaccattagttcgacaaaaaacacaaacaatgtttggttactacactcatcttttgtttctttttctacctttccaggtactggctgtatgctgctgctaagctcaagtgtttgcttgtgacaaatgatgagatgagagaccacatttttgaactcttagggagtacttttttccaaaagtggaaagaaagacatcaggtaatgttatataaacttatatacaatatgtaactttttatactaaaagtgtaattttgagaaatctacagttagagcatttggtttatggttttggtacaggtccggtatacttttgtgaaaggtaacctgaagcttgaaatgccgtctcctttttcggttgtcattcaggtttgtttaccatctcagtcctttttttctccggtttcgatagtttctcaattacgtttcgacaaaatcaggaatcagagaaagggtcatggcatttcccggtctcatgcgaaaacaatgaagagtcttcaagaacttggat

SEQ ID NO: 151424 - DNA, 534 bp, Arabidopsis thaliana landsberg
tgtcctagctcatcaatgacgtgaaaatgggaatcgagagtcgtcttcgagacaagattccagagatcatgtccgttgagcagtatcttgaatccgagacaggaggtttagagctgatcgatgagatcattgagaaggtttggttttttaaaggtttagttatttttggtttattagccccttggttttgaaattgatctgaatggtccttttgtggtttgttgtcaatttaggttctctctgagttaaggccgtacctatccggtactgcaggtggggggcttgagttagttcagattgatggttacgtggtcaaggtttgactcactggaccagcagctggagtcatgactgttcgtgtcgcgttgactcaaaaactgagggaatcaattccttctataggtgcagtccagcttctagagtgacgttaacctttttattttgtaacttatatacaaggtcctatttttgattcaatatattttatttcccattatataattagaacaacaaatacaatatccatttctgttg

SEQ ID NO: 151425 - DNA, 1042 bp, Arabidopsis thaliana landsberg
tgatctattccggtttgcaaccagtgggcattttggttacttactgaaatgtcctcgtgttttggtgttcacttaattgttctgtagatctttatattattgtggtgtcaatatgatttggttctattgttgcttcttctacagcgatgttactagctcgtagttcactttaatttatggaaataaaattgttctgtaacgttgaactgcaagcaaattcagcatctttgtttgattgatgataatctcactcatccgttctctgtagctaaaagaattttctcgaaagtacggatctgttcattaatcatttaggaggcaataagccaatgaacgtgtatttctcatgcatttgtagttagtaatactagcttgttgtttggattacaggatttgagattctagcttttccctgcaatcagtttggtttccaagagcccgggtcaaactccgagatcaaacaattcgcttgcacccggtttaaagcagagttccctatacctgataaggtataaagaatccaaaacattcattcaaaattattttcaggttgcagattctaaataagtttgaattcgacaggttgacgagaatggaccaatcacagcgccgatctacgagttcttgaaatcaaacgcaggaggattcttgggtggtctcattaaatggaactttgagaagtccttgattgataaaaagggaaaggtcgttgagaggtaccctcccaccacatcccctttccaaatcgaggtatggctaatggactacttcctatttggttcatagcggttctattccctgttagtaaccaaaccgttttgtttctgttttgcagaaagacatccagaagttgcttgccgcttaaaaacttttgctcatgagtgagcatatagagactgatggttaaagtaaccgtaaattgtgacataaagtttccggttattgcttgtataccttcttacattctaagttgtactaatcgcttaataatttgcgtataatggtaatgttatatacattatattataaaaatggtgttata

SEQ ID NO: 151426 - DNA, 667 bp, Arabidopsis thaliana landsberg
cgtagcaaagtctactgaaaccgacttcgaccaactgaagtctgattcccttaaagatatcagtgtgttgcatggcgtcttgcccaagttacctcctcctcacgtctctccggaaggaattcagatgcgaccaataatggcaatgcaagtcaccatcttccctggagctggaatctgtataggcaactcagctacacatgttgtagcagatggagtcaccttcagtcatttcatgaagtattggatgtcattgaccaaatccagcggcaaagatccggccacggttcttctaccctctctgcctattcacagctgcagaaacataatcaaggacccaggagaggtagccgcaggacatttggagcggttttggagccaaaactctgcaaaacacagttcacatgttacgcctgagaacatggtcagagccacttttacattgagccggaagcagatagacaatctcaagagttgggttacagagcagtctgagaatcaatctcctgtttctaccttcgtggtgactctagctttcatttgggtaagcttaattaagacacttgttcgaggcagtgagacggaggccaaagtccaactcacccacctcatgagaacggtgcagtccgagaatcgtattcagaccctccaggacatgtgagggcagcgt

SEQ ID NO: 151427 - DNA, 526 bp, Arabidopsis thaliana landsberg; identical to SEQ ID NO: 14371

SEQ ID NO: 151428 - DNA, 678 bp, Arabidopsis thaliana landsberg
gcaaagctttagtgcttcctagagcaaaggagaaaaaaaatggtgaactatgtgctcaaaatcaccgctgatctcgagaatctcactaatctccaaccttccggtggctgcgacgattccaacttcccttacctcttcaaggttacccgttaccctcccttttcgcaccagttttatgctttggttcctctcttttgatttccttggtttcgttttagctgggtacgattgattggattccttagctaggctcatgttgagaaataagtgacttccatggatctgaggctcattaaagcttcttagggtcttcatttcgccttgcgaattagaattctatggaattgagtctgacagaatggtattattaagtgactatctagggttgtgagaaacaaaaactcttagggcttatgtttctgcaagtgttcaagatcaaatgtattactgctcctgcttattcttgcttgttgtgtatgcgattaaaagtcgtttagtattctcccttcacatatatcagtacgaaatattaacagaaatgttttttcttgctattagttgaaatgtgaaagatgtggagaggtgactccgaaagaaacatgtgtgactatgaatgagacttttactcctccgggaggtaggggtacttgtcatctagttcagaaggtaatttgttca

SEQ ID NO: 151429 - DNA, 846 bp, Arabidopsis thaliana landsberg; identical to SEQ ID NO: 44063

SEQ ID NO: 151430 - DNA, 1024 bp, Arabidopsis thaliana landsberg
accatgaaggacctattatagctctattgtgtcaaacggaaactaggcctggattttggagtatcacaaatcctgaaataatctaggtttacaagcttgtctgtgatgtttcgtcatcatttttaatgaattccgcgatacgttatggatcatatctcacattttctcttgatagttaacctccattgtaagagacaactacatgcatgtaagcagctgttggatgtctagcaattataaacctaatagaaaaggcttatacaagatgttgtgccaaaattggtgtaacggattctgtttcttacttttaataccaatgcttaactttcggcctgctgtctgatccgtctagacctacttttaatagttatgagtttcgtctggtgcttatgttttgtgtttcatcatatatgccagatcttcgggatgacaaacagttcttcattgaccaccctggcgctgtaccaattactactgctcaggtaaacagaatttttctttgaaatgtgtcaatttacttagcctgttacttaaacgaacccttttaaccgttcaccactttgggcatcaaagggagaggaactgaagaaactaattggagctcccgcatacatcgagtgcagttcaaaaacacaagaggcaagacacaaaaactttcccttttgttttgagtactactctgcttctttacttagcttttctcaaagcttttttttaatgaaattgcagaacgtgaaaggagtatttgatgcagcgatccgagtggttcttcaacctccaaagcagaagaaaaagaaaagcaaagcacaaaaagcctgctccattttgtaatttctctacgcttctcttacgtatctctctctgtctctctgtctcttccactcttctagtgaaggcttaagaagaaaacacattgggcttaaaaattgttccagagttcgttgtgataagctctcttaatccttaaaaaaacgattatttctgtttattgatgaatagtttccagctttagctgagacctaat

SEQ ID NO: 151431 - DNA, 602 bp, Arabidopsis thaliana landsberg
ctctctgtctttactcattgtcgttatggtcgcgccgcctatagccgccgcgtcgttagagctccctcctccgttccccgccgtcttcgaacaaccaatggagaaactcaccttccctaacgagttcccttacgagtttgcctcctcaacgttttcaacttctccggaagactcaaaggagacagaagatgaaacaaccgacgacgaagatgacttcttagccgggttaactcgcagactcgctctctcgactcagcgcctctcttctccttccttcgtcaccgacaagtctcaggtttgttaaagcttctctctttttccaatttttcaaatgttctctcaatgtagactaaacactcacagattcttgctctgtttcttcagatgaaacccaaagtcacagagtcaactcagagtggactcggaagtcctaatggtccgttttctcaagtcccttcaccgccgacatctccgtctcgtgaagaagactctttgaaagtgttatctgctgcagctggagaagtcgccaagatcaaaaaggccaattttgatgctaaacccatcagctacccaaaccctaaccctaattacttaaccagctt

SEQ ID NO: 151432 - DNA, 856 bp, Arabidopsis thaliana landsberg
aagcatgttcccacaaggaacaggccaatgctacgaattctaggtttttttatatgtgcagctttcatctatctatcatttcgagatttgtggttgaatcacaaagggaaagcaaagttagggtttgtgaaaaggaacggaactcagtttgtggtggatgataagcctctttatgtaaatgggtggaactcgtattggttcatggaccatgcggttgatgaacatagcagaaaccttgtcggtgaaatgcttgaagctggagctaaaatgggtctcactgtttgtagaacttgggctttcaatgacggtggctacaatgctcttcagatctctcctggccgattcgatgagcgagtctttcaggttttgatgattcttcctcttttttataatttcagttatgtggtgatctctctctgtccttgtttaatgggatttgtataatgttggttaggctttggatcatgtaattgcagaagcgagaaagcatgatgttagattgttgcttagcttagtgaacaacttgcaagcttatggagggaagactcagtatgtgaaatgggcatggcaagaaggtgttggtcttagttcttccaatgattccttcttctttgatccatctatccgcaattacttcaagaattatctcaaggtaatggtctcttgctgattatgattgaacattttaatcattgagtgatagtgagtgatagtgagagcaagttaaatgagtaaagattgaatgattatttcctaattcgcaggttctgctcaccaggaagaactccgtaacgggaatagagtacaaaaacgatccttcgattttcgcttgggagttgataaacgagcctcgatg

SEQ ID NO: 151433 - DNA, 644 bp, Arabidopsis thaliana landsberg
cctaaacttaagctcctggttcggaactatttactttcctatgcgatgggttgtttataagtttttttcagagttcggattcttgtactcattagatgtccatataggtcttgtttactggtttaattggggttttatcaaggaaataaagagtgtttagggtttgaatttccgtgtttgcagatggcgagcaatatcatcttgttcgaggatatcttcgtggtcgatcagttagaccctgatggcaaaaagttcgataaaggtatacactttattagcctcactcacgatttctagtacttctcatggcttacatcgacgtttgttcatagctgtttagttcatgtatgtattgtgaatgagttcttccgtttatccttttttggtctgagtgtgtgggttttgtggaaaaatttaactttttaagtttttagtctcccccaagttttgttctgtcttcagattgagtggctttctcttaaacctacaatgatttttgttgtgtttgtggttacagttactcgcgttcaagctacgagccacaacttggaaatgtttatgcatttagatgttaatacagaggttatatccattggctgttggtgataagttcacacttgcgttggctcctacggtggatctcg

SEQ ID NO: 151434 - DNA, 1053 bp, Arabidopsis thaliana landsberg
tgtctctgccgtaaagcaagtcgacgtggttgtctccgccatgtccggtgtccacttccgcacccacaatatccccgttcagctcaagctcgtcgcagccatcaaagaggccggtaacgtcaaggtaaaaggactcatacatcactaaacacttttctttctagtgtagttgttacctttttcatcagagtttaaagcaatttaaaataccgattattgtagctggtattccaaaaaagttgctttggcaaatataccaacataaattaatagtatatgtgttaaaaaaatatgaaggtacaatgtatctgtctgcatcaatgacatatgcatcaatgacatatgcatcttttgaaaatagctgatatattacggctatattttgctaacaatcgcaaatgaattgaatttaactctatagacatatactcatttttaaaaatttaatcattttcttggaacagataaagatccgtttgtaagataattgtgtacacaaaagtcacactttttgcttaccaataacaaagtttgaataagcttgcatgcattattgttcaaagactatctaaaggttttatttttacataatatattgtaatggtggaaaacccttctcatagaatgtggaatggagatggtcttagcttttatgttccggggtgcttaaactaaaattttaaaatattttcagtgaaactacttacaataagttaaaaaatatttcagcgtttcttaccatcagaatttggaatggatccgtcacgtatgggacatgccatgccaccaggacgtgaaacattcgatcaaaaaatggaaatacgaaatgcaattaaggccgccgggatttcccacacataccttgtcggtgcttgttttgccgcatacttcggcggaaatttatctcaaatgggaactttgttccctccgaaaaagaaagttgatatttatggggacggaaatgttaaaggttagaagaactcttatggaacgctctctcttcatatttttatttttttatttgtgtcacttctataatcatgaaaattctaa

SEQ ID NO: 151435 - DNA, 974 bp, Arabidopsis thaliana landsberg
  unsure (1)..(974): unsure at all n locations
cagactcaacatgttgcagcacactcaaggtaaatatagacaaagggcagaccagaaaatgtctatgtactctagtcaaagacagggatgatcctggtttggggttcaaagttgatgccaaccgtgcaatgagcctcccttccgcttgtcatgtccctgcaaacatctctcaatgcccaggtgagagatttcatatcttctacaatannnnnnnnnnnnnnnnnnnnnnnnnnnnnnnctagattgttctcattgtttcattttgtttggaacaagatcttctacatctgcttccagattcaccagcctctcaaatatttaagcaattcactgaatcttcttctcagactgttggacataaaggtactaataacaattcttacagtttttgattctattcgtgcaaacattaattttccgtttttctcggaactaaaagaaaacgaataaaaatattgcagcggtctccacaagctcaagcatcaaaggaagagacaacaagcaatttggtttaatgatggctggtgctctctcaatatggtatataatgtaaaatcctctgtgatctaaagttgatgaacacaataaccaaaatcattatacgagtcatatctactagctgaagcagatgtatcatggcttattaataagaacttattgagaaactcttaagcatcatagaatgcgattagaagaactctttgaagcatatcatatacaaaaacagctatttagtttcatggaaacgcattgaaagaaagaaaaagaaagcttaaaataacacttgacaaacatggacatgatcaccaattaaaaatctgctacagattactcactcactctcctcaatgaatctgatgactcctttagccactaagtcatcaatctgggcctgaaaaagcttcttttgacgaacattttccttttctagttgatgtaatacgccgaatgcgactggtaaacctatcaccgat

SEQ ID NO: 151436 - DNA, 290 bp, Arabidopsis thaliana landsberg
gatttgaccagtcttctcatcgaccttgatttgaacttcatcacatcaccacaagcgggacgtcctacgagtcccgtaccaacgttgggatcattcttatcgaaagacccaacgttgcggggattatcgtagtggtcgatgacgttctcatgggtaggttcgggacggtagcgctagaccacgggtgttgattgacgtgacgtaagccctagagccgtcttcgcagcttgcttgagcatcatcgtgttttttttagggtttcggaagtaactttttctccgtttattttg

SEQ ID NO: 151437 - DNA, 999 bp, Arabidopsis thaliana landsberg
  unsure (1)..(999): unsure at all n locations
gaaaaaaaaaaatcttcagattctgtatttgcttaattcatttattaaaatttagatttattttatttgactacaatatcggatctttaatacacactttttttggcttcttatcaaatntgcaggaatatgtgtacaaccggcttaaattcaggtaatttaaaagtcaaatctttattaattaaaattcgaatagtagaagaagtataatatgtgtgtgtgcgcgttgcagttatggatggtatttcacgtttgcgcaaggattggtgtacattgccttgatttacatgtatggcttcaggacgaagcaaatggttaatccatggaagacttacgtgaaactatctggtgttcttatgggttctcatggcctcaccaaaggctccttggcttatctcaattatcctgctcaaatcatgttcaaatccactaaggtatataatatttcacttaaccaactaatggtgtatatatatcctatagatttttatttaaaaaaagaagtaatgcatggtatagtccaataccatcattagttgagcgagggatcaaagtttagattaatcggtgagatcaatttcgttcaatatatatagatcattgcatttgtttatctcggctttgtaatcaaagactccttacattattacattgtcagtaacggtttgaactcacatggattttgtatcaataaatgttacggtaggaatttaaaaagtcacattcttgtttaatcccaggggtattggttagcaagatatgttacattttcttaattggtgaatcattgtgtaattctcgcagtatctcttaacattgatttcttcctctgttatctaggttttgccggttatggttatgggagcttttataccagggttgagaagaaaataccctgtccacgagtacatatctgctatgttacttgtaattggnctcatcttattcacattggctgatgcccatacctccccaaacttcagtataagggggttatat

SEQ ID NO: 151438 - DNA, 856 bp, Arabidopsis thaliana landsberg
aataactgatggcaccattgctggaagccatctgaagatagaaaagcttactcattacattaagcatcctcgtcccatagagccacctgcagagacagcacctccgccaccccaacctcttatactgacaaagaaggaacagaagaagctgcgaacccagaggcgtctagcaaaagaaaaggagaatcaggagatgatcagacaagggttgctggaaccaccaaaagcaaaggtgaagatgagcaacttaatgaaggttcttggttctgaagcgacccaagacccaacaaagcttgaaaaagagatccgcacagcagctgctgagcgtgaacaggctcatacggataggaatgctgcccggaagctaactcctgcagagaaacgtgagaagaaagagaggaagcttttcgatgatccaacaacggttgagacgattgtgtcggtgtacaagatcaaaaagttatcgcatcctaaaacaagattcaaagtggagatgaatgcaacagagatcagattaacagggtgtagtgtgatcacggatgaaatgagtgtggctctggttgagggcaagagcaaagcgatataaagatgcgggaaagctgatgatgaagcgaatactctgggaagagtcagagatgaaggaagggaatgaacacgagtaagaagaagtgaatggcggaaacaagtgttggttggtttggcaaggaagtattgggaaaccgagttttcataggtttcatgtacacgaatgcgtgacggaatccactgccaagaaagttttcatggatgctggtgttgttcactactgggatctcgctgtcaattactcagacgactaaatcatctcccttatatc

SEQ ID NO: 151439 - DNA, 870 bp, Arabidopsis thaliana landsberg
atggcccgttgttgcagacatcttgctgttttcttatgcgttcttttgatgctctcgttgtgtaaagctttgagtagcaacgttgatgatggatatggtcatgaagatggaagttttgaatccgatagcttgctcaagctcaacaacgatgatgttcttagcttgataagctcagacgaaaccactttggaagcatcaaccgttagtgtttcaaacttcggagccaaaggagatggaaaaactgatgatactcaggttagttgtattctgtctaaacatatatgtttgttggatataaactttattaatatcaataattagttacggaatttccaaattccggtgtgaaaagatataacgatcatagttttttaaaagatatagatatgttttattttgtattgatgatgcatgcataagtatgggtgtgaaatatatgcttaggccttcaagaaagcatggaagaaagcatgttcaacaaatggagttactactttcttggttcctaaaggaaagacttatctccttaagtctactcgatttagaggcccatgcaaatccttacgtaactttcaggtaatatttgtgtttttgtttttgcaactttactcagtaatcttcaattaattagttgttttttttgtcactgattaactgcagatcctaggcactttatcagcatgtacgaaacgttcagattacaaagacaaaaaccattggcttatcttagaggacgttaacaatctatcaatcgacggtggctcgacgggaattattaatggcaacggaaaaacctggtggcagaactcatgcaaaatcgacacatctaaggtatgcacatatatagtccaccaatagcttcatatacat

SEQ ID NO: 151440 - DNA, 826 bp, Arabidopsis thaliana landsberg; identical to SEQ ID NO: 27850

SEQ ID NO: 151441 - DNA, 1281 bp, Arabidopsis thaliana landsberg
caacactacattttcacatcaaaatcacattccttccatggccttcttctccatgatctccattctccttggctttgttatctcctccttcatcttcatcttcttcttcaagaaacttctctccttctccagaaagaacatgtctgaagtctccactctcccctctgttccaggtttttttttttttttttccgattttgtaatctgggttttgcgaatcataggtttggtgactacttctgtttcaaagtttgaaactctctttgattctagtgatttatggaactaaaaatttgatctttgagaactttaaaagatgggtttttgatgtagcggtaccagggtttcctgttattggaacttgcttgaactaaaagagaagaaacctcacaagactttcactagatggtcagagatttatggtcctatttactctataaagatgggttcttcttctctaattgtcctcaattctactgagactgccaaagaggttagctttctaggtttgattgatatgtttggaatcgaaaaatcgttcttttttcgatcttgaacacatgactaaagccttacacaacttgatgattgctcttgtttatatgattgtagtctgaacttatgtagaaaagttgagttgatgtcttctcttatcgtttaggttactctttatgtgtttgttttcaggccatggtgacgcggttttcgtctatctcaacgaggaagttgtcaaatgcgttgacagtccttacttgtgacaaatctatggttgctactagtgattatgatgatttccacaagttggtgaaacggtgtctcttgaacggtcttttgggtgctaatgcacaggtgaattcattgttcgtttatcccgcagcttctccttggtatacataatggcaactgaatcaatcttttgtgttgtgttggttttttttgcagaaacgaaaaagacattacagagatgcactcattgaaaatgtgtcttccaagttgcatgcccatgctagggaccatccacaagaacctgtaaacttcagagctatatttgagcatgagcttttcggtgtagcattgaagcaagtgagtgtttcgcttatcctatacatcatttcttcgtcaacataaagtatgaaaatggatttttggtttgttttcataggcttttggaaagatgggaatccattatgtaaaaactcgggtgctttgtcaaagactaatcttcaggttttagtcatgactgatgatggtgcattgatgttgtttgagagacttttccat

SEQ ID NO: 151442 - DNA, 1540 bp, Arabidopsis thaliana landsberg
tagggttattagctttcctgttattcaatttggagtattagtgacttgttgattatgcaagcttgtgataaattagactggaaaataaaaattcagggaccaagcaatttgagaatcagctgtttgctgaaataagagggaggatcaaagaagatgatatatctgcacctctacgcaagggtccttactattattatgagaaaaatcttcaaggaaaggaatatattcagcactgtagacgtttgatcactgacaacaaagctgagccttctgtctatgatactatgccaactggtccagatgctcctcctgagcatgtgatattggatgagaataccaaggctcaagagcatgactactacagaattggggccttcaaggtttgactagaaaatagactttaaaaatcgtcctaagagatatccttttcaaacttgctctttactaacttgatgtttcattttcttgattctttttataggcgagtcccgatcataaattggtggcatatgcagaggacacaaaaggtgatgagatatatacagtgaatgtcatcgactctgaagccctaaaaccagtggggcaacagcttaaaggacttacttcttatcttgaatgggctggtaatgatgctttgctctacataacaatggacgaaatcctgcgacctgataaggtttaccttcaatcttttcccaccctactgtcttagtgtatagtactggaggaagggattaacttttgcatgaatatagattttaccgattcgatcaattgttgacattatacacctcatagatgccatattttcttaccaaatttgactgtacttattatgagatacgtcaatatttttggctttcatgttctgatcttcatatattctttgtaacaggtttggttacataaattagggacagagcagagcagtgatgtatgcctttaccatgagaaggatgatatgttttctcttgaactccacgcttctgagagccataagtatttatttgttgcatctgaaagcaaaactacaagatttgtcttctcgcttgatgtgtccaagactcaggatggactcagggtgttgacacctcgtgtagatggaattgattcatctgtcagtcatcgtgggaaccactttttcatccagagaaggagcactgaattttacaactcagaactgatcgcctgtccagttgatgacacatcaaagacaactgttctgcttccacatagagaaaggtaaactttttttgttagaatctggttgccattgtggcctatccaaaatccaaatgaagtataactaattttaatatcatgtatatccttcggcttagacgacatgcatgctgggttgttttccagttgctagattagttttataatgcatttaacatcaaggtcaccttgtatgcctagctaaacaattatatttgcatggacagtgtaaagattcaggaaattcagcttttccgagatcatcttgcagtcttcgagcgtgaaaacggactgcagaagatcacagttcataggcttc

SEQ ID NO: 151443 - DNA, 1036 bp, Arabidopsis thaliana landsberg
ctgctcgatctctctctgatcacaacaatcataagcgatgagaggagctagacccgatgaattcaattttagtacgaatccatcaacgccaaacactggtcagccgacaccgacgtaccccgccggtgttggcggcggcggcggtggaaggaaaaaaggcgttggcgtgaggacgtggttggtacttaactcgtcagggcaatcggagccgaaggaagaagggaaacactccatcatgcggcgaacgggattaccggcgcgtgatcttaggattctcgatccactgttgtcgtatccatctactgttttaggtagagagagagcgattgtcatcaatttggagcatatcaaggcaatcatcactgctcaagaagttttgttgcttaattccaaggatccttcggtctcaccctttattgatgagttgcagaggcggattctctgtcaccatcacgccactaaacctcaggtaattggagaatttagggttttcccactgttcatttggagctctttttgtttattcaaggagttggcttttgtattgtctccttttgtttgtgcctaattgcattgttttggaattgggaagtagaaatattttcgcttgacaatggaatatgtatataatagctaatgtattgttgagacatggttgactatttgatttgtgcaatggtgatgatatgtgaagattatggttgtcagtttagctatggttgactatatactctctttgtatgtgttgtgtaaaggaggagcagaactctgggggagagcctcatacgagggtagatcctgcccaaggagaagctggaacggaacaatcttctggggatcaagggagtgaagccaagaaggatgcgaagcaaagtcttgagaatcaagatggatcgaaggttcttccatttgagtttgttgctctggaagcctgtcttgaagctgcatcaagcagtttggaacatgaggtaaatacttatgttaaggctctgagacaagcatattttcttctcttgtttgggatttgattcattct

SEQ ID NO: 151444 - DNA, 568 bp, Arabidopsis thaliana landsberg
tcgactcatctccaaagagaagcttcaaaaaatggcttgcaaaacgattttgcgttccgttttcgtatcggaatctcgacggacttccggcgcacgtagatgcttctttctccctccttctccagcatcagttccggtccatggtttgttcccggcgccaaagagtctatgtttcaatggttttgcatctgttcccgagcgggctactcggcttaattgcagccataacgatcaatccgatcaaggtccgcctcaagaagctgttctcaaggcaatctcaggtgcgcgccttcgttaatttcttcctagtaactcaaatttttgtggttttgttcgtttggccgaaatggatttgattatcggatgcttggatccttggtgaataggagacggagtttttagattcgattgacgtactagtatttcccggccattagtcggaagttaaaaactgttccgttgtgtcaatttaactcttcctacacttgtagtgattctctaggaatttagattattttagagtttttaattaagctggacccgtcccccagacagatgatgttaattc

SEQ ID NO: 151445 - DNA, 1418 bp, Arabidopsis thaliana landsberg
cgttctccatacaacacttgtaatagcttgaacatggaataatggttacaaatatgtctttttggttccaacaccatgtccattgctgaaatctcatttctttgttcagtatcttggaactcgtggatgctgctataccagctcagcaattagagccaataagacaaaccatattacaggttgaaggagtgaaggtacagattgtagtatatttcactattcgaccttgctaattgctatataacattatggtgttcttttctataatcagttatctgtaatgagaaagcatgctttcatgttttttcttattaattttgcgaatgagtatcaagactttcatgataatcttaatccatagggatgtcatcggctaaggggtaggagagctggttcatcgttgtatcttgatgtacacattgtggtgagtgctgcttccttctgcctcagagtagaaagaattatctcaataaaataaatcattatcaccttttccttacaggtagatcctttttccagtgtgagtgtcgcacatgaggtaggagaatatgtacggagacagattaatttgaaccatcctgaagtgtccgaagtttttattcatataggtattgagcatgctgcatggaggtctaatcaacttattcactgcttctcggtcttagctatcatctcaaactttccttgcagatccagcctttttacagttttcttgtagcaccaaggatcatgacagtataacgaaggaaagtaacatctgccaagagattaaacatgttgaagccactgtctcagacattttttcgtcgcagttgtctgaggtactcaactttctataatccagacctaacccaacctctagttattcctgtttattagtttcaagaacaatggaatctttcgcatatgtgcagaaattgacgatcaaacgaattacaccccacttgttacatagcaagatcttgctccaaatcgtagtcgccatgccatcaaccatgtccatacagtaaagctcttacatgtctgtacctttaggccattttggccacttttttgtaaccatctgacaagtatttggctgctctgtagggacgtcatgatagccgctgaacatgcagagaaagagattctgaaggcagccccaaatgtggctcgtgtcagcattcagcttagtcttaactccgaataactttgaaggaaataacaagagaagacccctctgcaatggctgcaacaactataatttttaaaaaaagaaatacagtgcgctaactatgttcatactgattgtcaatattttgttgatatttctggctttctttacactgctcatcgaagttgtttctttctgatgagcaatttaatctcgaaaatttgcaacttgatgattccaaagctgagaaaagttttgggaatgt

SEQ ID NO: 151446 - DNA, 1173 bp, Arabidopsis thaliana landsberg
atgagagctggtttaagtacgattcaacagactctgacgccggaggctgccaccgttttaaaccaatcaatcgccgaagccgcgcgtcgtaatcacggccaaaccactcctctccacgttgcagccactcttctagcttctcctgctgggtttctccgacgagcttgtatccgatctcaccccaattcttctcatcctttacagtgtcgagccctcgagctctgcttcagcgtcgccttagagcgtctcccaacagctacaaccactccggggaatgatccaccgatctcaaacgcacttatggcggcgcttaaacgagctcaagctcatcaacgccgtggttgtccggagcaacaacagcaaccgcttttggctgttaaagttgagcttgaacagcttattatatcgatccttgatgacccgagtgtgagtcgggtcatgcgtgaagctagcttctctagtcccgctgtgaaatcagcgatcgaacagtcgttgattggtaactctgtttctaattcgagacaaaccggctcagctggaattattaacccgtctgcaattgggtttggttaccgttccgtaccggcaccggttaaccggaatctttatcttaatccccggttacaacaacccggcgttggtatgcaaagtgggatgatggtacagaggacagatgaagcgaaacgggtcattgagattatgatccgaacccggaaacgtaacccggttctcgtcggcgattcagagcctcaacttctggtgaatgagattctagagaagatcgagaacggcgaattctccgatggagcgcttcgtaattttcaggtgattcgtttggagaaagagttagtttcacaattggcgatgaggcttggtgaaatctccggtttggtggagactcggatcggtagtggcggcgttgttcttgatctcggagatttgaaatggttagtggaacatccggcggcgaacggcggagctgtgctggagatgaggaagcttctggagagatacaaaggaaggttatgtttcattggtacagctacttgtgagacttatcttcgatgtcaagtttattatccatcaatggagaatgattgggatcttcaagctattccgatcgccgccaaatcttctcttccggcgatattcccaaggtttgttctttattca

SEQ ID NO: 151447 - DNA, 799 bp, Arabidopsis thaliana landsberg
tgataagaatcactgaagaagcaaaagaggaaacaatgattcatgcccctgaagatggtgatggaatcgttgaagaagaaccagataatactagggggtctgagatcaaaaatagattcaataggtatgatgtaagagatcaagggcgtgacaatgcagcttatcgatcatggaataggcaagagagatggggtaggaagacatggcaagaggcgactgagtccagtgtgcttaggatggaaggtaaagtggtttatggagtaagtccagtgttgcttgcactctctgttggaagacaagagttctatgctctctatgttcaagaaggtttagatttgagcagtaacaataggaagaagaaagacaagaaaggcttcgagagagttttgaaaatctctgaaaaacttgggttaaacatcaaggaaacttcgaagcatgatcttaacatggtcgctgataacagaccgcatcaaggattggtgcttgatgcttctccattagaattggtgaaagtgaaagaactagatccgatttcatcagaggaagagaaatattctctctgggtagctcttgatgaggtcactgatccacagaacttaggcgcgatcataagatctgcttacttttttggagccacgggtgttgtggtatgcgctaaaaactcagctccattaagtgcagttgtgagtaaagcaagcgctggatcactccaagtaatggaacaaaggtactgaaaaaacatgatgcagtatttgaaagcttctgctgagatcgggtggcgtgtggtcggaagttcggt

SEQ ID NO: 151448 - DNA, 505 bp, Arabidopsis thaliana landsberg
  unsure (1)..(505): unsure at all n locations
nnnnnnnnnnnnnnnnnnactctcttcacttctccttgttccttcattctcttctcttctcatcgtctcaaatcttctccgaattacttcacttaccactttcctcgttccgtaaagagaccacatttcgacttgcgatgctcagtctcaatcgagaaagaagttccggaaacagaaagacctttcactttcctcagagtctccgacggcgatcaaactcaatcttcttcttattcggttaaggctcgtttcgagaaaatgataagaactgctcaagataannnnnnnnnnnnnnnnnnnnnnnnnnnagaagctcctaaattcaaggaagatgtttggtctcgacccggtggaggtggtggaatcagtcgtattttgcaagacagaaatgtatgggagaaagctggagataatgtctctgtgattcatgttttatgcctcctgaagcttatagagctgctaaagctggcacgtctgagcaaaaacctggtccgattgcgttctt

SEQ ID NO: 151449 - DNA, 1626 bp, Arabidopsis thaliana landsberg
ctccgacgtcgatcgaactctttcgttgtctgattctcttcttctaagatccttgagaagcttcctgaatctcagaacgaagatgtttcactcgtgtgtaaacggtggttgagtgttcagggacggcgtttacggagtatgaaggtttttgattgggaatttttattgtctgggaggcttgtttcgaggtttcctaagcttacgagtgttgatttggttaacgcgtgtttcaatccgtcgagcaattcagggattttgctatgtcataagtcgatttcgtttcatgtatcaaccgattcgtcgttgaatttgaattttgttgaggagagtctgttggataatgaaatggttgataaagggcttagggttttaggaagagggagttttgatttgattaagcttgtagtgattaatgctactgaattgggattgctgagtttagctgaggattgttcggatttgcaggagttagagttgcataagtgtagcgataatctcttgcgtggtattgctgcttgtgagaatctgaggggattgagattggttggaagtgttaatggattgtatagttcatcggtttctgatattggtttgacgattttagcacaagggtgtaagagattggtgaagcttgagcttagtggttgtgaaggtagttttgatgggattaaagcaattgggcaatgttgtgaagtgcttgaggagctgagtatttgtgatcatagaatggatgatggttggatagctgcgctttcgtattttgagagtttgaagactttgttgatttcgtcttgtagaaagatagattctagtcctggaccgggaaagttgctgggatcttgtccagctctggagagtttgcaactcaggaggtgttgtttgaatgacaaggaggggatgagagcgttgtttaaggtgtgtgatggagtaacaaaggttaatattcaggattgttggggattgagtgatgattgtttcagtttggctaaagctttcaggtaacttggcctaagatagcttccctataaatgtttccctttaactgaactgtatcataaaaacttaaacttggtgttggtgttccacatgatatagttagcaaaagacataattccatgctatgatgactgaagttgttaatatggatgatgaaaggcattgactgtttttgctttgatttgtgtgtttgatacataaactttggttacttaaaagagcagaagccatagttttctattgttactctttaggtcttttcacatcatgatcgcatcgtttaactgccaaaaagtggaatgcagcttttctgagaaactaatgtgttctttaactgaactatatcgtagaaacttaaacttggtgatgttgttttgatcatctttgtttcttgcaggagggtgcggtttttgtctttggaaggatgctcaatcctaacaacaagtggtttagagtcagtaattctacactgggaagagcttgagagcatgagagtagtatcatgtaagaatataaaagacagcgaaatctcagctgcactctcgtctttgttctctcttctcaaagaactaacgtggagacccgacacaaggtcgcatctctcatcgagtctagaaggtaccggaattg

SEQ ID NO: 151450 - DNA, 1051 bp, Arabidopsis thaliana landsberg
cttacaaggtttgtatacatctcttctaaggttgccccggtagtttccagactattttttgaggttattaggtttgttgaataaatggctattgttttcactgactttcatttctgctatttattctactctatgtctgttaggcggcaatgggttagagaagaggacttggcaaaagaggtgaagcggaatgctaaggaacttcgaaaattaataagacattttgaagaacaaaaatttgtcatgcgttaccacaggaaagaggtctgtgcagaaactatcttttttcagattgatatatagcacaatattgtttttgctaagcctataactcaacatacttgtggttgtatatttctgtttgattgtttgcttgtctatatgccggtaacacttctttccttactctggtgtttgatttattctcaatcttgtcaatagactgcaaagcgtgcgaagatgtatagttatgcagtgggtggtacaactgatggccgagcagaggacaatgttaagttccacacgcactcgtattgctgtcttgattatgcacaggtatgctttttgtcccctaatatttatttttttctttcagtttgctgttatgctttttgttttttctttctgttttttttttttgtttaatcaaactaccctttatcacttcttctctcttacagatatatgatattgttcgttataaactgcaccggctcaagaaaaagttcaaagatgaactagaagatagaaatactgttcaggagtatggctgtcctaactgcaaaagaaagtaaagtccactattctttatgtttttaaatctttacatggtgagttgtattattttcactaaacctgtatagattctcatttctggtatagatataatgcactggatgccctgcgattaatttctatggaagacgattcttttcattgtgaaaattgcaatggtgaacttgttatggaatgtaacaagctaatttccgaagaagtagtagatagaggtgtcaatgcacggagttgacagcgacccaaaccaaaagtttgg

SEQ ID NO: 151451 - DNA, 1466 bp, Arabidopsis thaliana landsberg
agtcctgttgataaagatatgtgcacatttgttatttatttctaagaaatatgtttgtgacatacatctttgtgaaacagcctgagagactattccaaaggactcaattaggtgtctgcagtgaagctttggctgcaactaggcctagagctgcttctagtgctcgtgatatggagatagagcgtgacttactaaccaggtcaatttttacttcaagtgctttgaacaattacagaatccagttctccattatcattttactgaatttttgctaaactgttgcagtccgaaagacgacctcgagttctctatcgtacgagagaatataagagaaaagttaaacgtaagttcaatcttgatgctctgcagcttcaatgcttcatttcttggataatagtttggtatattttttcttattatgctttcttctgctttgcagggtatatgtgacagagttgttgtcaagcctcaaaaaactgtgaggaagcttgcaagagtgcaacatctatattctcaattggcagggagacttacgaaggaagatgatgaggtgagataatagtattggaatagtttttacatttccaagctcttcatttcttcgaattagctttaaccctttttctttctatctgtctatagtataaaatattggctgctctgcatccaactccagctgtttgtgggcttccagcagaagaagcaaggcttttgattaaggagataggtaaaatatctaccttggttcacatatcttctagtaactatagatgtagaaattaagatttatgctgactcaaacattttgcttcttctagaatcattcgatagaggaatgtatcggggacctattgaattttttggtggcgaggaaagtgaatttgcagtcgggatcagatcagctctagtcgaaaaggtgagcttatttgatctctttctccctttaaaaaacacactttaacactaattgttatagcaaaatcgatcattacggtttttgctactacttgtaaaaaaatgctgaactgtattttgatttacagggtcttggagcattgatctatgcaggaacaggaatcgtttcaggaagcaatccttcctcggagtggaacgagcttgagcttaagatctctcaggtgaaaaagtcttcaagaatgttgttaaacactctcactgcaatttccatgtcttttatgaaatctcaaatcagattgatatgtgttttctgcagttcactaagtcacttgaacatgagtcagctttgcaaccaatcaactaaagaaaggcgggaattgagattgtttaataactaaattggtttgtatcatttgtgtgtttggtcattgctgtgtatattgtaaatagaagcaacactaatgatgatgctgcatggtacactttaaatcttcttttagctacttgttgtccaatttctgaccagactagaagcctttgaagcagactat

SEQ ID NO: 151452 - DNA, 906 bp, Arabidopsis thaliana landsberg; identical to SEQ ID NO: 51732

SEQ ID NO: 151453 - DNA, 4579 bp, Arabidopsis thaliana landsberg
  unsure (1)..(4579): unsure at all n locations
tagagatgaaaccggaaaaaatagtacaaatgtagttgctatcgcagcatcagtggctagcgtgtttgctgtgctagttatcttggctatcgtttttgtcgtcataaggaaaaaacagagaactaatgaaggtatgatcactagaataggtcttgaaaataatgaaaatgaaagttgtcagatttatactcacttcctttaggttttacagcttcaggaccccgatcagtcactactggcacggttaagagtgatgcaagatcatcgagttcatcaatcataacaaaggaacgcaagttcacttattcggaggtactaaagatgactaaaaactttgagagagttcttggtaaaggagggtttggaacagtgtatcatggtaacttggatgatactcaagtagctgtgaaaatgctttctcattcatcagctcaaggttataaagagttcaaagcagaggtactttaacaagaaatggatatgttaatcctttttttaaaaatattactttctcagttatgaagttgtcatgggacactttgatattctttcgtaggttgaacttcttttagagttcaccatagacatttggtgggacttgtgggttactgtgatgatggagacaacttgngctctgatttatgaatatatggcaaatggagacctgagggagaatatgtcaggtaacatttttaatttagagactgatctgagtttttttgccaaaaaaaagagactctgatataattgaatcttccgtggtttaaaaataaaataggaaaacgtggaggcaatgtccttacctgggaaaacaggatgcaaatagctgtagaggctgcacaaggtgaacaaaattttgacttattctttttacctttgtttgactcattaccaaaaaatattgtttcttgatgttcattttatgatgtatgaaagcaaactctacataagcaaacacattttgtgacagggctggagtatctgcacaatggatgtaggcctcctatggtacatagagatgttaaaactactaacattttattgaatgagcggtgtggagcaaaactagccgactttgggctctcgagatctttcccaatcgatggcgaatgtcatgtttcgacagtggttgcgggtacacctggttacctagacccggagtgagtgagctcaatcaaattttaagagttgtgttgttgaagccaaatacttatatgaaatttatattattcatcttatattattttcaggtactacagaacaaactggctaagcgagaagagtgacgtgtacagcttcggtgtagtgctattagagatagtcacaaaccagcctgtgaccgataaaacccgggagagacctcacatcaatgactgggttgggttcatgctcactaaaggagacatcaagagcatcgctgacccgaaactgatgggggactatgatacaaacggtgcatggaagattgtggagctagctctggcctgtgtgaacccatcttcgaaccggagaccaacaatggcacacgttgtgatggagctaaacgactgtgtggccttagaaaatgcaaggcggcaaggtagtgatgagatgtactcaatgggttctgttgactatagtctctcttctacttctgactttgctcctggagccagataaatttgagaaattcttttatgtgattttatgggaaagcaatcttgttgttattatgtttctatgtgtatttcccaatgtatgttttgaagaaacaatgtacattctatcttcgtgggtgcaggtgttttgattactctgttttgaaactttttgtgtttactatataaatacttgtcttaaaaggattaattatgtaatactctttattttaatttttacgtattaatgcatcaagctagctaacaactagtgacagctcaattttcggaatcatacacatttagaagtcaagggctgactaaaatcattggaggttgcattggcatgcacaaacattacaggccacgcccacattgatataggagacttctcaaacatgatcgttgacttttgacgttggattcatccaggacgccaaagacacaaacaaagagacaaatcaaccaacgaattgccatacaaaagtcaaagtcaacaaattcatgagaacatttgtggattaatagtaataatacaccgaaattacattttgtggattgataatacaccgttgttttgagtttacttatagtcaacggtgttttttgttcgaaagaacataacaataataactcttgtcattgttgacgaaaaacaaatactacttcttatattattttcactcaacttgctctatcgaatcattttgcatcgtgaaaacatattctcaatcaattaatatttattcaatttcaattatgttataagcagttgacttggacttttgagtagtatagctcatatagtcatattctcatatgcataacttgctatcttaaaaaaagctctcctgtggacagtaaggagaacaatggagagacattgtgtgttagttgccacttttttgctgatgcttcatatcgttcatgctcaggatcaaattggtacgtacaaatttgtcacttcaatcaatatatgtatatacggtttcatagattataagtcattatttctttaattgtcttattaggattcattagtgtggattgtggtttggcacctcgtgagtctccttacaatgaagccaaaactggtttaacatatacatcagatgacggtctagtcaacgttgggaaacccggtagaatcgccaaggaattcgaaccgctcgccgataagccgactttgacactgagatattttccagagggagtacgaaactgctacaatctaaacgttgagaagggaataacacatttgataagggcttactttatctatggaaattatgatggtcttgacattaatccaaagtttgatctgtatcttggacctaatccactattaacatgttttggaatggacaagtcatctccgaccctttaattcctccaaaattcactatttatactatctttagccagtcaccaagtacttgtgaaggaggaaaatgcagttttcagctgagaagaaccaacagatcaactcttccacctttgcttaacgcttttgaggtctacacagttatccagtttccgcacctcgacccaaatgaaaacgacggtatgttatgcaaataaagtctatactattgttttatgtttagaaaggtagtcaaattatttctgtgttaactcaagtatcataaactaaaacatgttatgtcagtggttgctgtccaaaacatcaaaaccacctatgaaattagtagaaatagctggcaaggagatccatgtgtccctcggcagtttatgtgggagggattaaactgcagtgatactgatatgtctacaccaccaaaaatcacttctttgtaagtcataagatcactaagtacacacgctcttcaagatctgttagtagttgtgatatatgatcatttacatttttacactttgaatgtgtttttggacatgtcaccagaaacttgtcttcaagtggtctaactggatccatagctgctgccattcaaaatcttacgcaactagaaactctgtaagtatgtatagagttgataggaggcacaaaaattgctttatggatgggaataaattaagatttatttattatataaaaatcattctggaatagggacttgtccaataataatttgactggagaggtgccagaatttctaggcaacataaaatcattggtgttcatgtaagttcctctctacttattttgcttatgcttttcaagttctacctcattcagtttcatgtatgtatgtaaagtttgctctctttatttctttttaatagaaacataagctggaacgatcttaatggttcaattcctcaatctcttcgaaagaaaggactggatttattgtgagatacttcccacctactttatttttataagcccttttgtgaattaatgttttcaacaagactcttcttattgcagagtgcaaggaaacccaaagctttgtctctctggctcctgcacagaaaactccaagaagaaatttcctgttgtaattgttgcatcagttgcttctgtggccattatcgttgctgtgttggttcttatttttgttctcaataagaaaaaggcgtctactgtggaaggtaatttgcaggagatctctcatcaaatcaagaaactacaaaaaatcgataaaatagtttttcttacatcccctacctttttttctctatagctctacaacctccactgaatacgccaacggtgaatgatacatatgctatttcatctgaaccatctatcaggacgaaaaagagaaggtttacttattcagaggttatgaaaatgacgaataatttccaaagagttgtaggggaaggaggatttggtgtcgtgtgtcatggtactataaatggttccaaacaggtagctgataaagttctctcacattcatcaagtcaagggtataagcattttaaggcagaggtatgcatgatcttcaaaaaaa

SEQ ID NO: 151454 - DNA, 1423 bp, Arabidopsis thaliana landsberg
ctcaccaaaaaaaaacaaaaaaaaattagaatttagtacttttattttaaacaaaaaccaaaaaaaaaaccaaaaaaaaaaacgttggaaatggctccaccggaggctgaggtgggtgcggtaatggtgatggctcctccaacgccggggacaccgggaacaccgggaggaccgttgatcacggggatgagagtggattcaatgtcgtttgatcatcggaaaccaacgcctcgatgcaaatgcttgccggtgatgggatcaacttggggtcaacatgacacatgcttcaccgattttccctctcctgatgtctccctcactcgcaaggttagccatcttcctctttttattttattttactcataattcttagtatatctttttcttgtatgtataattccaaattaccattaaaatatcgactacaatttgtatcttaagtggtttgtgctagctagtaatatcgatatcgtcattcgtaaccatccggatccataaccgcatattgcatattgttcgtaaacctaacaatagaattaccgtcaaaatcattaacatttaaaaacattacatattttaagattaagagagtgttatcaaaagtttttaaaatttttagctacgttagcctaagatttacaatagctttataaccttacaaagtaaatatctcatattttattttaatttaataaaagaaatccaatggctcgtttattagaaaacattggaatccacgttgggaaaataatgaatttgggggaaaaaaatgagatcgagacaataatataaatatatatgtactatagggaaactcacaaatcgatcgtaatttatggtttttgtaagctctgaaatacagagaagtagtgaccaaaagataatacttctttattcttgtaaccgatttttattatttatgtatatgataagatattgaaaaagatcataggggtttacgtcacacttggaggaggttttaacacgacatgaactagcagtcgcagccgagaatttgattggcttatagacacagagtgaaatcaatgtacaaacagtataagtctaagagatctcaagagaaaataatagtatatctctcgaattaaggcccactcgatctccacttgatttattcaatggacaccgactcacctcatatttccattttataggccatatgtatgttagtttattgatcgtgtagccattagttcattgttcgtgtgacaatgagctaatagtcttgactatgataacattaataaaattgtctcgctagttgcgtaaatataatggtttgtttcttgttttgccaaaaaataagccggtcacgcttatttatactcagcgtcaaatagtttgatttacgcggttttgttttgcaaggtcgaatacaaactagttgcatattacgccaagt

SEQ ID NO: 151455 - DNA, 783 bp, Arabidopsis thaliana landsberg
caacacgatgaggttatatggcaggtcatcaggcacaagcactgtagttacatggccaagtatgtattttttatcctcacttgttagctttcaattttcatttgtagctcaatttgttgatgggtttgttttgttctcttttgcttttgtagaatcgaaactggaatcttttgcagaaaccaatataatgtaacaggaatctgtaatcgaagctcttgccctcttgctaatagccgatacgccactatccgtgaccatgatggtaattttctttaaagagtcaatctttgagctgattctgtgtgttggaatagttaggattaggtgttgatttagttgatgtagtaaagatgtttcttttgagtttagtgttgtggtggtggtttcttacaaatgaattctcttttgtcgttattgtgtttttttttaattcaggagtgttttatttatatatgaagactattgagagagctcacatgccgaataaattgtgggagagagttaagctgcctgtaaactatgagaaggctcttgaaatgattgacaaacacttggtgagcttgagatttattgccacagtttatttctttactctttttcttcattagcaatgtcaatgtcttatgatttggtgggtattttcttcttgcgtgtggcagttatactggcccaagttgttgcagcataaggttaaacaaagactgactaaaatgactcagatgcgtattcgtatgaggaaacttgctctgaaaacaagggcttgtcctcttctggtttttgttt

SEQ ID NO: 151456 - DNA, 762 bp, Arabidopsis thaliana landsberg
taactaaaaaaaaaggaattagcgatgagggcaggtgatggagaagaaggatcggagtcaagagttgcactgttgaaaagtcctcacacggcggaggaagacggtgaaggattgaaggatagaattttggttgagacaaaaaagctatggcaaatagttggtccggccatattcagtcgagtaacgacatattcgatgcttgtaatcactcaagctttcgctggtcatctcggcgatcttgaactcgccgccatatccatcgttaataacgtcaccgtaggcttcaactttggcctcttggtatagtatctacacaatcttgattaaaatgtttttttccttcatttttctaagaaataataatatgagtatatgtaaatggtttagcttggaatggcgagtgcgttggaaacgctgtgtggacaagcgtttggagcgaagaaatatcatatgttgggagtttatatgcagcgttcttggattgttctcttcttttgctgtgtcttgttattaccaacttatattttcactactccggttcttaaatttcttggtcaaccggacgatatcgctgagctgtccggtgttgtcgccatttgggtcataccgcttcatttcgccttcactttgtcttttccccttcaacgtttccttcagtgccagctcaaaaaccgagtatgtattcgatcgatctaatcgtttcaaacataataaaacgtctaataatctaataaaaaaggtaacagttttcatataggaaat

SEQ ID NO: 151457 - DNA, 299 bp, Arabidopsis thaliana landsberg
aggtgggatttaatagctgggaggattccaggaagaacagcagaagagattgagaggttttgggtgatgaagaatcatcgaagatctcaattacgttgatggccaactcttatatcatttttataataatgagagagaaaagaatgagaaatatacatatatattcgttggtaattctgcagttttgttcctgagttttgaagtagttgtgtgttcgggattttatgaatcacgaatggaacctttaataaattgaaggtaaagttttaatcaatcgtaaaaaataatttgtggatatg

SEQ ID NO: 151458 - DNA, 896 bp, Arabidopsis thaliana landsberg; identical to SEQ ID NO: 13457

SEQ ID NO: 151459 - DNA, 942 bp, Arabidopsis thaliana landsberg
  unsure (1)..(942): unsure at all n locations
atgagactacaagaggctcacaacatcggagagactcttcaggaaaagctcgagcagctcgctgaagtagaacgagcttttgtccacatagactttgagttcactcatcgtcctgaacacaagtgtaactagattttaagtagtaatttgtagtactataattagttctttagtttatgtactcttcgtgtcgtttttgtctatatagatacttgaacgttgtgccgtctctgtttatcgaatgcgcattgtgtgtcgtttgaagctaatcgtcgacattaatagcgtttcaaacactaaactcaaaataaagataaaatcatatataataaaataatgaattttaaatgaaaaccactcaaaatggtttttatctatcttccgacaaaattccgtgcttcattgctcttctccacaagacaacatttctctggctcagaatcgacgccatggaaatgtaaagaagaaacaaagacgagctctcaaatccagcagcaatggcttttcttctttctaatctatcatnctccgtcaatccaaatcttcaaaccggaaaatacccaaaccttaaacccattttcagtcaatctctatcgtcttcgtcttctgttagctacgaatttgtagaagagaatctatctacactctctctattgagcatccagtctcctcctcttaaagacacgcaagttcagacaagacacagttcgcaagataagcataataaccacgacagagatgaattctatatcaatcttggtgtcgctgtccgtacacttcgtgaagatttgcctttgctcttcactagagatcttaattacgacatctacaggtaaatntctcgtttgggtatttgataattgatgaaagaaagaatctttggatgctatcttcagaaatttatcattnntggataaaaaaggagcttcctttgatctctct

SEQ ID NO: 151460 - DNA, 428 bp, Arabidopsis thaliana landsberg
ggcgttaaccaacaacctcctcgccctaaacctgaacctgtcgatcgtgaaaaggtttgtgttcgatttcattattcgcgaatcgttgaatcatcatcctttagggtttccttttagggtttttatctgtacttattgatttctttatctttaaccttcgaatcgcagacatgtccccttcttcttcgtgttttcaccaaggtactcttcttcactgattttactgaatgcaagtttaatcactggagaactggctatgtttgtttctgaattagtctgcaaattaggattaattgggtaggtttgattgcagagtggtggtcatcatactagtgaagattatgctgtgagaggcaaagaaccaaaggatgaagttcaaatctacacttggaaagatgccagtcttcgcgagctaacagatttggtat

SEQ ID NO: 151461 - DNA, 2577 bp, Arabidopsis thaliana landsberg
tcccttcccattccaaaaatgcattgcctttcgaacctctaactttcacatttcaagacgtacaatattttattgagactcctcaggtaaacgactaaagagtatgcaagatcagtgcaagttttctagaatccttttaaacatgatacagagttataatgtgtgggtatgatttctgtgttaaaagggaaagaagctgcagcttctctctgacgttacaggtgcattcaagcccggtgttctcactgctctaatgggtgtgagtggcgctggtaaaacgactctgcttgacgttctctcaggaaggaaaacccgcggtgacattaaaggacagattgaagtaggcggttacgttaaggttcaagacacattttcgcgggtttcaggttattgtgaacagtttgatatccattctcccaacttaacagtccaagagtccctgaaatactctgcttggcttcgacttccttgtaacattagttcagaaactaagagtgtaagtcattatttggaaaaaataaaaatgttttcttccttcctttagcttccttgtctgagtattttcttgatcttcgcttttcaggctatagttaatgaagttcttgagacgatagagctcgaggagattaaagattccatagtaggaattcctggaattagcggtttaacaacagaacaacgaaaaaggctaacaatagctgtggagcttgtttccaatccttcaataatatttatggatgaaccaaccacaggattagatgcaagagctgctgcaattgtaatgagagctgtgaagaacattgccgagactggcagaactgttgtttgcacaattcaccagccaagcatagatatcttcgaagcatttgatgaggtaaaaactctgaaagttaagaaaaacaattcatctcattttaacatttctcttatgtataagtacattatgtgacccttcaattgcagctaattctgatgaaaaatggaggaaaaattatctattacggacctcttggacaacattcaagcaaagttattgaatactttatggtcagtttctatataatactgaaactgttgcaaaaaaagtgtggtctcttctctacttacaaattattacaataattttcaactgtagagcattcatggagttccaaaactgaaagaaaactctaacccagccacttggatacttgacattacttctaaatcatcagaagacaaacttggtgttgatttggcacatatatacgaggaatcgactttgtttaagtaagtctaaatacttattgtgactttggatgttgtttgcctgaaactgattttgttatttgtttttagggagaacaaaatggtaattgagcaaacgagatgtacatctttgggatcagaaagattaatcttgtcatcacgttatgctcaaacgagttgggaacaattcaaagcatgcctctggaaacaacatctctcttattggagaaacccttcctacaatctcactcgcatcattttcatgtgttttacttgtatgctctgtggcattcttttcttgcaaaaagctaaggaaatgttcgtgtcttcccccatcttatttgagtcggctttgaaccgcgtgatttccttgatcttaaaaggtttagctatttaaacttttttacctctcttctttgcagaaacaatcagcaagatctattcaacgtctttggctcaatgtttacggtggttctattctctggaataaacaattgctcaacagtgatattttgcgttgcaaccgaacgaaatgtcttctaccgcgaaagattttcccgtatgtacaactcatgggcgtattcccttgctcaggttaaaactttttctcaatcaaaccattaaggaacgaaaattaacaactcagccattggttttgactttaaggcttaagtttgcaggtgttggttgaaattccatactcattgttccagtctattgtatatgtgataatcgtatatcctatggttggctatcactggtcggtctacaaagtgttttggagcttctactcaattttctgctccttgcttatcttcaactatttcggcatgcttttagttgtggtgaccccaaacgttcacattgcttttactctccgctcttcattttacgcaatcgtcaatctctttgctggttatgtcatgccaaaacctgtaagtcctctcttacctctcttcaccaagtttgtgaagttcgattcttattatgtgaaagaaagaaaaagagttagaaacagcatcaagatatgagattcaagagtttttgttgttgatgatgcagaacattccaagatggtggatttggatgtattacttgagcccgacgtcatgggttttgaacggattgctcacatcgcagtatggagatatggagaaagagatattagcgtttggagagaagaagaaagtttcagctttcttggaagattattttggctacagatatgactctctggctcttgtagctgttgttcttattgccttccccattctcttggcatctctttttgccttcttcattggtaaactcaatttccaaaagaagtga

SEQ ID NO: 151462 - DNA, 1561 bp, Arabidopsis thaliana landsberg
gcttcgcaatagctatttcttcgtaatgctgatatttgactactaagttgctttctgactttaatggctatttattttctggggaaaactggatttgagacaaatcactgataaacttctattgcttgaaccttattttagttgaccctcaagtttaggctctggtttttcagtcaaaatgagtgatggaatctccaggagaatctctcgtcttctgcatcattaattcattctctggaaactttttgattcataatctgtatgcttgtggataacaaattgtgatgacttgagttaaagaatggatttttatcttaggaatcttgttgttttttcttagcttatgcagaaaattgtatcatgtgcacaagaggacaggttacaaatcatatgtaagttgcggaacaatgttctaggatcaccaaaagctaatcccagatggatatgaggtgtttttttttattgttaatcaatcttcctgaaagttagtatttttacctccttcagtgaaatgatactttgtgtatcttcaggtctggagatagagaattcccaaatggtgatttctattctggggaagtgaaaggaataattcctaatgggaagggaaagtatgcatggtcagatggaactatctacgagggtgattgggatgaaggcaaaatctctggtaaagggaagcttatttggtcatctggagctaaatatgagggagatttctctggtggataccttcatggttttggcaccatgacctcacctgatgagtctgtctacagcggagcctggagaataaatgtaaggcatgggcttggcaggaaagagtattgtaactcagatctatatgacggtttgtggaaagaaggattacaagacgggcgtggtagttattcttggaccaatggaaataggtacatagggaactggaaaaagggtaagatgtgtgagagaggagttatgagatgggaaaacggtgatctttatgacggtttttggttgaatggctttagacatggctctggagtttataagtttgctgatggatgtttatattatggtacctggtcccgaggcctaaaagacgggaagggagtcttttatcctgctggaactaaacaaccatctctaaagaagtggtgtcgctctcttgaatatgatgacactggaaagtttgtactttctcgcagtgcatcggtaaatgttgaggagctaaggagtttaaacactgtgacacaaagtctttctgtgaaaacttcagctggtgaaaccacctgtgatcctccaagagactttacatgtcatgggccagtatctaagtctgcacggttttctggctcaggccaaagcgagggacaagataagaaccgtattgtttatgaaagggaatacatgcaaggagttttgattagagaaactattatgagttccgttggcaggtcacacggaattaaccctccaaatcctccaagagaagtcagggctaggtctatgatggcctttcttaggaaggaacacaattattacttaatgctaaatcgcgaacttgcgtatcaggtaaact

SEQ ID NO: 151463 - DNA, 1077 bp, Arabidopsis thaliana landsberg; identical to SEQ ID NO: 7924

SEQ ID NO: 151464 - DNA, 589 bp, Arabidopsis thaliana landsberg
tgtcattgaagacaagtttcgattatatattgcttatacaagtatggctttacctaaatatatagtacatttatgattttgaatttgttgatttatatagggagagagtgcacattccggagaacaagccgttcatattcatgaggggtaatggaaaaggaaaaacggtgatcgaatcttcgcaaagttcggtcgacaatgttgcttcagctactttcaaagtcgaggctaatcactttgtcgcttttggtatcagcatccgagtacgtataacaattgtagatattcaaatttgttttccttttaattacgtcaactaatgacttggtgtgatgcacatatagaatgatgcacctgtcggaatggcattcacatctgagaaccaatcggtggcagcgtttgtggctgctgacaaagtagcgttttaccattgtgcgttctacagcttacacaacactttgtttgataacaaaggtagacattactaccatgagtgttacatccaaggctccatagacttcatcttcggtcgcgcaacttccattttcaacgtaagttttacctctttatacacattatctaaaccata

SEQ ID NO: 151465 - DNA, 593 bp, Arabidopsis thaliana landsberg
gtgtctgacaaatgttttatgttggaatgaaggtttatgtgaaagccaaggaatgtggagatcggctctcggtggaggaatttgccatacttattgggaaacacttttgctcattttatccacaggtatgtatgcactatgcactatcaccatatcttttttagtaagcaattggatatattcaccttaaagatgttttattcattttgctgttttgtttcctctctgtttaaccaggtttttactgctatcgtgaatatcattgagaagccctgggagcgtgtctccatcgatggaaaaccacatttacatggttggttctgacacttttttctggaacgaatatttgctatagtttaatggtttttctaaatcaatcttttgttttgaaggttttaagcttgggtcagagaaccatactacagaggcaagagtagaaaagtctggtgcattaaacttaacttccggtattggaggactagctctactgaagacaacccaggtatataaacatctttccgtagatatatgtttttttgttagaaaggtaatgaattgtcaaaattatcactgttatattttggataatggcg

SEQ ID NO: 151466 - DNA, 1879 bp, Arabidopsis thaliana landsberg
  unsure (1)..(1879): unsure at all n locations
ttttccaggatcagtagacataatgattgaaggggaaagctgttaacacatccgagttacttgtcttttctctgaatgctatagccatagctactaatgatttctgcaaagaaaatgagcttggaagaggtggattcggaccagtctacaaggttggttgattactttggttatagacaagagtctttgtgtttaatttttgtgatttttttgttgatgattgtgatatttatcagggtgttctcgaagatggacgtgagatagctgtgaagagattgtctggtaaatcaggacaaggagttgatgaattcaagaatgagattattctcatagcgaagcttcaacatcggaatcttgtgagattacttggatgttgcttcgagggagaagagaaaatgcttgtttatgagtatatgcctaacaagagcttggatttcttcctctttggtatgtttccttttttaaagatccaagaaagaataagcacttcctttcattcttcttagttttgctcttttgaatgtacagatgaaacgaaacaagcgttgatagactggaaactgcggttttcgataattgaagggattgcgagaggattgctttatcttcatagagattcaagattgagaatcattcatagagacttgaaggttagcaatgtgttgttagatacaaatatgaatccaaagatctcagattttggattggctaaatcttttgggggagatcagagtgaatcaagcacaaacagagtcgtgggtacttagtaaggacactccatcaccctatctctatatctatctttgtgtagtaattatcaaaactgtaatgctctaactacttgcagtggttacatgcctccggagtatgcaattgatggacatttctctgtgaaatctgatgtgttcagtttcggtgtattagtacttgagatcataactggcaagacgaatcgagggtttcgtcatgcagatcatgatcttaatcttcttggacacgtaagttatcgctttcaccattttagatcacttttcaaaaatcaaatctcattttaggattggtgaaaattcatggaattaatctctatgtcaaaatcaacgagcactaattaggagttgattcatgccatttatacactaaattaggtcttttacaatattgtgggatcccaaacaaaaccggccatcttgaaacttgtctccttttcactatattaggtgtggaaaatgtgggttgaagacagagaaatagaagtaccagaggaagagtggttggaagagacaagtgttatcccagaggtactaagatgtattcatgttgctttgctttgtgttcaacaaaaaccagaagacagaccaaccatggcttctgttgtcttgatgtttgggagtgatagttctcttcctcaccctacacagcccggttttttcaccaaccggaacgntcctgatatctcttcatctttaagcttacgttcacaaaacgaagtttccatcacaatgttgcagggacggtagaaaaatcaagcttatatataaaactacagttggttaatgtaatgtaatgtgtcaccaaagaagaaacaatcaaacaatagaatatacaaatatcagttacagggtttacctaggatctattacactcatggtttgaaaattattggaaggaatctcgagattaatcgacacagtgtcggaaaacaagagatttcgttcgttaaagaacccgggctgcctcggatcaagaagcaacatttcactactcaacatcaaaaccaccactgacatgtttggtctgtctttaggatcttgttgtacacataacagaccaatgtgtatcactcttaacacttcagagatatcggtacatgactcattga

SEQ ID NO: 151467 - DNA, 945 bp, Arabidopsis thaliana landsberg; identical to SEQ ID NO: 7310
  unsure (1)..(945): unsure at all n locations

SEQ ID NO: 151468 - DNA, 1345 bp, Arabidopsis thaliana landsberg
  unsure (1)..(1345): unsure at all n locations
acgcacaacgagaaaataaaaaacgcaccgccggtaacaattttccggcgaatctgaaaactaacgatttttctcgagtttggtagagaaagagaaagagattgattcgttcctggttcgtggatcgaatagagaagaagaaagagtaagtgcaacagaatcaatggtatttcccggtgagatgacgacgacgacaacgagacctgagcaacgatcgaagactcttcacaatttccctctcccgaacttatgggggaatcagagacaactcaagtgcacgaagatcgactctatcagcaacaacaacaacaacggaggaggtcccggcggcgatcaccgactacgacgccgatctccgcctctggaattcgctgattctcccgtttcgatgccgtttcgattcggtaacttcgatcatcgccgcccgtttaaatcgggaagcgaagaagggatcgaagagttcagggtgaagcttatgtcggatctgaagacggagacagataagatcacacaatcgatgtttaacaaaggcgtatccgaagaggaagaggatcaaatcgacggttctggttctggttctggttccggtcaagagaagtagnnnnnnnnnnnnnnnnnnnnnnnnnnnnnnaggaaaagaagagcagcagcgtgtaaagaagcggaatcctgcagtttgatcaataaaggaattgtgattgagcagtaaggtagttgatcatccatctccggtgagaggcgtcggcggagtggtcgaagcggagaagaagcgtcctatgttctctatgaagctatcgaagaaggagatggaagaagatttcattgggatggtaggtcaccgagcaccgcgtcggcccaagaaacggtccaaaactgttcagaaaaaactcgatgtaagtcttttagattttgcaatttggtgaacgatttgaaatttttttgttagatttttgttgaaactgaaatttggattctttttgttctttgcagagtttgtttccagggttgtatttgactgaagtgacacatgatgcatataaggttccagaataaaccaaggtataatcatcaatcatcatcatcatcacggatttgaaaagcttgagacttttttagtttgagagattctgattcattgttgcttttacagaatctgcagagatgatgatgatgatgatgatgaatttgtgtaattctggaattgagggtcaagttcttgagaagctccttcttcctctgctaatatttttcttgattaattctttcttctaaattgttctgaataaaactatacaaaaacgtttaggtctccagttgattaatacaaattaaagttttcttcttt

SEQ ID NO: 151469 - DNA, 844 bp, Arabidopsis thaliana landsberg
gtcaatttctctgcatcagagattccggtgtccttcttcctttcactcgcgtataacctcttttccttgacgttgtctccgtgagctctctgtgctttgactgcaaccatgtcgactattatgcagaagatcaaagaaattgaagatgaggtaattattcaatcctctctgattcttcacctcttctcttcaattttggatgcatagaactgtgaatccgaaatatctattctgaatcaaagaaatgatttttcaatctgggtggactcacaagtacgaggttttttttgtttatgtggcagatggctaaaacacagaagaataaagctacttctcatcatctgggtttgttaaaggtacattttttctcctctttaggtcgttttttgtagctttgagagtgaggttgattggttcaggtgtttttgcttatcaaatgcaaatttggttgattggtttatatctgttttgatacttgataaaagctatcatgggatgccatccagtaagcaagctcattaacaaatatttcaacttttggtctgaaatcgtttatgttttatacgaactcccaaatcattgaataagtccaaagctgagatattttatttacggcatgagcttttgtgaagttccttggatcaaacaactactaggcaggcattatatattattctgtatagatcttagaattagggactcattcctgcaccattagcttctcgtaacacttcactggtccattttgcaggccaagcttgcttgctttcgagggaccttcttgcacctgctaccaaaggtggcggtggtggtgcttgacaacgctttgatgtgactaaaagtg

SEQ ID NO: 151470 - DNA, 699 bp, Arabidopsis thaliana landsberg
tttcaagctatgtacagagaatatgaaatcgtaccttcaatggaacactatcatagtgttaccaaaatgttggcaacatctggtcacttggatgaggcactgaacttgttgagagaatgccgatggaaccgagtgttgacgtgtgggaaacactaatgaatctttctcgggttcatggagatgtagagcttggagatagatgtgctgagttggttgagaagttagatgccacaagattagacaaagtgtcaagtgcaggtcttgtagcaaccaaagcatcagactttgtgaagaaggaaccaagcactcggtctgaaccatatttttattctacttttagaccggtagattcttcacatccacaaatgaatatcatttacgagacactaatgagtttgaggtcacaactgaaagaaatgggttatgttcctgacactaggtattatcgtagtttaatcatggcgatggagaataaagaacagatttttggttacagagaggaaattgcagttgttgaaagtcttcttaagtcaaagcctcgatctgcaatcactctgttaactaatatacgcattgttggcgattgccatgatatgatgaagttgacgatattcataactggcagagatatgatataagcgagatgcaaagatataccacttgctcaaaaatggcgtatgccggtgcaacaatctttgg

SEQ ID NO: 151471 - DNA, 1435 bp, Arabidopsis thaliana landsberg
  unsure (1)..(1435): unsure at all n locations
atgtgtattattgaagacaacaacgaaacacatggcaattgtttgcgaaacaaggtatcacatgagaacaaataccagtcgccaaggtaaattgggtccatcactgttgctgattaatcaatcttgtgtttgtatatcactttatatatatggtaatacgataaaataaatcatagttattgttgctttctgttatacgattttaactcaaattattttgttgatatccaaaaattacctcaactctttagatatatgataatactaatgtacataatccatatatttattgtagtttccaaatatatccctaatcataaaaaaaatcttacaaatgactatggatttaagtatttccaaacaaaacaaacaggggaaaattgaataaagaaaaagaaagggataaatgtgtaaatagtcgacaatattgaggctatatttaatattaatttcttcgattcttctctctctttctctctctgtgagaagaagcaaaatcacgaacttccattaatcaccgactcgcagaacctttctctcattaaatcttgtggaaactcggaaattgaatctgcgtgagtttcaatcgcttgatcgatccatcaacccctagagatggtgaggaaaaaggtaccggaatggcttaatagcaccatgtggtctactcctcctccgccatcttcttacgacgatggtctcttccgtcattcccccgtcactaagatgaaggaagaggcagaatnnnnnnnnnnnnnnnnnnnnnttaattctgctcctccgccttcttccaacacttcggttccatcgccgtcgcatagaccgaggaacggtaacagtatctctggcggtagtggcgaatatggacattccgttggtccttccgccgaagacttttcccgccaggctcatgtctcagcggaggtcaatgcaaccttccttttttgcttcatcaatgcaaatattcaaattcttccaccagcgttttgtggtctaattgctcagtttctgaatgttattgtttacttcttctttattggttttttctatagttgtcgaagaaggtgatcaatatgaaggaattgaggagtctagctttacaaagtttgccggattctcccgggatccgttctactgtctggaaggtatgcatttcaagaatcatgattttggtttgttttcactttgaagaatctatatcgtagtaatgcaacaatgcatagaactgtgtctgagagtctgataaaccttacttggtcattgaaatatgattctctttgcagcttttgcttggttacttgccacctgaacgttcactctggtcaactgagttgaaacaaaagagatcccaatacaagcactacaaggatgagcttctgacgagtcctgtaagtgatcctggtcttttgtttcttgccttggagttattgttagtctg

SEQ ID NO: 151472 - DNA, 1197 bp, Arabidopsis thaliana landsberg
accttatcgccacaaaacagcgacattcgacgccaaatacataacatcgtcgtcaacaggttttgtctcttatcttcttctctgcatgaatcatgatcttgttagacattttctgagttctgggtttgattttggcccaatgatccataaatgttgaaaatcatatttgaaggctatgaattatgaacattttattttaacctttttctagctctaatgagataattaagtaaaaccctactcgaaatttctgaactttttgatgctttgattcgtttcctgtgatcctttacctagagaaaattgagattgattatgtgacaagtgaccatctataagaaatctctcaaagttttcaactttactcactctattgaggtgaaaaagaaaaattgtgcattctgaaatttttattcttttcgtttgtcatgtgaattttcgtgtttgattttttattagtagcaaaatggctaggtctggggttgatgagacatcagaatctggagcttttgtaagaacagcatcaacattccgcaactttgtttcacaagatcctgattctcagtttccagctgaatcaggaagataccatctttacatatcttatgcttgtccatgggcttgtagatgtctttcttacttaaagatcaaaggacttgatgaagccatcaccttctcggttagtacaaattcattgctcatatcgaattagaagactttgttaacctgaagcatttctgttttatttgatttgattagtcggttcatgccatttggggaagaaccaaggaaactgatgatcatagaggatgggttttcccggattcggataccgagctccctggagctgagcctgactatcttaatggtgccaaaagtgtgagagaactctacgagattgctagcccaaactatgaagggaagtacactgttcctgtaagttttgatctctttggtgaactctttaaattatcttgtcctgtttcttaaatatttatttttgttattatgttagattctttgggataagaagcttaagactgtagttaacaatgagagttcagagataatccggatgttcaacactgagttcaattgtattgcaaaaaacccgtcacttgacctttatccttctcatcttagagacgcgatcgacgagactaatgaatgggttttcaccgggattaacaatggtgt

SEQ ID NO: 151473 - DNA, 1584 bp, Arabidopsis thaliana landsberg
  unsure (1)..(1584): unsure at all n locations
acaagcaaatctcaaaatccaaaatatggtttcgaatcagcgtgtacggttgtttatgctctgtttttgccttgttaacaacgcggttatagcagccacggaagatgaaaacgtcgagagaaaggtaataacgtaagagtgaatagtgtttttgtgttttgtctggtgagacaactgaatctctcacccttttcctctgtttctctttatttacagccttacattgtgtacatgggagaggccactgagaattctcttgttgaagctgcagaaaaccatcataatcttctaatgacagtgatcggagaagaagaatcagttcttgctcataatatcgtcatcggatttttatttttaattatttacttttgcagcgagagcaaagggagagaggtgaaaatctatagctatgggaagaatatcaatggatttgtggcaagactgtttcctcatgaagcagagaagctatcacgtaagtaacaaaactgtcagaactgttttggcttttatcttgatgttattgattattgattgttttttctttgtggattgtttctttgcaggggaagaaggagttgtatcggtgtttaagaacactcaaagacagcttcacacgacaagatcatgggactttctaggacttgttgagtctaaatacaaaagaagtgttggaattgaaagtaacatcattgtgggagttcttgacacaggtaaagtaaatttactagttagaactcgaatctgaaaatatcgataaaccccgatttataacccttttttattgttgtcaaaaggaatcgatgttgaatcaccgagctttaatgacaaangcgttggccctcctccagctaaatggaaaggaaaatgtgtaactggaaataactttactcgttgcaataagtataaatcctctgtttttataatcctctgtttctgcaacttctctactctcttctttttactgaatttggttttggattaatgttaaaacagtaaagtgattggagcaaagtacttccacatccaatcaaaaggccttcctgatggcgagggagactctgcagcagatcacgatggtcacgggactcacacatcttccacaattgccggtgtttcagtctccagcgctagccttttcggaattgcaaacggaacagctcgaggtggtgttccttctgctagaatagctgcatataaggtttgttttcttcgttatatcattactctgttttcttggaacataaggaatatctgagacacattatcctctgtttcaaattaaggtgtgctgggactcaggatgtacagacatggacatgttggcagcattcgacgaggcgatttctgatggggtcgatataatatcgatttcaattggaggagcctcgcttccgtttttcgaagatccaatagctattggagcgtttcacgcgatgaaaagagggatcttgacaacgtgttccgcaggtaataacggtcctggtctctttacggtttcgaacctcgcgccgtgggtaatgacagtcgcggctaactcactcgaccggaagtttgaaactgttgtcaaacttggaaatggcctcc

SEQ ID NO: 151474 - DNA, 1699 bp, Arabidopsis thaliana landsberg; identical to SEQ ID NO: 63598

SEQ ID NO: 151475 - DNA, 491 bp, Arabidopsis thaliana landsberg
caccacttcttgttccacgttctccatctaaagatctcaaagattggtggatgctacataccacgtggcactatcgtgctagtgaacgcttgggccatccatagagccccaagactttgggatgagcccgagaagtttatgcctgagcggttcgaagaccaagaagcttcaaagaaactaatggtgtttggtaacgtacgaagaacgtgtcctggtgcgactttaggccagaggatggtattgttggctttaggttcgttgattcaatgctttgactgggaaaaagtcaacggtgaagatgttgacatgacagagaatcctggaatggctatgcgtaaactcgtgcaattacgagccgtttgccataaacgtcccattatgcctaatctcttggacttaaatatcactttttattgtccgccattttgaagttaaccggtttaagcattttattgggtgtagattttttatatactataatacatgagtgt

SEQ ID NO: 151476 - DNA, 2431 bp, Arabidopsis thaliana landsberg
tctataaataccatcttagtcaagaattactacaagctccagttcaaatacatgtattatgatttagattatgttaaaagtaagaagaatattgactaggattgttgacaacgattgaaatatagggaacggtaagtaccctttttcagatactgaaccaagaacttgtgtcccgtattcacttgtggcattaatggcaccgatatagattttgctgtctctggcaccagcatagaacacacaccctccagggtccaatgcgagtgcattgatgactgaaggaaaaatgatatttttcaacaatttccctcttgacaagctccaaacctatatggatttacaaatccaaccaaggtcatcaaataaaaaagctatatcaggttctatttctcagctatatcaaaatgaatctcattaacaatacaagagctaaactttcattgcagttaacaaatgcataacattagtgatccaaataagtaccttgctagtccgatcttctgaagaggaaattatcacagcattgcagcctccatagtctataacaatatcagttacagacattgtatgctcattaaaattgtgttcataaagagtgttcccttgctgcctctggaaatcatcaaatagcctaactaaccacaaagagcaaagaatcagaataaaagacaatgccttgcaaaaaaacaagcatgataatacacaaagttttaaccttataagagaccaaactctaatagacccatcttgagatccagaaaccaacaaagaatcatctccagagaacaccaaacatgttactgaacgataatgaccatgccacttcttaagcaacttcccagtcgcaacctcccaaaggtaaatatctccagagattccaccaccaactaagtaagttccttcattgtttgctgcaagagcctttattggttccactgggtagctcttcacttcagcttgaggctacaattcaaaacaagtttcaaactttctatccaaagagaacaaaaaaacagtgatttcaagtttgagaatgagaccttagtccaagaccagtaaaaaatcgagccagaagtatttctcgccgagagctgagaggaggcgagaaatttttcgccgacggcggtgagaccatgcgccggagaagcacacggcttgaattgaagctgctctgtcccggttttgagatcccaacttccaattccttcatcgattgaggaagaagcgattacagtaatctccatagctcagagaaagagggaagaaaagagaaactgattccaagtctgggttttgtgatatctataaattagggtttatgaactatgtatgtaatttgataaattaatagttttgtgtcttatttaatttccacaaacttaagggactataatgtaaattttgtgtgatattgataattaacagtaacggatcgtttagattggagaacaatggcgatgataagcttttcgtttccatctcccgccaaacttccgattaaatctcaaccgtccgtttcaaatcggatcaacgtcgccgaccgtttgattctccgtcatctcaatgccggagatcttcgtggagcggtttcagctcttgatctcatggctcgtgatgggattcgtcctatggactcagtcactttctcttcacttctcaaatcttgtatccgagcacgcgattttcgtctcgggaaactcgtacacgctcgattaatcgagtttgatatcgagcctgattcggttctctacaattcgttgattagcttgtattcgaaatctggagattcggcgaaagctgaagatgtgtttgagactatgagaagatttggtaagcgagatgttgtttcgtggagtgcgatgatggcttgttacggtaacaacggaagagaattagatgcaattaaggtttttgttgagtttctggagttaggtttggtgcctaatgattattgttaccccccggtgatacgagcttgttcgaattcggattttgttggagttggtagagtgactttagggtttttgatgaagactgggcattttgaatctgatgtgtgtgtgggttgttctttgattgacatgtttgtgaaaggagagaatagctttgagaatgcgtataaggtgtttgataaaatgtctgaactaaatgttgttacttggactttgatgattactcggtgtatgcagatggggtttcctagggaagcgattaggtttttcttggatatggttctaagtggatttgaatcagataagttcacactaagctctgtgttttcggcttgtgctgagttggagaacttgtctttgggaaagcagttgcattcttgggctattagatcagggcttgtggatgatgttgaatgtagtttagttgatatgtatgcaaaatgttctgcggatggttcggtagatgattgcaggaaggt

SEQ ID NO: 151477 - DNA, 382 bp, Arabidopsis thaliana landsberg
  unsure (1)..(382): unsure at all n locations
ctccgtcaccaccggctctgtatttcggcatttgtggagagaagaaggtactctcatccctttctctttcttatcttaatctccttttttaaaatttgtgacaaagtaaaatgagctaatctcgtctttaagatcatatgtcaaaactgaatttgagttttgatatattcaggtaaagagagaagatagaaacataaaatgtcggagaagaagggaaggaaagaggaggtggtgaccanagagtacaccatcaaccttcacagacgccttcattgctggtaatttccaaaacaccaaaaacacttttgtcttattgcttcaaagcttttactgttagatagtggaaatggaatgttgataatgagctcttagctaatgtttt

SEQ ID NO: 151478 - DNA, 2700 bp, Arabidopsis thaliana landsberg; identical to SEQ ID NO: 963

SEQ ID NO: 151479 - DNA, 1368 bp, Arabidopsis thaliana landsberg
gggcttaagttctacataatatgaggaatttgaaaaggcatgttcctgaagagcatcaaaactctgttcgaatgcatctcccatgtggagctttagctggtttatttggccagaccatcacttacccattggacgttgttaggagacaaatgcaggtaaaaaaacaaccaaaccagaagcaagattcaaactatgcaccatttcagaactcagaacatattgggcgtttcgtgtgaccacaggtagagaatctgcaacctatgactagtgaaggcaacaacaagcgttacaagaacacatttgatgggcttaacacgattgttcgaactcagggttggaaacagttgtttgctggtttaagcatcaactacattaaggtaaatcagatgaagaaacaatgaatccaatatctcagtctcggtttcacttttttcctctatgattcgtttaattgtctttatttgctagattgttccatcggttgcgattggattcacagtctatgagtcgatgaagtcatggatgcgaattccaccgcgagagagatcaaagccagcatgagggtctttgttccttcactctcttatagaagacacagaagacagaagaaaacatgattgttagacagatttttttttccctacttcttttcattttcaaggccaatttgcccctaaaaatccttgatagtgataatatttttttgagaaattatgctaaaatttataaatctgtgatcaaatccaagcgaaagataaagttgatatctgttgttgtgcagcaaggatttggaaaatttccaattgacaattaagaaaaagtttcttagaataactcgaacttaaattgtagtattggagatttattaagtttgtaacaactttaatgatggaccaatttcacatgcgtatgtgtaattgaaatgtcataaacaaccccacttcgtaacacgacctagggttataatcgtctttttgtgaacaaatccgaccgagagagagagagagatatatttttggcagtaagatcaaattttggcattggtaagttgttgttccttcttctcctcccgcaggattcgactcttcagttccttatttaatcatctcatcttctgggcaagtcctcttgttccttgctaaaatttctgggcttttttccctttgtttttcttcttagatcactctgataatttttcgttttttatttctcagaaattcgaggtttttatagggttgtggtcttagcaatggaaggaatgttgtcgtccggtgaccaacagagattagtctcttctttccttgaaatcgccgtcggacagaccgccgaaactgctcgacagttcttacaggtttgttgctcaaaact

SEQ ID NO: 151480 - DNA, 440 bp, Arabidopsis thaliana landsberg
gtcacatcttttgcatgtagcttggataagcatcgtaaatcatctgtattggagcccaaggatatattactccacctaggtctgtacttaatttggtgatgagctctgttcaatgtgaattctaagtagttgctattgttactcattttactgtttgctgagttataactttatgcagagaaaaacttgcacttgacaattcctggattctcaagtgaggataaacgtcaaacaaaaactgtaagtgattttctttttaaaactctttaaaagcacagaaagtatatgtgaatgtgcatcaccacctgaatgtccaataaaagaaaaagagaaagaacatgagtttgctagatattgatcccaagtcagcaacttgcaggtaccaactgatctccacaagaaacgacttgcaatggtaagctgaatgatattccaaacat

SEQ ID NO: 151481 - DNA, 2035 bp, Arabidopsis thaliana landsberg
tggaaaacgtcgttgacatgctgaagatggctaagggctatcttgcacggtttgctgttggacgccttctacagatgaattaccaagtgaggaatggaatgatggcagctggagcttatgggcttgctcagtttcgtttgaggttctttctatggggtgcactccctagtgaggtaaaattcttaatgttatctctttgttttatattaatgaatagatgctgttcttaatttgtatctttctgtttcagataattccgcagttcccacttccaacacatgatctagttcatagaggaaatattgtcaaggagtttcaggtaaactggtatattagtacctttcaatttgttttagcaaattctcatatttatttgtaactaatgcagggaaacatagtagcctatgatgaaggacatactgtgaagttagcagacaagcttctgttgaaggatgtgatttctgatcttcctgcagtaagtattgatgtttttagcaaattttgactaaaattaggtacagtttgtcttgaatattttctaacttcctatgtttttgtattaggttgccaacagtgaaaaaagagacgagattacatatgacaaagatcccacaacgccatttcaaaagttcatcagattgagaaaggatggtaagattcttattatttttttgggcaaacagtgtaaaaacatatatttgacaactattatggcaactgatgttcattaacaaattgtttctgaattttttcaacagaagcgtcaggttcacaatcaaagtccaagtccaaaaagcatgtcttatatgatcatcaccctcttaatcttaatataaatgactatgaacgggtttgtcaggtccccaagagaaaggtacaactttctttatactcgattgacgatcatatatttttttggctctggtctgttttagtgtctaggaatattctgattatttcaaaacatcttttggtatcagggagcgaattttagggactttcctggtgttattgttggacctggtaatgtagtcaagttggaagagggaaaggaaagggtcaaacttgaatctggaaaaacattggtaagaatgatcatctcttttttttggtctcatatcaagttgcttttctcctgattggctggctatgttattcaaacaggttcccgattatgccttaacatatgtcgatgggaaatcatgcaagtgagttttaattctcttttcttcgtctctgaaaattctgtatttgactattgttttctgttatggaaattgacttaagcccttcgctgttttcagaccttttggtcgtctttggtgggacgaaattgtccccactgttgtcacacgggcagaaccccacaaccaggtgagacctctcatgacaatcaagtatttgttctgaattttggctagttgttattctagtgttctaggtttgcatagatttattggtatgcatgttacactggaaccaacttaaagagtataattgtttgatgttgctggtgattgattgcaggtgatcattcatccagagcaaaatcgggttttatccattcgagaaaatgcgagactccaaggctttcctgatgactacaaactctttggcccacccaaacagaagtgagtattgttaagaccttgagtttatgtgttcttggtggatttattgctgctatagttcttaagactaatcttacataatttctgtttttcaggtacattcaagtaggtaacgctgtagctgtgccagtagcaaaggcccttggatatgctttgggaacagctttccagggactcgcagttgggaaagatccacttattattctgcctgaaggttttgcattcatgaagccaactcttccttccgagcttgcatgaacactgttgattcatcgcattcttcgatttatcttctattcattgttttcctaggatttatcttagactatttgctgcggagtttggatttgttttgtttaagtttcacgactttcaagttaagtactgtgaattgctgttaactt

SEQ ID NO: 151482 - DNA, 1832 bp, Arabidopsis thaliana landsberg
atgtacagatagacacaaaagatatcctatttatctgtggaggagcatttgttgaccttgagaagaccattgtggataggtaattcattattcgtcctttttttttttttggcaatagattaggggttctgttttgacattgatcagcatctctaatgctctgccagacgacaagactcatcaattggttttggagctcctgttcgtgccaacctggctaccagtggagtgaccagtggtgcaataacttcatctttgctagaatcggtaaacactgcacaatttttgttaagtctctgtttcccagtgtaaacacttctcattcctggaaagagatcttagttttggaatgacggctacatttcaggttgagagtgccgatctgacagcatatggccttataccggagtttgtaggacgctttcccatattagttagtttgtcagctctgacagaggaccagctcattcgggtactttaacattcttcatagcttttattttatcttgtagtggatggtgtgtttctttgattgctcatgtgcagctagtaaaatcaaagtgagatagtggttgctatcatcgagggcttgatcttattgctcttctcatatttaagggtagctaatatcacctttgctttttgccctgtaggtgcttgtagaacccaaaaatgctcttgggaaacagtacaagaaactatttagcatgaacaacgtaagctccctcaaaatatacacttgccaagacttgcatgttataaaatattcagtgttttaagttcaaacttgaccttttggtccctgactgcatgatctgttacaaaatttcaggtaaagctgcattttactgagaaagcgctggagataatatccaagcaagcaatggtgaagaatacaggtgcgaggggactaagagccttacttgaaagcattcttaccgaagccatgtttgaggtaacttcagctaccacaaatattggtaaggtactaatataaatcttgctttcacacttctgtttgatttctcttttcagattccagatgataaaaagggagatgaaagaatcgatgcggttatagtagatgaggaatcaacaagctcagaagcttctcgtggatgcacagcaaaaatacttagaggagacggggcttttgagcgttacctcagcgagaacaagtcgaaagatgctacagaaccaatggtatgactgcaaacatcatctattgtagtcaatataaactccggttgtgtgtatgtaaacatcactagtctcattctgcatttggctatattgatcactgaaacggtgaaacctgatgggtgtaatttgcaggttgacgaaagagtaggctcggcgaaagcaatgagattgtaaagagaatgagagaagaagggttttaacatgaagagttttttttttttttttttgtaaagaacgatagcattcataaaagtgcaagaggaatttatccactctgtacaataaaatgttagcttacagattcgaaagctgaattgttgttacatagaaagaaaagaataggatcggtgtaaaaacaacatttttgtaactctctctgtttcaaaataacaaaagtgttattagtttgtcagttcatgttattacaacattttttagttaatctcgataatgtatccgttagttaggaccccaacagctcaagaacataaccgttctaagtgactcttcagattgctttgacttgtcatcatccttactagaagcgacggcgatggatgaaaagaatctgatagcctcagaagcggatctcatgttgttacggatacgttattcactgatcggatcaa

SEQ ID NO: 151483 - DNA, 1167 bp, Arabidopsis thaliana landsberg
ccaaatctttcgctttggaattcgccattgacaaagtactcaattccaaaacaaagaataagcaaacaacaacaattttcacttccttcaaaaattataaaaatccagtttttatctttgcaagattcaaaagtttgaatttttacttgttttgatttctgggttttgtttgttttttgatttcggtaatggtcacactaagcataatattttcgtgttatgttgacagattataaagtgggtatatgtggttagaaacccagtttatttaattccgctcgaactccggcgagcaatagtccacatccggagtttgaaaccgtcaagccttcgagctcttccgttaatggtgaagatcagtgtgtaacaacaacgaacaatgaaggcaaaaagtctccgtttttccctttttatagtccaagtccagctcactatttcttctccaagaagactccggcgagatctccggcgactaattcgactaattcgactccgaagcgattctttaaacggccgtttcctcctccgtctccggctaaacatatcagagctgttttagcgagaaggcatggttctgtgaagcctaattcgtcggcgatccctgaaggtagtgaagctgaaggaggtggtgttggattggataaaagctttggtttttccaagagttttgcgagtaagtatgagcttggtgatgaagttggtcgtggtcattttggttatacttgtgctgctaagtttaagaagggtgataataaaggtcaacaagtcgcggttaaagtcattcccaaagcaaaggttagtgtttctatggtttgttagtgacgagatctggtgaattagagatgatatttgcagaactattgaatgtgatatgtcctgtttggtgattgtgttgtgtagatgacgaccgctattgcaattgaagatgtgagaagggaagtgaagatattgagggctttgtctggtcataacaatcttcctcatttctatgatgcttatgaggatcatgataatgtctatatagtgatggagtaagctcactttttgctctaacttatcagcttgggaattggcattattaccgaggcttaacaagtgtttctgaatctgttgatttagactatgtgaaggaggagagcttttggatagaatactttcaaggtaaag

SEQ ID NO: 151484 - DNA, 736 bp, Arabidopsis thaliana landsberg
cttcacttatgttcttctccttcttcttctggatcatcatcgtcatcttcaacaagatcaacggtctcagatcatccccagcttcaaagaaaaaacttaatgatcatcatgttacatcccagagtcacggaccaaagtttccacacggaagcttgggatggcccgtcatcggtgaaaccatcgagttcgtctcttctgcttactcagaccgtcctgagagtttcatggacaagcgtcgtctcatgtaacaactcttatccctctttctatacgtgttccttaatctaaaactaataaattaaatatacgtgtttatgtatgtaaaggtatgggagagtgtttaagtcgcatatttttggaacggcgacgatcgtgtcgacggatgctgaagtgaacagagccgttttacagagcgactcgacagctttcgtgccgttttacccaaaaacggtaagggagctaatgggaaaatcgtcgatacttcttatcaacgggagtttacatagacggttccatggattagtcggttctttcttaaagtcgccacttctcaaagctcaaatcgttagagacatgcacaagtttttgtcggaatccatggatctatggtccgaggaccaacctgttctcctccaagacgtctccaagactgtcagtatacttatcccttaatttaatattttcttacaaaagttctaaataatccaataatcccttttatatatgaagtaaagca

SEQ ID NO: 151485 - DNA, 1096 bp, Arabidopsis thaliana landsberg
  unsure (1)..(1096): unsure at all n locations
gagaatgatgaaggagcaagctgagtttgatcaagaagcttgcagttgttgaatgagcttatggtgaatagagagaaggagaatgctgagcttgagaaggagctagaggtgtatagaaagagaatggaggagtatgaagctaaagagaaaatggggatgttgaggaggagattgagagattcctctgttgattcgtnnnnnnnnnnnnnnnnnnnnnnnnnnnnnnnnnntggagagttacagtttaagaacgttgaaggggttacggattggaaatatagagagaatgagatggagaatacgccggtggatgttgtacttcgtcttgatgagtgtttagatgattatgatggagagaggctttcgattcttgggagattgaagtttcttgaagagaaactcacagatcttaataacgaagaggacgacgaggaggaggctaaaacgtttgagagtaatggtagcatcaatggaaatgagcatattcatggcaaagaaacaaacgggaagcacagagttatcaagtcaaagagattacttcccctgtttgatgcggtcgatggagagatggaaaacgggttaagtaacggaaaccatcacgaaaacgggtttgatgattcggagaagggtgagaatgtgacgatagaagaagaagtggatgagctttacgagaggttagaagctctagaggcagatagagagttcttaagacattgtgttggttcattgaaaaaaggagacaaaggtgtacatctcctccatgagattctgcaacatcttcgtgatctaaggaatatcgatcttactcgcgtcagagaaaacggagacatgagtttatgagtttgattttgagttttgggtttgagtccactctttgcatagtgacacaaagaacaagaaaaatcatacaggtatataacttatctctgttgactgaagaatattttgttttgtctttttccatgtctatgatcacactttaaagaagattcaaaatttattgtttgtaataaggtatggaagtgacatgttgcttgagaggcaaggaacaacgacaaggtttctgatgaagaacagtacgtttctcataataata

SEQ ID NO: 151486 - DNA, 2653 bp, Arabidopsis thaliana landsberg
  unsure (1)..(2653): unsure at all n locations
aagaccaaacggaatctggtcacttcccaagggtatggcctgttaccgggataaagagactgatgagcccaagggagatgctactgttacctatgaggatccgcatgctgctttggctgctgttgaatggttcaataacaaagattttcatggaaacaccattggagtttttatggccgagtccaagaataaaaatgctggtgatgcagttgagtttgttgaatttgatggaggtgctgacgaaacaaatggaggtgctggaagggggaggggtcaggctgattcttcggcaaagccatggcagcaagatggtgactggatgtgccctaatacaaggtctgtgatgtgatatcggtgaggagcttcatctagctcttgtttccgttaatttgcaagtttttatatatttcatagtctttagcggtagtgttctcatactcttgtattggcagttgtacaaatgtgaattttgcattccgtggggtttgtaaccgctgtggaactgctagaccagctggtgcatctggtggcagcatgggtgctggtcgcggaaggggtcgaggtggaggcgctgatggtgggcccccagggaagcagcccagtggtgctcctactggtctctttggtccaaatgattgggcttgtccaatgtaagcattccgattaggtttgaaatagttagttcagtatcagaggataatgagcgtttggtacttgattaaaacacatcgcaagaaacaatttatatttcatcagtagcaaaagagaacattcagatggcatatagcgttgctggatataaaattaatttgtcttatgtatggaaggaatatagcttgtatatcaatgcttttgatgatgtcagttgactctttacttagaaagaagtgatggcccgctctgctgtgctgtgtctcttaaactggtccaaattatgtgtggaggcacatattttttccttcttttttgaatgttgattctaatttcgtaattttccttcagatggctgttaatctgaaaaatgtaatttgaaacgtgggtaggttgtagtcttgatccttctaggaagttatatttgtgaagattggctgccttcaattttctgtgtctgattcaaaaaatggactatgttttagtttaatgtgcaagttatgctatgtgtcatcgagtagcttaactaagaggctgcactgtgtgaatgtgagttcttatgcataatgcactttttctttttgcgctaattctttcaggtgtggcaatgtcaactgggcgaaacgtctaaaatgtaatatctgcaacaccaataaacctggtcagaatgaaggtggtgtgaggtatgactcaaagccagtgataagattgccttgtattgttatcttgcaatgttcgagctgaggatttggattataaatgatttnacagtgaatgtaggagaggtcatagattttctgttcgatgtttgtagttttgttgtcagcagggtatatttattctgcttttagacagggcctaatagataccttggaaaaagtctcaatactctcttctgcaatttgaacgagtgcttgttttcttcgacaattgatatatcccacttgtaatgttttattttggccaaattagagttgcattaagaaacattaaggtttgagtttggaaggttgtttttctcttaaaagaccagtgcttattcatttttttttccctctaaataggggaggtcgtggtggtggttacaaggaattagatgaacaagaattagaggaaacgaagagacgcaggcgtgaggctgaagaagtaagatatgcttttcctgaagagttctttgttttttgtttgtttgttgcaattcggatgagctctcagttttttgtatattccatttgacttatacgtctaatatctttcaggatgatggtgaaatgtatgatgagtttgggaatctaaagaagaagtaccgtgttaaaacaaaccaagctgacaccagacctgctgttgctgctggtcgtgctgggtgggaagtcgaggaactaggtaagttctgtttaattttaactcatatgaactaaatctatgcaatcatcaaataggttgagcttatgaacagaacctttccactataatagagatttatttggctcgatctatatctactctctgtgtatagtcttcaaagaaagtttctgcttgtcatctagacacttgagtgaaacttaacatatatgcagggagggatttgtttgaaattttacattaagcttgcagctaacttgcctatagcccaagcctagtggggatctccaataaacagtgttgttccttgttagagttttcttcttttaactgaatagatatagaggaagatagaaaagaatgtttattgctgcttccccaaaaataaaaaggtcatgatccaatgtagttgttcataatttatatgaatgtggcaggtattgataaagatggaagagagagaagcagagacaggcaaagagaccgtggtagagatcatcactacgataaggatagacgcagaagcagaagcagaagccgagagagggaaagaggcaaggagcgtgactatgactatgaccatgatcgggacagagacagagactacggtcgcgaacgtggaagcaggtaccgtaactga

SEQ ID NO: 151487 - DNA, 940 bp, Arabidopsis thaliana landsberg
acgatgcattggaaattaagaagattgagagagtaacaaatcatgatgtgaaagcagtggagtatttcttgaaacaaaagtgtgaatcacaaccagagattgctaaggtttaggttcttttctctcacttataagttcttagggtttggatgctttgatgccctgtaactaaaattttggatgtctttttactgagttaggttcttgagtttttccatttcgcttgcacgtctgaggacatcaacaatctttcccatgctttgatgcttcaagaagcacttagttcggttatacttcctaccatggatgagctgatcaagtcaatctctctgatagctaagaactttgcttatgtccccatgctttcacgaactcatgggcaggtaatgtccaaagagaagaccttcaccattttacctttccctatttatctgtatctatctctttactaatgattttgtttactatgaattgtaatgcagccagctacgccaacaactttggggaaaaaaatggcgaattttgctgtgaggttaagcgaagaaaggagatatctttcagaaactaagattaaggggaaatttgcaggtgctgttgggagctacaacgcccatatttccgcatattcgaatattgactggcctcatgtttccgaggagtttgttacttctcttggattaacattcaacccatacgtgactcaggtaatatagtttatattgatccaacaatcctattccaattcataaagatcatcgctgattgattgttctgtgtggttttttgcagattgaacctcatgactatatggctagactttttaataatatcagccagtacaacactattttaattgatttagacagacatatatggagctacatatctctagaaaacaaaaagcaggcaagaattgatataagaaaggaaaaaaaaagat

SEQ ID NO: 151488 - DNA, 1635 bp, Arabidopsis thaliana landsberg
gaaaatttctgcaggtaccgacaattatccacctgagcagcttgtggatatagttgcaaggattttcttcatggtacctccatggacacgtgtatatagagttcagcgtgatattcctatgcctctggttacgtcaggggtagaaaaaggaaatcttcgtgaactggctctagccagaatggatgacttgggccttaaatgccgtgatgtccgtactcgtgaagctggaattcaggtcgcgatgtcaattgttgtttcttcctttgttttgttgttgtaaatactgaatttcctaacaaaagctagcttgtatggtctgagtacaggacattcatcataaaattaagccagaacaagtagagcttgtgcgtcgtgattacactgccaatgaaggttgggagacgttcctttcttatgaagatacacgccaggtacaagcttcatatctctaatcctcgcctctcacagcatagtccctaagactttattgaatgaattattatttggtttactaagatcacatacgtcttgtcactcattagatacattatgtcatgtttatcaaatatagatgttggtattctatttaaaaggaaaactgtcaagtttaggtaagacgctgagagcgttatcttttaacatatcagcatctgttcttggtcttttccgaatttctaagcctattggactaacagagtaagcatgtgcctttgtgtatcgttggatacagtgagtttgtaattttgatcaaatctccagtaagatctagtgtcatatatcatgtgatcagttttaaatccataatttcatttgcatgcactaaggcaagagtttcatgagaaacttgaaaagcttatcttctcaacccttaaacctgattggttactttggaatctgttaaggctctgaaattttcttaaacatttatctttgtggatgcaggacattcttgttggattgctacgtttgcgaaaatgcgggaagaatgtaacgtgtccagaactcatgggaaagtgttctgttgtccgtgagcttcatgtatacggaacagctgtaccagttcatggtcgagatgctgataagttgcaacatcaggtaccacccgagattcaacttgaaattgacacttaaattaaggacttgtgattctgattatcttattatttcctgtatcgaatttgcagggctatggtacacttctgatggaagaagcagagaggattgctagaagagaacatcgatctaacaaaatcggtgtgatttctggtgtaggaaccagacattactacagaaagttgggttatgaattggaaggtccttacatggtgaagcatcttctttgaaattatgtttacttaaaaaccaaattcgtaaaatctttatgttgaactagtgagattaatcccttgtggtatcattttgctctttaaattttcatagtcaaaaagttgagaaaacggctaattccttcacgaactatggcgattttgtaagattaatctgtaatgcgtacacatgttgctaagttttacagaattttgcatccaaaaacgcctgaactaaaatcatcattcatcacttccacttgtaagcaaaagatgttcacatcatctaaaataaaccttcgaaaactac

SEQ ID NO: 151489 - DNA, 1187 bp, Arabidopsis thaliana landsberg; identical to SEQ ID NO: 48053

SEQ ID NO: 151490 - DNA, 2501 bp, Arabidopsis thaliana landsberg
atgatctttatgtcgttggaaagatctcgctttcaagtttccagaacaccttttagaagcaaaatccgaggtcggtagccaaacaaaacgaagaaggaacaatcaaccatgactcataaaactgattagaaacatgaaactttcttcccctgagctacttcatcattcgttgattcttcataaatactggcgaataattaagaaccgtactccataggctcatgtttgattcatctctctttctcatgataagaatccttgttggccgcactaagaacaaaaacctcttctttcattttgaaagagaacatgaccatgaacaagctcttcttctcttcttacaaagctctttatagaattcatatcagtggtgaatcaaacaatgtgggcagtcttttcaatcatcactgactttttatctaaaccaagttcacaaaaattaataagaacacataagaaaagttatgataaaattacaactttaattcagtgaataagatttgatgggatgattctcttcttcaaatttcaacgcaattcaatcttaatcaaaagatagagagatgttaaagttgaagacattgatattcactaaataattcttcctaaagacattgatattcatcaaaacttataaaccttaatcattaccagctaaatctgcaaactcaaaacacacacttactcataatcgaattcaccccacaattagtttttcttagtcaatgaagctttaattcaaacctgggaaatattttggagctgatcgattttactccggatgggattaccaaattaacaattgtttttttcttcgttcaccgttggtgctgcaacgtccccaattgatgaattcgacgttaacggagtgtcgactcactggaaatcacaaatcgccggtgacatcgtatttgtgtcgagagagagtgagttgaaagcgaaggaagaaataaaaaatcaactttttttgttttgttaaaaatagaaaattaatcgcagcaaaacacgtgtttcctctctcaaactaaaaaaaactctctcgagagagcgcctctcttcgttaattttcagtttacattaatttttttgatacaaaatacagagaacctgcgaaaaaacacaagagaacctcccattggaggtgctctaactatcatagaaggtttctggttatgaaatgaattattaatttaggaatcgaatccttatgatgtttctctttatctcgagacttttaagttgagaacatattgtgtaatgaatagtgagtctactctttaacacaaaagcatgagcttttaaattatttggttattggatgtctctagatgctgatacaaacgaacgaactgtattcaaatacattaaaattagtgttgcttttatgtgcaataaaagaattaactattatttgcaaaagaaaaaaaaatacattaacactacatttatgtgtaggtaaaccgtatccctagagctgagagtctctgaccgctgtagcgtaggggagtcatctgctaaagtcgttaagtgagcatgtgtgaacctacgagaaaaccactagtacatggagaaaatcaagagcgttgactctcgcatagtcaatgtcctctaaaatattatgaatcatggatctccaactctgatacactaaaatgaattgtgtcttcgcggcaccgtgcttagcgtttatagatccgtaagctaaagaaaaaatataatttatggtaatgaaataaattttcaataataacttatagttataatataaaaatgtagtttaatatttgataatgtattacaaaaagttatgcaaaataatttataaaatagttagtcacaaaaattgtacaaaactaaaaaagtcttatgtgattaactatgatatgcctaatgatttgtgctagtgccattgtcgcatgtcgtaattttgtaatcgggtcttttgtcacctctcatttttaaaccggtataatgcatgcatgttattgaagaaaaaaaagttgtaatatacaaaatttgttatttaatattaaatttgtaatacacattcaaaagccggctaaaaccggcgaaccatcaaaaccccggttcttcaagtttttagtctttcaccattgcttttttgtgtttttttacagtaaaattagttttctatcatttgcattgatttatttgatctaaatattgtgtgatagagaatgtgttctagattgtaattgtacaatgatccaatggtatgactccgaaaagagtttatggacaactttgaaaagtttggaaaaatggcctagtttttttttatgtaaacttggtgaattatggtgggaaaatgacagttgtattggtggagcatatgttcggtaagaaggtcacaaaagtacagtgtgcgaaaattgcgattgaaaaacgccaaaagagaaagatttggggaatggcagagtggtttgacatttgtgtttacaaccaatggagtcgtgcatgctcttgctactaccatttga

SEQ ID NO: 151491 - DNA, 1025 bp, Arabidopsis thaliana landsberg; identical to SEQ ID NO: 16973
  unsure (1)..(1025): unsure at all n locations

SEQ ID NO: 151492 - DNA, 963 bp, Arabidopsis thaliana landsberg; identical to SEQ ID NO: 38438

SEQ ID NO: 151493 - DNA, 403 bp, Arabidopsis thaliana landsberg
gtctcctccgctcaatttcagatcagaatcagatcatccatggaaacagcgtcgagagtggaactgattgttaaaggcaacttaccggaggttccttctcagtacattcagccaccggaagctcgacctaatctccattactccggcgatgcagcttcgatcccaaccgtcgatctctcgagctccgattccgcgagagaagccatcggtgacgcttggcgcgactggggagccttccacgtaatcaaccatggtgttccaatccatctccttgatcggatgaggtctttaggtctctctttcttccaagactctcccatggaagagaagctacgttacgcctgcgactctaccttcgccgaatttgaaggttaccgtaaccgtatgtggcttggtgctaaaa

SEQ ID NO: 151494 - DNA, 1316 bp, Arabidopsis thaliana landsberg; identical to SEQ ID NO: 64548

SEQ ID NO: 151495 - DNA, 591 bp, Arabidopsis thaliana landsberg
gcgactggtacaaatatacaaaatggtcaagtagttcagtttgaatcgtcttcgtgcttcgtggatggtaaaggaaagtacgaagaataccatcagacttatttgaagatagacgggagtacagccgagaagtttgtgtcaaaaggtatgtacaaggatccgagtggtctctctgttcttactgggagcaacaagaagaaactgatggaccatgcaagctttaaaggcttgaaggatccaaaacgtaactctcaagagaaaaccctgagaaccagcctgagccggttgatgccaacagtcagttttaatgacaagactctaaactcacccacatctcagaaacgaaaatccgctgtttatcggctttctttcaaaaggaggtcgtgtgatggtgagaaagttactgagcaacgtaagttgttgtaccgtccaaaagcgggattcacaattccttcctcgggcagagaaaagcagtctagcggaagttggtctgagataccgccttcaacttttaaacaccgtgaagaaacctatttcaagtaaacctatcaccactctgttttatgtatctttactatatactgctgtgtc

SEQ ID NO: 151496 - DNA, 601 bp, Arabidopsis thaliana landsberg
tcgacgtttcgatcaaatgctagggaagatcatatcagctaaacgagaggagatcaaaaatcatgggattcatgactcaaaaggagaggccatggacgttttaacatattacatgactatagacacgaccaaatataaacacttgaaaccgagtagcgataaattcatcagagacactattttgggtcttgtgatagcggcaagagacacaaccagctcagctctcacttggtttttctggcttctctctaagaaccctgaagcaatgaccaagatccgacaagagattaacaagaagatgccaaagtttgatccggcagatttagacaagctcgtgtacctagacggtgccgtgtgtgagacgctaaggctatacccatcagtcccattcaaccacaagtcaccggcaaagccagacgtgcttccaagtggtcataaagttgataagaattggagggtagtaatccctatttattcattaggcaggatgaaatctgtttggggagatgacgcagaagattttcgaccagagagatggatttcagacagtggaatgttgagacaagagtcttcatataagtttttggcgtttaacgcctga

SEQ ID NO: 151497 - DNA, 522 bp, Arabidopsis thaliana landsberg
gttgcaggagcacatacgattggagtagcgaggtgcacaacgtttaagcagagactatacaatcaaacggctaacatccaaccagacgagacgctagagaggtcttactactatggtctcaggtcgatttgtccaccaacgggcggtgacaacaacatttcacctctagacttagcgtcgcctgcaagattcgacaacacatacttcaagctccttctatggggcaaaggcttattgacatcagatcaagtgcttctcactggtaatgtaggcaagactggttcattagtgaaagcttatgccgaagacgagagacttttcttccaacaattcgcaaagtcgatggttaatatggggaacattcagcctcttactggttttaatggtgagatcaggaagagttgtcatgtgattaactaaagaaactgtgtgttttgcattattattgtattaaggggtgattaagaataagtcgtgttatgtttttctatatgttagtgatctaattaacgtctttgaatg

SEQ ID NO: 151498 - DNA, 787 bp, Arabidopsis thaliana landsberg; identical to SEQ ID NO: 13786

SEQ ID NO: 151499 - DNA, 3125 bp, Arabidopsis thaliana landsberg
  unsure (1)..(3125): unsure at all n locations
attccattttttggtagaggaaactgaagctaacactcctccatataaacagtgtcagaatcccaattgaaaactctaggacctctctatgtaaacacataattgcttatacgtttttgttgaatactttccaatgtatcttaccttacgaaatactgagacacagattgttgattctcaggatttcaaaatatttatcatgctcatcggtttcttaactcaaaaagacaaattgcagaagaaattttcccagttctatcttgcaggttgaaacaatgcatacacatcatactatttctgttcaggaccttaaagtaacaggacccctcagattgctatgacttagaatggttctgcagatgattttcaagtgtcaaaggcaacacaacagaaccagtagacaaaagcagatgtggcaaaaaacaagaaggaggtccattaagttctagagtgatgcttacttaaaacaaatgtgtatcaatgttgaaagttgatgagaaagaagacagaagttgataggctgaacaactacacatacgagtagtgagcttgttttctacattatggcagatagcaacaaaatttattacagagacaagacattgatggagaacatcgaagctgcttcttacagaaatgcatattcggttcgattaaattgcacctacttagttaattcatacaaccttattatctagagttaaaggtatgatacggcaaatcaacagattttaccaataccaaaccggctcgatacataacattttggttaggtagttacaaaaggagttatactccactgctttgaattcaagatgtgattctcatccccttgtgctcctcacatctcttccttcctttcactggagatttctcgcatgctgatccattgtacagcttaaagccacaaattacttgacttgcagttgctgactgaacattttcagatgatccgtggttcaatgttttatctttgtgctgccaacatcttttgctgccctcaggagcacttcttgtacaaggcaatccattctttgttgtagcttcacataaaagacccgaaccctcttggttcatgcctgtacttgtctcaggtttggatttgtcctcattgacggctttatcacgttctgttgggttcagcagaaaaaagaaggcgttaactctcattcccttgtgatcctcgcatcgttttctccnnnnnnnnnnnnnnnnnnnnnnnnnnatcatgtcaggtaaaatcactccacatatattctcagtttcttcacattctcttacggtaggaacttcacacggtatgtggatcccgggggaaacacgagaaagtctcttccctttatgctctgtgcatctctttcttcctttgactggagttgtagtgcaagtagtaccatcttttagtaagactccacaagcagaagcagaatcagactcatcaactatgtcatcatgtttctctgaaaccggttgaggtctagaccgactgagtctaagtatagatggaagcgaattactctccttgtcagcagcatcagaactgacctctctctcttcttcagaatcagacttcttctcttcggttcggttgtcacttttgttctgagtagtaggaagaattgtttgagagaaaccctgcttaagcaagtcatgatgagcaaaagatctactataagaccggagcctagatctaatgctttcaggttgaccaagattagccacaagaacatcatcttttctgccatggtcatgactgagctcatacagaccctggaaggctccttggactctgtttctaccaacacgatctttaccttctctgaaattttccttatcgttggctccaaccagaatctgttttcaagtataataagtttgacatttaaaaatgtgtgtttttccaacttcattacttaagataaagagcttatattgatgacaaacatgagactaagccacctagttatcaaccaaagatacaagttacaatgtgatgaaggagattaaaaatgtgacctttggacctaaatctcgagaaattaaggagtagtccgcaaaagtcttgcgtaattctgcagtttctgaaatgggtttacgcagaaacatagatcgggcgaaaccctgaaagaaacccaagaatcatcaatggaattactcagaatctccagagatccaacaaagaaacgttgaagaaaagtgtggtaggcgttaaaagttagatctttaaataaaaattgcagatatttccaagagaattcattcgaaattctgttgatctcgaaagggttttcaacggaatgaaagatggagcaaaaccctaaacccagaatctctaaatttcttgaaatgcgagagtacctgccactttgaaaaaaaggggtcatgattagttcgaatgtagtcgtctctcttgaacatggtgaacacgacggcgaaggaaacgccgtcaccaaaatccaatctcttttcttttgttctcgtttcgtttcctgatcggacttgagagtttgtctgctgcccgactaaatttgaccgttaaggatggagaatttacagataaaagttttttttttcaaatttgaattcgtcactgctaatgaatacttgcagaaacttttgaagtacaggcgttggtatagtcttaaattgaccaccgttggatacttcaacttgagccttttttgaaattataattttcttttatatgatctattaatgatgtacatttggagctacaatactaggaaaaacgagcggtggaagctactaacgaatttgctactgaattctcctcaactacaagttctcaagctcagaaatgttacaggatagagcgcatgtttaatctaccattttacaaaactattaacccgccaattagcaaaccgatttctgttcctccttgtttgttattccacctacaaagattccagtgggaaggatacaatggacaacgtgaagaagagagacaagttgcaacttaacaaatgccaaacatttgaagaagcggcaactttctcgacgaaatacaaatcctttactcggattagaaactcgacatgttaaaggagttggctcgtgagcctaaggcttcaacttcttgttatttttcttcgagtgaagaa

SEQ ID NO: 151500 - DNA, 714 bp, Arabidopsis thaliana landsberg
ttttgctttattttggctggatttgtggtgcattcaggagagttcacacttcgtgcctttctaaatgggcgtttagacctttcgcaagctgaaaatgtcgaaaaacttatttcggccaagtcttctgctgccgcagatgctgctttggaagggattcaggtattcattttgcaattctttatgataaatcgtgtctaataatagcttgatgtggcttgtctgagatcattgttataacttctagtctttctctaccttttgtttagggaggtttttcatctttggtcaaatccttaagagcacaatgcattgagctcctcactgaaattgaagctcgtttagactttgaggacgagatgccaccattggatatagagtcagttattaacaaaataaccagcatgtctcaaaacgtagaaagtgcattagatacagcaaactatgacaagcttcttcaaagcggattgcaggtaaaatttaagaatagtattcattcttctcgttcatgtttaaaagaagggcatacgttttaatatgtcttccttattgaaatgttgcagatagctattgttggacgtcccaatgtcgggaaatcaagtcttctaaatgcctggagcaaagtatggaaacaaaatgatctttattttttgtaatgtaaaaaactgaaagttgcaatctttaagtctatttattcaaatagagtcacatttccac

SEQ ID NO: 151501 - DNA, 1501 bp, Arabidopsis thaliana landsberg
ctactctgtcataattattgctgttgttgtttaatcactgcccttcttctgctctttgtagctgtttttagtgttcgcactaagaggagaaaaaagatgattggagcgataccgttgttaaacgtaaagagaaaagacacggaagtcacggaaccacttgctgaaagtaaaatactcctctttataggtcaagtgaatagtctctgatgtattaaactgtttaagttgttgctacagatggggatagtattacaactgcaggctcacttcagtttgattttaaggcaattgtggcagcaacgaataactttttgccgattaacaagcttggtcaaggtggattcggcgaagtttacaaggtattaccattgaacagagcttcactatatgaggatgttcatttcacagttgcggaacaaacaagcactagttattaattatcatcgtccttcatttgtaacaagaactgacttcttcagaattgcatttgagtacatcttcattttcatgattaatcttacagtcagttcctatatgaatatggttatcttaaaataaattacttaagtagggtacattgactagtggactacaagttgcggtgaagaggctatcgaagacatcaggacaaggtgaaaaagagtttgaaaacgaagttgttgttgttgcaaagctccaacatagaaatttggtaaagctgcttggttattgtttggaaggagaagaaaaaatacttgtctacgagtttgtgcccaacaagagccttgatcacttcctctttggtcagttaaatttagtacgtagccaagatattttcaaattgtatgccattctttgttcttaacattttaaatacgctgtacagactccacgatgaaaaggaagctagactggacaagaaggtacaagatcattggaggaattgctagaggaattctatatcttcatcaagattcacggctcaaaatcattcatcgtgacctcaaagccagcaacattctcttagatgcagacatgaacccaaaaattgcagattttggattggcaactatttttggagtggagcaaactcaaggaaacacgaacagaattgctggaacctagtaagttctgctcgtagtagctgaacactaaaccattttctattgcatattaacccgtgttgtatgtttttcagcgcttacatgtctcccgagtatgcgatgcatggtcaatactccatgaaatctgacatttatagctttggagtcttagttcttgagattataagcggcaagaaaaacagcggcgtctaccagatggatgaaactagtactgcaggaaacttggtcacttatgtgagcataaagtcctcaactttcaacaatttaacattttaaaacatatgaccaaggtacttaattgttcattgtattaggcttcgaggctttggagaaacaagtcaccattagagctggtggatccaactttggaaggaattatcagagtaatgaagtcacta

SEQ ID NO: 151502 - DNA, 599 bp, Arabidopsis thaliana landsberg; identical to SEQ ID NO: 3193
  unsure (1)..(599): unsure at all n locations

SEQ ID NO: 151503 - DNA, 1127 bp, Arabidopsis thaliana landsberg
ccaaccataccgtcgccgttgatctagacggaacactactaatctctcgtagcgccttcccttactatttcctcgtagccctcgaggcagggagcttgctccgagcgttgatcctacttgtgtccgtaccattcgtttatcttacgtacttgaccatctccgagactttagccatcaacgtctttgtcttcatcacgttcgcgggtctcaagatcggagacgttgagctagtggtccgttccgtcctcccgaggttctacgcggaggacgtgaggcccgatacctggcgtatcttcaacacgttcgggaaacggtacatagtaactgcgagtcctcgaattatggtcgagccattcgtgaaaacattcctaggagttgataaagttcttggaacagagctagaggtctccaaatcgggtcgggcaaccgggttcaccagaaacccaggtattctcgtcggtcagcacaaacgtgacgtcgttttgagagagtttggtagccttgcgtctgatttacctgatttggggctcggcgatagcatgacggaccacgacttcatgtccatctgcaaggttatttccgtcataatctctttttaaatttggtttgtcgttttacattactttcttactatccaccgacattaaataatatcgatcgaggacgttatgagtatatacaactatatgtctctggaacttgtccgttggtgcagcttctttggtataataattattgtgttgtcctatggagtttactgcccttcctaataaatttgggccaatcatatttatacctttttgatgtgtagcagtaaatgacgataaaattaggtatataactattaaaggtattatattttttaggaaaacaaaaaagtgggtgttattttcctaaatatcttttgttataaaaaagcataatgtgttattctagataacatgttattttacttagaagtgtaactcccgaattaaatgttttttttacgacattatttttttccaaaaaaaatagtcagccattacaaacatttatatcaacctaaatgaccatatcttaatttactttgggttttcttatgctaatataatttctagatttgttgaaacctttcaagtgaattt

SEQ ID NO: 151504 - DNA, 1617 bp, Arabidopsis thaliana landsberg
attacaccatttcgaatcaaattctacaaccattactgattccggcggcgacaaagccaattctgacggtgaagagaggcaaaatctgggcacgagcagccgcaaatttccaatcaaattattctcagccgatctcagacgccatgactggaacgggacaaaagcttaacatccgacgacgggttggagaggtaaattctttgtctttttgttgtttatctccgacaccgacaagcttagacgtgtgttgtgttgtgttgatgattatttctgccttatattgaacattcaatacccttatgaatctgtgttctccttctgtagtgcacctgaagtggagaaaacaatttgaatgaagcagagatatttagttaaatctgatggtagtgtaggtgttaacggatatgtttgtgaagtgatgtgcgacgctatggctggaaatacgaagatgtcaccagtggtgactcaccactgagctccaggttcttcttctttcctctcattctctccccatctgctttccacttttttgcaaatggtcatacatcttttatttggcctatttttcagaaccggtgtgtaaatatgatagcaaacttgttccatgctcctgttggacaagacgaggctgttattggttgtggaattgttgcttcatctgagtctgctggtttagctttcaaaatgaaatggcaatataggagaaaagctcagggtctacctattgataagcctaacattgttactggagtcaatgttcaggtctaaagatttacttattcttatcctccaaaccatcacatttgctttggatagtgatctgtttctttcaaaaatcagtacattttcaaactttgtttcatccgctcaggtgtgctgggagaagtttgcaaggtactttgaggtagagctcaaagaggtgaaactaagtgaagactattacgtgatggacccagctaaagctgtagagatggtggatgagaattccatctgtgttgcagcgattctaggatccacatttactggagagtttgagtatgtgaagctattgaacgatctcttagctgagaagaatgcaaagacggcttgggaaactcctattcacgttgatgcagcaagtggaggattcattgcttccatgggtgaagagtatcaatgtcagtgatcataagtatggacttgtgttttattgttccgtgatcaccaagctaagagtcatcaacccacaaaccataagcaaccatatggttggtgtaacgacaatttgcctccaaatgaaatagtgacagtttcacaaatgccaatatagcttaatattaatgcgtaaagtgggaaaaaatatttttagtgtcaataagcccaaatatattaaacttttagtatatatattaaggggcccaaaatgtttttccctagggccctaaatatcgttgggccgggaccttactgtactacttaccactacaaccgcagaaagcagcccaaattccatgtatgtttcattttctacttcatagtcacaaactagcttgagagtcaagttaatgttgctgatacagagtctttcttttactctctagctagataccatatttgtctgtatgatggtgctaactg

SEQ ID NO: 151505 - DNA, 662 bp, Arabidopsis thaliana landsberg
ttgtgagcagcctgctttgatctaattcatgtctttttaggctctgtctctctgttaatgatgatcagagttgtttttgtttgctgcagcaaagatattgccagtggtaaagaatcagcacttgttgcttgtcactttacttatatgcaatgcagctgctatggaggtaattacaaaactgaatcttagcctctgtgattatttataggtttcaggaatggtgtttgatgatagtgatgatttatcttttcagacgcttcctatttttcttgatggccttgtgacggcatggggtgccattttgatttcagttacattgattcttctctttggtgaggtaagattagcatttcctgtaatattcaataagggaaacgactatgagcattttgagtcactttcctgtatatcagatgtgaatgcatgcaaatcaggatactaacattgatggttggctttactgcaactgcagattatacctcagtcgatttgttcacgttatggtttagcgattggtgcaacagtggctccgtttgtccgtgtcctagtctttatctgcttacctgttgcatggccaataagcaaggtaaaaacactttaccgatttccgtaggagacagagcccccaccaatcatgctcgttgttataataaatttttgct

SEQ ID NO: 151506 - DNA, 1387 bp, Arabidopsis thaliana landsberg
  unsure (1)..(1387): unsure at all n locations
caaaacttctctgaaaggtagataaatggtgtcgtcgtctctgagactcccttctctcacttcccttctatttcccgccaccactcgttatccagccactctccggcgaaccttatgtttacggaacagaccactttccggattcgcgacggcgccgagtggtactgcttcgcctgagactaagtcgtcggaggttgaccggcttaggtcagaccgagccgttacgcctcgctcacaggactttaatgcttggtatcttgatgttatagctagtgctgaactcgcggattatggtccggttcgtggtactatggtcattcgtccttatggttacgcgatctgggaagcgattcaggtgaaaaattgttgattcaaattgattttgaatgttgatgtttcttcttatcgcctcaattttgcgttgtgaattgttgatgatttgcaggattatttgaatgtgaagttcaaagagacgggtcatagcaacatgtacttcccacaggtactgtttcaagctgaaattcagaaaattagctttaagctggtttagtttgttaatagaagtagaatttagcatagagttagtataagactgatgaaacacttgtgttcttggttaattatagattaatcataatccaaatttgtttgttggtgaaattcatcttctttcttatgctcttatgttacattgggatttatagtgatggtttggtcttttgtgcagtttataccatactcgtttattgagaaagttgtcttacacgttgagggatttagtcctgaactagctcttgttactgttggaggaggaaaagaacttgaggagaaacttgtggtaggcatttttctggcgttattatgttttaccacaaagctagaattgtgaaaattctttgcctaaggttttgggtttgattgttgcacttgttgaggttgtggcaggttcggcctactagtgaaaccatagtgaatcatatgtttacccagtggattcacagctatcgtgatcttcctctcatgattaatcaggtctggacagacattcaattgtttatcattctttgnnnnnnnnnnnnnnnnnnnnnnnnnnnnnctggttatgtttttcttctttctgcgatttagtgggccaatgtcactagatgggaaatgcggacgaaaccatttattaggactcttgaatttctatggcaagagggtcatactgctcatgccactcctgaggaggcagaaaaggaggtttgttctctatagagctgtggtcaacttgtggagattttttttgtggtactctcctgtgacaaataattagccctgtatcgcaggcgaagcagatggtcgagntatcaccagatttgattttgagccaaatgcaattcctgtt

SEQ ID NO: 151507 - DNA, 733 bp, Arabidopsis thaliana landsberg
  unsure (1)..(733): unsure at all n locations
gtcgaaacgctggcgtttcaggaagaggaacgcttctgattcagactcggaatctgaagcagcaatgtcagatgattccggtgacagtttaccacctcctcctctgtcgaagaggatgaagacggaggagaagaagaagcaagatggtgatggagtggggaacaaatggagggagctgactcgggcaatcatgagattcggtgaagcttatgagcaaacagagaatgcgaaactgcaacaggtggttgagatggagaaagagaggatgaagttcttgaaggagcttgagttgcagagaatgcagttctttgtgaagactcaattggagatatcacaactgaagcagcaacatgggaggagaatgggaaacaccagtaatgatcatcatcacagccgnnnnnnnnnnnnnnnnnnnnntgtcaacaacaacaacgatttgggtaataactagaatttagtgatgcagtgtcgtaattgatatattttagatttgagtctttaattgttggaagagaaactgaatcttatctaggcttcatgagtgtattaatatttcgcatatctttgttaactttggtcatatggaacagatttaacttcactagattgcctgagatcattctgctgcagactcttgtgcacgtttttgaacttctcttaatctctgagttagattgtgtttcactagttaggttagaacatggcatagaacatttttgatacattcgtggct

SEQ ID NO: 151508 - DNA, 2753 bp, Arabidopsis thaliana landsberg
tgattgttccgatagcatatcaaaaaacagtcatcaaggcgttgatgattccctgaaccagtcaagatcttacgtatgcagtttctgcataaggggcttctcgaatgctcaagcactaggagggcatatgaacatccacagaagagacagggctaaactcagacaaaagcttatggaagataataaggatgatgtcgtcgccgagagtgatgcatccgaagttgtgtctctagaccttaatgaacaacaacaacaacaaggagaagctttgacatgtgatgatcacgatcaatatgttgataacgatataagtcctaaacagaaattagagttttgggttcaagaaagcaagcttgatactaatgatcatggaaaggtcacggaggctagcatagatggttcgagttcgagtcatcatcgtgatattgaagtattggatctcgagcttcggttaggccaaagcgtcgtaaagaagaagacaacatagtctctgaacgatgaatcacatctcgattgcattgtatcaatgggaaaatccctatgaaacaccaaactctctaatccgtctattacaaatggattcgtggctcaaattgtattgtaaggtatgcatttgtatcttattgctaccattatcgttgttgtaccttgtattgatatttgtttccttgcttgggttaatttcaccaacaacttttgtaaatgacatacacgtccaaacaaacaaacatatatatagaaattatatatatttggtgtttgctttatagttgtttagggaaaatgaataactaataagcttaacttagctcaacattattgatctggtcatggtagagactattcaaacttgttcactgagaaatattgttacagttgagttatatattggtagtcgtcctcagattttcgagtaagcatttgccaattatgactcttatattcgagattagcactcaacatttaattatatgttagcaaatagtataacattagctagcaaacttataaacgataaatttgaccaaaacaacataaaccaaggtcactttatctactttttgttctctgaattctgaaaacgaatttgaatatcgtattctaacagtgaatattgcatttatactaaaatttacgatcatagccataaataagtagttatgtatagtcaaactatatgtagttatgcagtactttaagacgtttgaaccgctaagattcccataatctgcatgataatataatgtatgtaaactgatacatgcacaattgcacatgataaatataactaaattgatacatgccgatttgcgcatgataattataattatatgctctataacatgttaggatttaaaatgaaaagagcaaatggttcaaggctgcaacttggtgacgccaccaatgatgaccttttacgtcttaaccacgttccggtttggttcgagaacttgtttgagatccgctttggatctaaattcagattggttttatttgagacgccgtggaaaattggataatttccaccagagatatatgatttaattaattggattttggattcgattatagtaaaccgataatagtgaggcagtaacgaacaaaacaacttcaaccggatcattgggttggtttagtttactaattgaaccggtttgataatgtttaaaaaataaacaagtgacaacgaagaccagcaggtccagcacacgatcctaaatcctgtgagcatcgtctccatcgctggtcttccattattgacgaatctctttgcctttttttcttccttcttaaacaaacccaattcgatttcaacgaacgcctcttctctctcactctctttcgatttgttctttgccggagctcgtagtgtaagcgtgatccgcggcggagagatggctcctaatgatcctaaaaaagccgttggtggcggcggaagtggtttcttcaactatcttgcttcgtcgatctccaatttgggatctgctatgaccaaatcagttaatgggtgaggtttttgagatcccttttcttaaacccgaatctgtcactcagctcgattcgtgattttgatttgaaaaatggaaacttttttgttttgggggcctcctatgttagatcttcttctaacggtaaatggtatttctcccaaggctggttctttggaaatggtattaaacctaagcctaactcacatttcacatagatggagaattttgatgcacttctaaaatgggctttgcttaaagttaagctcttttgaacgattcgttgtgttttgatttgcttctcagtttggttccctatgagggacttgaagttatcaatcctgaaggaagtacagatgatgctgaggaggaagcaagcagaggaagatggaagcaagaggtatatatacttcttcctttactattgttgttgttgacataactgttgatctaatcatctgagaaatatacacaattcttaggatcgagatggctattggaagatgatgcagaagtacataggatctgatgttacatcaatggtgacccttcctgtgattatttttgaaccaatgacaatgcttcagaaaatggcggaggtttgtgctcatgatcacatctgatgatttgttcctgtctgatatagttttgtaatccgatgatgccaatgatatgtgctctgtttctggtagttgatggaatactcgcatctgctagacatggcagacaaaaccgaggatccttatttgcgcatggtgtatgcat

SEQ ID NO: 151509 - DNA, 2121 bp, Arabidopsis thaliana landsberg; identical to SEQ ID NO: 69801

SEQ ID NO: 151510 - DNA, 500 bp, Arabidopsis thaliana landsberg
gctcagccgcctttttgtcggtcatgtattcatctgcaccgccgcttgatgcactgcatggaaaggacttgtgggcgttcgcacaggataatctgtgccacagccagctgatcaacgaggccatggcttgtgatgcaaggcgcgtggtgccacgtgtagctggagcttgtcaaggcttgtttgacggcgtggctacggttgttgacgtaggaggaggtaccggagagacgatgggaatacttgtaaaggagtttccttggatcaaaggatttaactttgatcttcctcatgttattgaagttgctgaagtcttggacggtgttgagaatgttgagggcgatatgtttgattctattccggcttgcgacgccattttcatcaaggttaaattcatttccatactcttattttcttttgattaataataatattcactatgattactttttttcttcttcttacaacttccatttagtgttcaaaacaaattttacataaat

SEQ ID NO: 151511 - DNA, 1030 bp, Arabidopsis thaliana landsberg; identical to SEQ ID NO: 26852

SEQ ID NO: 151512 - DNA, 1035 bp, Arabidopsis thaliana landsberg; identical to SEQ ID NO: 30631
  unsure (1)..(1035): unsure at all n locations

SEQ ID NO: 151513 - DNA, 1982 bp, Arabidopsis thaliana landsberg; identical to SEQ ID NO: 29625

SEQ ID NO: 151514 - DNA, 1180 bp, Arabidopsis thaliana landsberg
agaccgcttcttctggatgttcttgaaggattcttgaagttcgaggtatttcttctgctttctctctgtagatgtttacacatacagtatagcttttttttttttctctgtttacaagctttacaaccatatttgttacacattacaatagtccagctatggtacatgatttcagggcgttagtgtttacagttcctctattctctaagtgaagatgaccaatacctgttggttacatcgaagctttacaattaccaaattagttcaaatcttgttacattgtgctcacgacctcacattttttccaagtaaataaagtgtcttactcaagaaaataatttttcagagctttgaataagttcggtgaattccaagcctacaattcttgtcacacccagggattatgtttccatcctcttgtagtaaaaccattataatttgtctgctgtattcacctcatatttagtgatcaacatttttcttcagaacatgacgcaggtcatgggtggtagttcaaggagagagtcagaaaccgagtcgtcatcaagccttgacaccagaaatcctcctcgcagatcatctgcttctgatagcttacctcatcaacgacggtaaatccaactccatgttctaccaaatcaacgatctttaatcttccatgttgcttatgagtctgacatgcttaattaatgggcaggtcggtttctgcatcgggagccgctacctcagggtacagaaaagacgagagcaattggagatatgacactgaagatatgccggaagaagtcatgagagcctcaacagcacttgaaaatcttcagctagacaggaaaactcggaacctaacatcgtcttggaggtaacttggagcgtcatggctcttaccttacaagtcggatagaactgaaaaataatctaatccattggttttggttgtggttcaggaatgtgaaggatggaacaagtgaagaagaagaagggaaagattgataaggcttttcgttaaaatccagcttgtgaattagtatctctacatatatatgtgtgtttcttttttcatgtatggttttaaatgttgcaactttgtttcttaagtttttcgtttgtcgtgtttgagaaatccgattggaagtaaagattattgatataagatgtcaactacaattaagccgttaacaca

SEQ ID NO: 151515 - DNA, 495 bp, Arabidopsis thaliana landsberg
atggtcttgatttttcagatatggagccagaagaaaatggcggggaagaggagaggatccggaaggaaggagaaggtgtaactttgcttcctttcgggttaaccacttataagatgcaaggcaatgtttggctctcggaagacgatcaaggtcaagaccaagagcgagttctgtcgcttctaagtgttgcggattcttggctaaaacagctaagagtccaacaccatgacttcaactacttctcaagaatggctcaccgtggctgaaacaaatccgttgctatatactgatgagttcaaatgtagattttgtatctctttttgtttttcttgttggtctcaagtggcaaggagattacttttttccctggtcgcaatataccgtgtttgtccagtggttggagtagcagtggcagccgtgaagaggactgagcgtttccttaacacacaagtacagcggtttcaacgttttgggtgtagaatagctttaaagtag

SEQ ID NO: 151516 - DNA, 1062 bp, Arabidopsis thaliana landsberg
tcatctatgctattatcttgttacgtgtctagtgaagcttctaggtggatggtcttaacgtttcctgcaaggtcttactgtcaacgctgttttggtctttaattgtaaactttggtcgcatgtatagttcattattgtaaatttgttttttttccattgtttccgttggctcatgtgaattttgataacactctcactgtgcagatcggttaatgttcttatgacgaatccgatttgggtgattgttacgcgtatgcaggtataaatggcttcatatacactagtaccgtaaagtgcttcttacgctgtccagtcaatttcaattacattttctttggtccgtggtagttttagttttgcgtttgagcatgaatctatgaattttctctcctcacttttatttctcctcttgattttttgaatacttgtatgcagacccgcagaaaaatgacaaaagatcaaacagcggcccccgagtcaccttcttctaatgcagaagctctggttgctgttgagccgcgtccatatgggacctttaatacggtatgaggcagcttcccgtatttaaaaactagaagaagctggctagggtcatatactcatatcaattattatgagtcaaatcaaactctataaacctctcaattaagacagtttctgtgatatttgttgaacaatgtctcagattcgagaggtttacgatgaagctggaataactggcttctggaaaggtgtaattccaacattgatcatggtacgtgagcttatgattttgaagcttctcttgtattgtttgtctaggtgcattttattaataattagatgtgtgtgtgtgtttttaacccacaggtaagtaatccgtcaatgcaatttatgttgtacgagacaatgctaaccaagctgaagaaaaagcgtgccttgaagggtagcaacaacgttaccgctttggaggttcagactctagcattttgctttcgtattttttgaataagatgtttacttgctttccaacttcccatgattgtgctttctattttccacagacatttcttctcggagctg

SEQ ID NO: 151517 - DNA, 557 bp, Arabidopsis thaliana landsberg
atgaaggcagttaaaagatggagtatagggaacttagcggacattcccgtgtctttgcctggagctcgataccgtgctcctcctccaggaagaagacgagtatggatcatcatggtgctttcactgatcaccatgttctttattatggcttacatgtatcctcatcatagtaaacgtgcttgttatatgatttcatcaagaggatgcaaggctttagctgattggcttccaccttctctgagggaatattcagatgatgagattgcagctcgtgtagtcattagagaaatattgagttcacctcctgttattagaaagaactctaaaattgctttcatgtttttaactcctggtacattgccttttgagaggctttgggacagatttttcctggtaaccaactgctttattcttcagacattgtgtcagttttccttatagaacttgaaagtttgttcttgaacttcattcctcggctgatgttttcagaattttgtcactcctcaacagggccatgaagggaaattctctgtttatatacatgcatcaaaggaaag

SEQ ID NO: 151518 - DNA, 665 bp, Arabidopsis thaliana landsberg
atggatcttattgttgttcttggctatagaaaagcccattttgtgatgtagatggtggatttacaaatgcttgtgttatgctgcagaacattcatcaagggtatccgacagagaatttgttacgctttcttaaagccagggatgggaatgtccagaaagctcataaaatggtttaaatctgtttgctttcacctaatttagattgtctttgatgctttgtttcttgttttagctttgttttggggtttaaaactaatgactgcaagtgttacagttgctcgagtgtttggaatgtaggactcaaaacgagattgacaagatactaactgtgagttttctttcagcttttggtgtccagttctgcgattttctgtggccctttgatctcatttggttattgatttttgcagaaacccattgttcctgttgacctgtacagaggaatcagagacacacaacttgtcggtgtgtctggttactctaaagaggtactactattttgagtccctttctttctttaacttttttttttaattttaaaagcagatgtttgatccaactaaaaactttgttgaatcatttgacttttagggtctccctgtcattgccattggtgtggggcttagcacatatgataaagcctccgtaagcatctttattcatct

SEQ ID NO: 151519 - DNA, 721 bp, Arabidopsis thaliana landsberg
gtcttttttctattatgaatttggtaaagcttcatgtcaaaattgcaggtgttctcattgtctgttacagaaattggaactctagttagcctaggcccgagggaatcttgtgaattcttccatgatccattcaaggggaaaaggtaaaaagcatcattacactgataatattggttgtattcttattatattgctcctgatcggtttgtttgttgtatgtagtgatgagggaaaagtaaggaaagtgttgaaagttgagcctctcccagatggttctggtcatttcttcaacctaagtaagtaaatttaatcttcttcttgattcttgtcaaaaaggatagtctctaacgatctccgtgtatatattaggtgttcaaaacaagcttgtgaatgtggatgagagcatttacataccaattactcgagcagagtttgctgttcttatctctgcattcaatgtaagatcagaaaatatctcatctttaacattaccggcatgaactttcaaagaaacattactaaactcctttttttcttctatattgcaagtttgtcttgccttaccttataggctggcatgcatttgcaaactccatcaaaccagaagagacaagccgtgtgaacaacgcttcgcctaactacggaggagactatgaatggaatagataatgaataatagggccataacaggagcatatatcagagatcatccgggcctttg

SEQ ID NO: 151520 - DNA, 2342 bp, Arabidopsis thaliana landsberg
gtctttgatactaatatcaaacagtaggagaagtaaagtttggttttttattgtaggaatgagacttcttgaaatggtgatttaattagctctgtgcaatgtgaattttgaggagttctattagctacggttacgtctccttgtagtgtgttggttttttggagctttccacagtgtgagtacttgttcttaagagctgacgttggttggttcattttgcttttgatctttgtatagacgattgcgaaaacttcttccgagtcttatgacttggtgagaacagcaaggatgggaggatatggtttatttgtcttgggtccaacacttcactactggttcaatttcatgtcaagactctttcctaaacaagatttgatcacaacgtttaagaaaatggctatgggacagacgatctacgggcctattatgactgttgttttcttctcactgaatgcagccctacagggtaagctttcaactgtacctcaaaaatatcaactggttccttttcaaaaaaaaaaaaagttttttttctcaaactctagatcctgttgaccttcaatcttgtgcgttggtttagagtaatttgtttgatgttacattctttctctaaatggcgtctgaatagtgggtgattgttgttaaaactttgatcttgggctattcttgatgacatcaaagtctgattttcaattattttttcaggtgaaaacggttcagagatagttgctagattgaaaagggacctactccccacaatgcttaatggtgtcatgtattggcctttgtgtgattttattactttcaagttctgcccagtttatttacaggtatgtttgcttgattacttgcacttcgttttcagtttggcctcaccttgattaaccttttggttcaagagaggtcatcgattcgttgcattcgttttgtcttatatttagttttggtcatcaactgaagtctggtttctttttgtctgcagccacttgtgagcaactcgttttcgtatctatggacaatttacataacttatatggcaagccgtgcgacgccaaccaccattgaaatttgaaaaagctctctgggaaactctctcagtttaaagtgaggaaatgaagccaaaaataacttctactaaaagaaacagagcattcttcaacattctttgtttcctctctccagattttaggaggatataatgtaaagagttttggggaaaactgtgcatttggacatgtcttacactcttagatttaattcaattctatgtttagtattccatgtaatatttgagtaaaatggtggttctttaggttcggtcaactttttgagtctttatcaggcaaatgaaactgttgacacaagtcttttctaataatccttgttacatcagtacgtctaacaaagacggaaaatttacacgagaccaatggagtcaaaccaaatgctaaaatatggtttttgttctcaatcgtatactcgtccgagataggtagttcttacttaataagcaactgatgcagcgcatctttgctttgttcacgcctttgatgggcctcgtcgtgaccaagcctctttattgtttctcattcatgatttagtagtttatggactttattaaagatgtgggctttacgtgtttggcttttaacttctttttagaattagggtttttgtttctgattcttatttaagagagctttgtgtaaagcctagagaggaggactctcacctctaagagcttgtgttcaagccctgcaaggaggacttgcaaaaccacgtcgatatcgctaccgatctcgaccctatctatattgcttcttcgttaagtttcgacgttctaagcaagatccgttcgtgaatccgagttctcctagagatcttgtgttctcgtccgttatttagcttccgctctctatcagcaaccctaagagaaaaaaagtgatcaacaaccatggaatatggagaagaaccctcgattaaaagatttctaatgcttcctgatgatttggtatttaactgcttagctcgcgtctcaagattacattatccaactctctcattagtctccaaaaaatttcgctctcttcttgcttcaaaggagctttaccaaacccgaatcctcttaggccgaacggagagttgtctttacgtgtgcgtacgactctataccgattctgaacaactacattggttcattatctaccagggaccaaatagctccaaaaaagttttggtcctgatttcatctcccaattttacttccgcaacccaaccgggtttagtagtggttggtcatgagatatatgccattggcggtggatcagagaaaaaaaacgctt

SEQ ID NO: 151521 - DNA, 3893 bp, Arabidopsis thaliana landsberg
ctttctccttgaaatacttgtcaattcgagtattccaagctcttggggcttgttttaatccataaagcgccttttttagcctcaagactttgtcttcttcacctttgactatgtagccttgtggttgctcaatgtaaacttcttcttcaagatctccatttaagaaggccgacttgacatccatttgatgtatcttccacttgttttgagccgctagtgagatgattagtctaaccgtttctagacgagcaacgggagcaaatacctcgtcatagtcaattccggctctttgactataaccttttgcaaccaatcttgctttgtatctttccacttctcctttagagtttttctttgctttatacacccacttcacgccaattgccttgtgtccatttggaagtgaagttaacttccatgtgtcattcttttgtattgatttgatctcttcatccatggcatttctccaagtcttcttttcaatggcttcttggaaatccatgggttcgcactccgcaaataaacaaaataaggtaaggttttcttgattttcggttacttcatagagctcttgtatacttcttaaacgcggagtcctttcactcgaactttcttctatttgagaacttgttggtgaagttggtggtgtagtaggctcttcacttggtggctcctctcttgttggctccggctcatcttcttcaaaatgtggaaagaagttataatcttcttcatttgagttccaatcccattctccttcttcatcgaacactatatttcgactaataattgtcttcttcgtatcgggattatagagcttgtagcctttggagttgttatcataaccaatgaagatatacttctcacttttgtcatctagtttgctccgcttctcatccggtacatgagcatgagcaatacttcgaaagactcttaaatgagaaacaccgggctttcttccgctccaagcttcttgtggtgtttttccggagacactttttgttggagatcgatttaatagataaaccgcacacgcgaccgcttccgcccacaactcttttggtagtctcttacttttgagcatgctccttgccatctcaagaattgttctattctttctttccgctacaccattttgttgaggggatcttggcaccgttaattgtcttcgaatgccgttgtcttcacaatacttaagaaactccttggatgtaaattctcctccacggtcggatctcatggttttgatcacaagaccactctccttctcaacatgggctttaaactttttgaaaatttcgaacacctcggatttttctttcaaaaaatatacccatgtttttcttgaaaaatcatcaataaagagaaggaagtaattacttttaccaagtgatttcggcttgatcggaccacacacatcggtgtgtattagctccaacggtttttgtgctcttgaacttgactcctttggaaagctcattttgaattgctttccaagtagacatccttcacacacttgattctgatgaatcccctaatgattttggtaaaaatcattaagttaaggtggatacacatcttgtcatatgatcaaatggtttcgcgaaaaatcaataatcagacaacaagatgtgcgaactcgatattttacacgactctctttaccaattctgccccgaattacacttaaaacgactcaacagcttaacgttggcttgccacgcattacttgactgtaaaactctcactcttaccgaacttggccgtaacctgccaaccaaagcgagaacaaaacataacatcaaacgaatcgaccgattgttaggtaatcgtcacctccacaaagagcgactcgctgtataccgttggcatgctagctttatctgttcgggcaatacgatgcccattgtacttgttgactggtctgatattcgtgagcaaaaacgacttatggtattgcgagcttcagtcgcactacacggtcgttctgttactctttatgagaaagcgttcccgctttcagagcaatgttcaaagaaagctcatgaccaatttctagccgaccttgcgagcattctaccgagtaacaccacaccgctcattgtcagtgatgctggctttaaagtgccatggtataaatccgttgagaagctgggttggtactggttaagtcgagtaagaggaaaagtaccatatgcagacctaggagcggaaaactggaaacctatcagcaacttacatgatatgtcatctagtcactcaaagactttaggctataagaggctgactaaaagcaatccaatctcatgccaaattctattgtataaatctcgctctaaaggccgaaaaaatcagcgctcgacacggactcattgtcaccacccgtcacctaaaatctactcagcgtcggcaaaggagccatggattctagcaactaacttacctgttgaaattcgaacacccaaacaacttgttaatatctattcgaagcgaatgcagattgaagaaaccttccgagacttgaaaagtcctgcctacggactaggcctacgccatagccgaacgagcagctcagagcgttttgatatcatgctgctaatcgccctgatgcttcaactaacatgttggcttgcgggcgttcatgctcagaaacaaggttgggacaagcacttccaggctaacacagtcagaaatcgaaacgtactctcaacagttcgcttaggcatggaagttttgcggcattctggctacacaataacaagggaagacttactcgtggctgcaaccctactagctcaaaatttattcacacatggttacgctttggggaaattatgaggggatctctcagtgaagtgtatccgttggctgctcgtgggatttgtacttaccatctctataagaacattttggtaaaattcaaaagaaaagatttgttccctctggtcaaaaaagcggcaaggtgttataggctgaatgattttactaacgcgttcaacgagattgaagagcttgatcctctactacatgcatacctccaaagagcgggtgttgaaatgtgggcgcgtgctcatttccccggtgataaatacaatttaatgactacgaatatagcggaatcaatgaacagagcactgtcacaagccaaaaatcttcccatagttcgactgttagaagcgataagacagatgatgactaaatggtttgctgaatggagagatgatgcgagcaaacagcatactcagctcacacgtggtgttgagaaactcttacaggtaactcagctgtaactagtgcataactcagtcgtcgaataacgataaccccgtcataacgagaataactcagccataacgagaataactcagctataaagagaataactcagtcataacttttttgttttgtttcttgtctcttctctttaatagacccgcgtcaactcgtcaagactactggatgtacaaacgattgatgcttcccgcgttcaagtagcttatggagcatctttgcatgttgttaatgtggatgaaaaacaatgcacatgccgtcttttcgacaaagagaaattaccatgcatccatgcaatcgcagctgcagagcatttgggtgtgtctcgtatatccctgtgcagtccttattataagagcagtcatttggtcaatgcgtacgctggtgcaatcatgccttcagatacagaagtccctgttcctcaaattgtaattgaccaaccgtgtttgcctccgattgttgcgaaccagccaggcaggcccaagaaactaaggatgaaatcagcactagaagtcgccgttgagactaaacgccctaggaaggaacacgcatgttctcgatgtaaagaaacagggcacaatgttaaaacttgccgtgcatag

SEQ ID NO: 151522 - DNA, 800 bp, Arabidopsis thaliana landsberg
tttcacatatcgtgaaagtagcaaaactgtcggaagaatatctgttcttggctgcaagtgaggcttctctgaagctcgaggcgtatgtggagttagcggagatgacagtggctgtttcgcaaggtattttgagctactcagatgggatttacagagccattgatgtattcttggagagccatagatacttaactgaatcagagaagatggaagtttgtaaagttcttgaatgtggtaaactctctcaggaaggattcgaacgagccgcgaaaaaccagaagcttcctcttagaatcgttgttaatgttttgtgcgtttctcagcttcagatacgtgatacagtggctaaagagattaagggtatggaagagaaagtagatgaagaagaagaagaagaaattgaggtttcgagcgatgaagatgagatggagaagatgagtaataagttattaggacttgagattgagaatgatgaatgtgttgttcatcgtcggaagaatatgaagaagaagaagaagaagaagataagtgtgtgggggcaagtgaagaggaagtttggttgcttgaattcttcttcttcttcttattcagttgatgcttgcacctgtgatgtcaagaagaagaagaagaagattcatcatcactacggataacgaatacattcagttcatgttctgttcttgctctgtttctgacattggagaaacaatttttcaggttctgttttttttgtggttactgattgtcttataattcttcaaaaatccataagcataaaaaaattaaagctacaacaaaac

SEQ ID NO: 151523 - DNA, 1173 bp, Arabidopsis thaliana landsberg
atcgagtcttcgacgagtctctcttgctacggctaacagacctgtcgctgcttctcttttcggagaactacacaggcgagcttctctcatttcatcctcttgtctctggttgatactgagattataatgattatactattgaagcaaattgtttctccagtgaagtctttgttgagttataaacgaaagatgtgaagtgtgtcaattataatggcggattgtttttgtttctctgttatgttacttcgattagttgatcgtttttttttttttttcggatattacacaacaggtgtctcaaattggtgtcaatcttcaaaagcgtggtgtttggacaagtagtaataggtcctcctggatcgggcaagaccacttactgcaatggcatgtctcagtgtcagtgcatctctctaatgggcaggtttcatcttctttctctttttggatcaaagaaagaagcttacttacttttgtacctgtaattctgtttgtattgattgtttcgctgtccctcgcattgtaaagtttacaagttgcaaactttagtaaataatagtgttgaattccagaaatttgaattgtctgacttttgagcagagtcattgtgaaatgttgttgccttgtctttgtttttggtagagagatttgcagattcgtgagaacttctctgtaagtaaattctcttaacgttgagttactattttgttgttgttgcaggaaggttgctattgttaatctggatcctgcaaatgatgcattaccgtatccttttcaagccaaatacaacaaaattgttaaaaattgcaggtgtatgttgtttcttgacattgattttagttatgagtgtggtgtgaatatagaagaattgatcaagttagaagatgttatgtcggaacactcgcttggtcctaatggaggtgaattttgccatcttgattttcccttttcttcttacttttgattttaatctttggtcaaattaacaaagaaactttctaatgtgacaggtcttgtatattgtatggagtacttggagaaaaacattgactggctggaatctaaactaaagcctcttctgaagggttagcaacgatatgtcccttcttcttcttcttcttttcgtggtcataatatctctttcttaaagtaaaacgttttgaattgtatgcagat

SEQ ID NO: 151524 - DNA, 1725 bp, Arabidopsis thaliana landsberg
aagacttgtatgctaatgattctgattttacaaaatatttcagtcttgtgagaagtttgcctttggaaaatattatcgatatgatgggtatttgtctttgaaaatagactttgtgtgcctcactcttctttgcgagaattgtttctaagggaagctcatggaggtggcttaatgagacactttggaattgctaagacgtacaaggtaatgcaagaacacttcaattggccgcacatgaaaagagatgtcgagcggctatgtgaacgatgtgcgacttgtaagcaagctaaggctaaggttcaaccccaaggtttgtatacccctctacctattcctttgcatccttgaaatgatatttctatggactttgtggtaggattgcctaggactaggaatggtaaggattccatctttgtggttgttgatcgcttttctaaaatggcgcattttattccatgtcataaaatcgatgatgcatctcatgttgctagcttgttctttagagaagttgttcgtttgcatggcattcctaagaccatagtttctgatcgtgatactaagttccttagttatttttggaaaactttgtggtcgaagttaggaactaagttgcttttctctactacatgtcatccgcaaaccgatggtcaaactgaagttgtaaaacgaaccttgtctactttattgcgtgtgctcattaaaaagaaccttaagacttgggaagactgcttgccgcatgttgaatttgcttataatcattcaatgcattccgcgactaagttttctccttttgaaattgtttatgggttcaaacccacatctcctttggatctaatgcctttacctttgagtgaaagatcaagtcttgatggtaagaagaaagccgatttagtacaacaggttcacaaggaggctaaggaaaatcttgaggctcgaacgaagcaatacgagaagtatgcgaacaaaggtcgaaaagaagtcatcttcaacgaaggccatcaagtgtgggttcatcttaggaaggaacgttttccggaagagcgatcatccaagctaatgccaagaatcgatggaccattcaaagtgcacaaacggatcaacaacaacgcctacaaactcgatctccaaggtaagtataatgtaaatgatagttacaatgtttctgatcttcaaccttttttgtagataatttggatttgaggtcaaagaatgatgagaacatgaccaatgcaaccaagccacttgaaccacaagaagacaaggagcagcttgaagccgaggagcagcttgttccggagaaagcattcatcgttctggtgggtcctctaacaagatcaaaatccaagaagttcaaccaagctatcaatggactactcaaggatgtaaagaagaatcaagaagacgtggctcaatcctcattcatagtgatcacggctcaagaggctcggtaaagggttaagtgttgcttatgcactctttttcccttaaccatggtttttcccattgggttttcctggtaaggtttttaatgaggcagcatttcaaatactttacgagttatgatactataatggtcatcagggggagtgttatgaataaagatggatgcccattataaggcccatcatcttagcccatcttctagatgtttctagggttttaccctttccttgtactcctatataaagaaccctttatctcaatggaataacacactcatttcct

SEQ ID NO: 151525 - DNA, 1216 bp, Arabidopsis thaliana landsberg
aggttacaaataatttcagtgaggataacatattgggcagagggggtttcggtgtcgtgtatgtctgttttattacacgatggaacaaagactgctgttaagaggatggaatgtgcagcaatgggtaataaaggaatgagcgagtttcaggctgagatagcggtacttactaaggtcaggcatagacatttggttgctctattgggttactgtgtgaacgggaacgagaggttgcttgtctatgagtacatgccacagggaaatcttggacagcatttgtttgagtggagtgaactcggttactctcctttgacatggaaacagagagtgagcattgctttagacgtggcaagaggtgtggaatatctccatagcttggctcaacaaagcttcatccacagagatttaaagccctctaacatccttctaggagatgacatgagagccaaggttgctgattttggattggtcaagaacgcacctgatggtaaatactctgttgaaacaagattagcaggcacattcggttatctagcaccagaatacgccggtaagttcattcttctcatctctactaatgttaatttcacaatgtgcttagtctgtgttatcttactatgcaaagagtttatacattctgccattacggctgcattggttgcactggatattgatattataatatatggttgcagctactggaagagtaacgacgaaagtggatgtgtatgcatttggtgtggttctcatggaaatactaactggaagaaaagctttagatgattcattaccagacgagagatcacatctagtcacatggttcagaagaatcctaatcaacaaagaaaacatcccaaaggcactcgaccaaaccttagaagcagacgaggaaacaatggagagcatttacagagttgctgagctagctggacactgcacagcccgcgaacctcaacaaagacccgacatgggccacgcagtaaacgtgctaggtccacttgtagagaagtggaaaccgtcgtgccaagaagaagaagagagtttcggaatcgatgtgaacatgagtttacctcaagctctacaaagatggcaaaacgaaggaacatcgtcatcaacaatgttccatggagacttctcttattctcagacacagtctagtattcctcctaaagcctctggctttcctaatactttcgattcagctgatggtcggtga

SEQ ID NO: 151526 - DNA, 3838 bp, Arabidopsis thaliana landsberg
atggaccctatggctgttccctacgcagtttccaggaagctgattgacagtgccaggattaggcatgattatgctgtaatgtatgttgcattaaaaggagatgacaaggagttttacgttgatatcaaggttgaccagttgaagtccttctctatttgatggatttttaagtttaggcttttaacttttgtctatggttgtaggaatatgagatgctatttgagaaatttggagggtttgatgctctgtacctcaaaatgcttgcttgtggaatcccaacttctgttcatctgatgtggatacccatgtcagagctaagtcttcaacaacagtttctgttggttacaagggtggtttctcgagtctttaacgcattgaggaagactgcgaggtgtattaaatgcgaaggatacagtcttagagaaaataaggaatataaacgatgacattatgatggcggctgtgtttccagttatcgaatttatcattccttaccaggtataatgtacgctcgctggatattttcctcctgtttccctggggcttttttttttgttttatgacttttttctgatacagttaaggctgcgtctgggaatggcttggccagaagaaatagaacagactgttggctcaacatggtacttacaatggcagtctgaagcagaaatgaatttcaagtcccgcaatacagaagattttcagtggttcctctggtttctaattcgaagttctatatacgggtttgttttgtatcacgttttccgctttctaaaaagaaaggttcctagacttcttggctatggacccttccgccgagatcccaacgtacggaaattctggagagtggtatgtaacttttctttctccttatgcttctctttccaacactctcaatttgcgtgagcagtagtattgtagctagtacacttacagttgattactaaaatcagtttgatttgttttgcagaaatcatattttacttatagaaaaaggagaatcaaacaaaagagaaaggctggaatcgaccccataaaaactgcattcgacagaatgaagagagtgaaaaatccacctatcccattaaagaactttgctagtattgagtctatgagagaagaaatcaacgaggttgtggcatttttacagaatccaaaggcatttcaggagatgggagcccgcgcacctcgggtatgttgctttacggttgtgtgcttattttgtgggatagtgtccgattgtaagcatgcttattcacgctgcagggcgttcttattgtgggtgagagaggaacgggaaagacgtcactggcgctcgctatagcagccgaagcaagagtgcctgttgtcaatgttgaagctcaagagttggaagctgggctatgggttggtcaaagtgcagcgaatgtcagggaactctttcaaactgcaagagacttggttagcttctttgcctcagatttttttgttgattcattcattttcatagatattaaattttgagttctcatgatattcaggttccgaatcttatgtacatcagtttcaatgtcatcttatgttctgatgtttactgtgatgactaggcacctgtaatcatttttgtggaggattttgacctctttgctggtgtacgcgggaagtttgtacatacaaaacagcaagatcatgaatcgttcattaatcagcttcttgttgaacttgatgggtaaaagccaatttctatgttgattaaaaattaagaccagatttgaagcattcatagcggtttctcaaagtagcattctcctttttccggttgacttttctgatgtcattccactttataatttctacttatgcagctttgagaaacaggatggcgtagttttgatggcgacgacacgaaatcataagcaaattgatgaggcgctaagaaggccaggtcgtatggatagagtattccatcttcaaagtccaactgaaatggaaagggagaggattttacacaacgctgcagaagaaaccatggaccgagaactcgttgatctagtggattggcgtaaggtgatcttaagctttgcaaagttgtttatatgtgctagcgattatatatgtttttacctattgtctattttcttttgcacctccaaagttttgatggttcatttctattatggttgtgagtactatatcatgtcgtgtttcttctttcttgggtttatctctctgtagttctgttccactattttaataaccaggtcatggttacaggtttcagagaagtcagctttaattaagaccgatagaactgaaacttgttccaatggctctcgaaagtagtgccttcagaagcaaatttgtggacactgccgaacttctgagttacgttagctggtttgcggtaagaaatttgtcattttcgtcgcctaaggtcaaaccattttttgttcatttcttagtatggtttcatcaggtgatttctttctcttttctgacagacgtttagccatatagtgcccccatggctgcgaaaaactaaagttgcaaagaaaatgggcaaaatgcttgtgaatcatcttggacttaacttaaccaaagatgatttggagaatgtggttgatctgatggaaccatatggacaaataagtaatggaatagaacttttgaatcctactgttgattggacgagggagacaaagttcccacatgctgtctgggcggctggtcgtgctctcatcacacttctaataccaaactttgatgttgtggaaaatctttggcttgagcctagttcctgggaaggaattgggtgtacaaaaatcaccaaggtcacaagtggaggctccgcgattgggaacacggaatcaagatcatatcttgaaaagaagctcgttttctgctttggatctcacattgcatcccaaatgcttcttcctcccggagatgaaaattttctttcttcttcagaaataactaaagcgcaggaggtaaactctgtctactgttttgcggtatgctgtcatctacatacttaatgtttcgtttccccatgattattatttgtgtcttgcaacagattgcaacacgtatggtgcttcaatatggctggggacccgatgacagtcctgcagtatactatgctactaacgcggtaaccttcattgttttacttgaaattggttccattccaagactaaatgtctgataccactgaaccaacatgttgaatactgaacatgatgattcgatcttacatacagtttgcattcattctgatgtcgcatctggtcagttgattgaccttatacttttttttctttctgtttggtttatttgattcgaatgagcaggtttcagctttgagtatggggaacaatcacgaatatgaaatggcgggtaaagttgaaaaggtttgttttgctctctagtttccaatacgttcttaatatctgccagtgtcattggtgcctctctagtgttcgcaattttctatcttcagcttcgcttttcagttggttcaagcattgtccaaggctaaaatacataacctctctaatgtcatcttgttcctctacagtctctaatgtcatcttattcctttacagatttatgacttagcgtacgaaaaggcaaagggaatgctccttaaaaatcgacgtgtccttgagaaaatcacagaggagctactcgaatttgagattttaactcataaggtacgaagtttggatcaacttagagtgaaggatgttccaaacaacctctctgcatataaaatatcatcaactttgtttcctcgtaatggtttgcaggatataaaaaaaaattgttcatgagaatggtgggattcgggagaagg

SEQ ID NO: 151527 - DNA, 2349 bp, Arabidopsis thaliana landsberg
ctctctgaacgcactctacgacgagcctaacgtctttctccgatcgccggttagcagattcaagcgagatacgagatccgaagagcagatcttctgcttaatctgtaaacatggtaagtagtcgcatctcgcattctttatttttctccagatctcaattgaattttgcttgcgatgcgatcttggatattgcatttcatctgtagtagttttgcgtaattcaagtgagatcgtggaatccgaaatcatatggtttaacatcgccgtctttgtgttcgtgcgcctatagattgtagttttcgtgaaatcgagtatagtgtctggcatttggtttttgaggttgaatttggattttgatcatcgagttttgaaaagatctggtgttttctgggggttttaaagctctctatgagcaacatttgtttgcgttctgatatgtttaagtctggaactaactattgttcttcttctttatgttgcaacagcctctcagactagatatcaaggtattgcttatctttcaactttctgcttctgttattttattattatagctgtggtcataatttgcttttgttatgttttgatcagagaaagtttgctcaacgatcagagagagtcaaatctgttgatctgcatcctactgaaccatggtaatttccagctttcgctttgctttcatacttttgcaccgttatttctgctactaacgactgggatggtaaaaacattggtttgcaggattcttgcaagtttgtattctggaaccttgtgtatttggaactaccagacgcaggtgggtgaattattttgattttcgtcatctgtgtccttatgtatgttacagtgaacaatttgtgaaatggggttaccaaaaatgctactgaaagattaatatctttctgtaattatgaggttttgtagtgactttacagactcttaggctgtttttatgattcatggaactttttctaatctgaatcttgcttgataatcatcaggtgatggcaaaatcctttgaggtgactgaattaccaggtatacggcttttgttcttttgtgtcttttgttatattgttcaagtttttgttgtatgtactaagtactcgtgtctagtttgttacttattctgcttttttatattatgactttgcagttcggtcagccaagtttatagcacgaaagcaatgggttgtcgcaggagctgatgatatgtatatccgtgtatacaattacaacaccatggacaaggttaaagtgtttgaggctcattcagactacattaggtgtgtggctgttcatccaacccttccatatgtgctgtcatcttctgatgatatgctcataaagctttgggactgggaaaagggttgggcttgcactcagatattcgagggacactcacactatgtgatgcaagtcacatttaatccaaaagacaccaacacttttgccagtgcatcccttgatcgtaccataaaggtgctgaaatggtctaacattgaaacatcattatggtttagtctgcttagtccgctcattctacgtttacatgcatgttcatcttcagatttggaatcttggttccccagacccaaattttacattggatgcccatcagaaaggagtaaattgtgtagattatttcaccggtggtgataagccctatttaattaccggctctgatgatcacactgctaaggtatgcctcctgttcaatggtcttttagatgatacatttctactggacattatgtgctttcaggttatttactagttgaatttcgtgaatcaggtctgggactaccaaacaaaaagttgtgtacagaccctggaggggcacacacacaatgtatctgcagtatgtttccatccagagcttccaattataatcacaggttctgaagatggcaccgttcgcatttggcatgcaaccacatacaggtattataatattaaacagtttttttttgttggacatattatagtaaacgcttcttgtatgccttggctaaaccatctccactttggcttcatccttgtgcactttttcaccattaccaatttcttttattgtccttccatttgtaatcccaatttcctaatgtctgttttttcttgtaggctagagaacacattgaattatggccttgagagagtctgggcaattggttacattaaaagttcacgccggtgagttattagtttttggctcccttctcttattaataatttgatgcttggccgaactgttatccgggagttgatgttccctctcatttgatagtgaaataccattcattggaacttgacgatttgaaaaccttggattctagatttgtagaaatg

SEQ ID NO: 151528 - DNA, 1442 bp, Arabidopsis thaliana landsberg
gtatcacatcctgcaatgagtgtgtacaaaggatatggttggccaaaaggagcagaggacttgttatcttcgtttgggattaagaacgctcttttttctgtcaatgcaagtcatgtcaaagatgatgcttttgggaaactcattccttgtcctgttcaggttttgacacacaatcttgatctaactaacattcttgtatgagcgactgaataatagagagtgatcttagtgcagatatcatattttacaggaacatctactcagttgcttgtttaatctgtgacattattttagttgacgttcaaaattctgttctgacttttgatttttcatttcagcaaccgtcttcttcccaaggagagtctctcaacaaatcttccccgtctaagagattgcaagatatggtaacaactgtaaatcttttctgttatagagacataattcattgcctttgctgctggtgctatgtattagtaactgtatgttttgcaatctcttgaagataatgatgaaaattcttgtgcctctgatcttcagggaagtggtgaatctggttcattttcccctagtcctccgcagaagcagcttaagatcgaaaatgacatgcttcgtcggattccttccagtctcctaactcggacacctatacgtcaaaatgtaataacatccaacaaaattattcagtcagatgcttgttttcttcttctgcatctttataattcctttatctatcattcgccctcaggattcatgtaccattgagtttgatggtgcttctaaaggaaacccagggaaggctggtgcaggagctgttctccgtgcttcagataatagtgtcctcttctatttacgggaaggtgttggcaatgccacaaacaatgttgcagagtatcgagctctgcttcttggtttgaggtctgctcttgacaaagggtttaaaaatgtgcacgtcttaggcgactcaatgcttgtctgtatgcaggtccagatataaaattcactcttatcttttgtcttgtttgaattattcatgtttgtgccttaattgttttgataacttggattcgacaatggaacaggttcaaggtgcatggaaaaccaatcacccaaaaatggctgagctgtgcaaacaggctaaggagctcatgaacagttttaaaacattcgatatcaaacacattgccagggtaagccaccaaacccgcttggtctagctgctgatttgcttgtgatcaactctgtagtccgtctgcgcaacaatcattagatatccaatcatgtttggttttgagagttttagtgcgaattaggaccaagtatctttgagttcatttgatatgaagatgaccactaattgtaagctgtccggtttgcaggaaaaaaattcagaagctgataaacaagctaacagtgcgatttttctggcaggtgagttagatgaa

SEQ ID NO: 151529 - DNA, 522 bp, Arabidopsis thaliana landsberg
  unsure (1)..(522): unsure at all n locations
atgcatacattctcgtttaagaggagacccaaccattcacatttcccatcaactctcttcttcttctttctctctttaactctgttcatctctggtgtgagttctcgtgtactaagtcctgtccctctagataactcgagcttgatctctgatggtgtccatggcgcctcggattacaagtatctcactctcgaccctccaaagaacgtttccaaagcagcttgcatccatgtctacgggttccttccatgtgcagacaatattggaggttatgtcttccaagttttttcctttggctgtctcttgatcattggtgactatttcttgtctcaaggaagatccaaactctttgtaatcttcgaggtcgggttttatggtggtatcgtcttccctctccttaccatgttcccaagaattgcccttatgatatgtaaggatccttcccactaagatatcaaactttntaagtatattacggattacttcattcattaccaattggttttgagtttgacaaaaaag

SEQ ID NO: 151530 - DNA, 3491 bp, Arabidopsis thaliana landsberg
  unsure (1)..(3491): unsure at all n locations
atggggagttgtttttcttttcaaattgctgttggtgatcaaacgatgagtcgtatctttgattgcttaattggtaaaagttatattcgaaccctcgagaagaatctcagagccctgcagagggaaatggaagatctcagagcaactcaacatgaggtacagaacaaggtagcgagagaggaggcacgccatcaacaaaggcttgaagctgtccaggtatggcttgaccgtgtcaatagcattgatatagagtgcaaagatctgctaagtgttagtcccgttgagcttcaaaagttgtgtctctgcggtttatgttcaaaatatgtatgttcaagctacaaatatgggaaaaaggtattcttgttattggaagaggttaagatactaaaatcggagggaaattttgacgaggtttctcagccgcctccaagatctgaagttgaagagaggcctactcagcctacgataggtcaagaagacatgctcaaaaaggcatggaaccgccttatggaagatggagtcggaatcatgggtctgtacggtatgggtggtgtaggcaaaacaacccttttcaagaaaatccacaataagttcgctgaaataggtggtacgtttgacattgtgatctggatcgtggtgtctaaaggcgtaatgatttcaaagcttcaagaagatattgcagagaaattacacctttgttgtaggagtaggatctcgcaaacccttgggccagatacgtcatgggcttgagactggaagtagaaggcccattaagagaatatcagctcgaaaggggttcctggtttcaagatccttcgatcgaagtaacggtagagtcattaatgattgggaagagctgattacgggacgtgatgagtgggattgagaaaacggaaacagtaatgaaggcgagatacgcggccgtgaatcgagtggagcatttattattgtttagctcggttttactatatatgtacagcgtaaaacctcgaaaaggaggatagaagattttgaatacaaaaaacactgaaaaacaaatactttgattcgtttgaggcaagtttaccgaaactaaagatctcttttatttgaacttagacaaatattcgattgtgagattcaacatccacaatttggcgctagagagaggggatttctagttttaactcctttttgccttttttcgatcatcctgatggcttctgacggtgagcaagcaacgactctcgacgacatcaagcagttgttgaaggatctttccgacaaaaccgaccggcaacaacaagctaccgacgtgttgtctgaaaagttggtctctttccaggattcctgcaacacccagttcactaccctcacctcaagttacgccgagatcaggttggcccataatgcatatgcagatcgggtagatactcgcactgcaggtactctgcgcacgacaggagctcgcggccgactggatttccatgagctcggcagttcagagtccccagctaatgcaactcctggcggcgccctgccaactcatctccccctcggtatgcagagtgaagtgggggatgggtcccagcctcctgtccaaaaccaacccatcgcggcacccggaaatgtaacttctgattccctggtgagaactccagttcaacttccacgacccgtctcacagcaagcagttcctgttagtccggaaattcggagcctgcaagatcaaatcaaagccatgagctccaaagtccatcaagcaacaatttctgcccccgaagtagagcgcgtaattgacgaaaccaggaggactcctttcacctcccggattgccaagctaaggatccgggactcatcagattacaaactcccgaactacaacggaacaggagatcccaaggagcacctcacctcctttcaagtaaccgcgggacgggtctgcctcgagccacacgaagaagacgccgggctttgcaaactcttagccgaaaatctttctggaccagccctaacatggttcactcagctcagcgaaggatccattgatagtttcaagcatttatcaactgctttcatcaagcagtacggatatttcatcaagaatgatgtgaccgaggcacaactctggaacctctctcaataccttcgtggtagaaaaggatcgctcgcgcgattccccgaaaagttccccagccaaannnnnnnnnnnnnnnnnnnnnnnnnnnnnnnnnnntccaagtaataagtgggttcgtgatcccaatgcctattgcgagattcacaagatgaatggacacgccactaaagattgcaaaactctgcgtcgtctcttagcagctaaattcgcatccggtgagatcaccgtggtcgacatttctgagctggatctgacgcctaatcaaagtcaggaccaagaagtcggggagtcatcacctcccagcaagaaaccaaaaaccacttcggctccggattctccgagcatactaaaaaaacaagttcaagtcatcatgggcggatcaaaactcttccacgactcaatcagcccaatcaagcagcacgagcgcaaagtaactggtcaaatgaccaagagagcaaagctcgctcaagaagttttgcccgaggtcacattcactgagtccgaaactgaggggctcgacaaccacatgatgatgcccttgtaatcacaatcagaatcagaatccacgctttttcttcttctattgctttatctatcttcttgtagtgatggtgtgttgttcatttggattgtatgaaactgatttgcattctgatacttctggaatgtgttgtgttgttcacttgcattatgtttttttcattttccttttgtattccctaaaactttttgcatccttttcagactacatttttacacagtcaaaagtttatgcttttaggtaaaatcaatttgtaattggtttctctttcatcttgcagtgtctttcttcatctgttagtttctttttcatgttcccgttgttaatgaaagatttgattttggtaaatcatgaagatcttgtactcagattctctagtgtcaatccctcaaacctattctgaatatactaaaattgtgatataatcctaagatatgtctagtgtggtggcttaatttcttaattttgttgtgtgttatggtaaactcttaatctttttttgcatcttctcacttttgtcaagaagcatatctctcttcacgttctcctcgtatagcttccatctgtttatgatctttataactagttttaagacttagttcgttttatgcgctatcccttaagcatcaaatgaaggatttgaatattgcttcccctctcttgtctcggagaagtgatctacgaatttctttggacccagcacgaaaccatctaaaaccaaatctatgctctttttaaacattcaaaacgatgaaaaggttactaatagatgttgactctttactttaaatcgtagattgcatgatcaaagattcaccacaaccctctgta

SEQ ID NO: 151531 - DNA, 614 bp, Arabidopsis thaliana landsberg
aaattttaaagctagttttgggattattgaaaatgtgataggagtggaggatgtaactactgattgtaagactagtaaagttgtggtgaaaggagagaaggcagatccattaaaagtgttgcaaagattacagaggaagagccaccgtcaagtggagcttatctcgccgattccggagcctaaaccggtttctgatgaaccggagaaaaaggagaaggagaaacctaaacctgaggagaaaaaagaagaggtatgttgtataatatgtgtaagattttgggggcttgatttgtaatttatagaaaacttattggctttgtgtaattaacagtaagattttgtgggcactgagaaaaacaggtagtgacagtggtgctgagagttcacatgcattgtgaagcatgtgccatggagattcaaaagaggatcatgagaatgaaaggtttgtatcttttcattttattgttttacttttctcacttaaaatctaattttctgaattggggcacactattctattgattctgaattttagttactgaatttctgggacctcacttaaattgggaccatcaacgttggacttcttctctcggggtcataaaattgatttc

SEQ ID NO: 151532 - DNA, 267 bp, Arabidopsis thaliana landsberg
tatcacaagtggtgggatggccacctgtgaggaactacaggaagaacatgatgactcagcagaagaccagtagtggtgcggaggaggctggcagtgagaaggccgggaactttggtggaggagcagccggagccggcttggtgaaggtctccatggacggtgctccatatctgaggaaagttgacctcaagatgtacaaaagctaccaggatctttctgatgccttggccaaaatgttcagctcctttactctgggtacgtgttaga

SEQ ID NO: 151533 - DNA, 388 bp, Arabidopsis thaliana landsberg
cttcgaatttcagacacacaaacccactgaacattcaaatgtctcgttctcttgtcttcttcttcctctttcttgtcttggtcgtcccttgtctctcccatggaaccggaggagaccacgacgacgatgaggctccgcacgttaagagttccgatctcaaatccaaatccttaatctccgtcaagatcgcatgtcttgtcatcatctttgtcctcacgttcataagcggtgtatctccttatttcttgaaatggagccaagggtttttggttcttggtacacaattcgccggaggcgtgtttcttgcaaccgccttgatgcatttcttgtcggacgctgatgagacgtttcgtgatttgttgacggcggaaggagagtcggagccatc

SEQ ID NO: 151534 - DNA, 242 bp, Arabidopsis thaliana landsberg
ttcttcttcttctcctctgcttttggaatcgttatagtgataagaggagatggctgatataacagaatatctggagagatcgatgcagaattgttcacttattgatcggagaagtagtatgggagatggatttggtatgagcgatgaacatatcccgatctcagatagattcttggagctcagtactcacttatctgttccctctcatttggaacagtgtcttgatcttaaggtaaaagaaa

SEQ ID NO: 151535 - DNA, 647 bp, Arabidopsis thaliana landsberg
cgtatctcgcggggaagaagaagaaaagactgctttttctcaaaaccctaaaatctctctctccggatccatttctcgaacatggcgtctattgttcaaccatcgcctactttcccggcgctaaatctccggcgttcttctctgattcgtccgccttcttccgttcgatttcctcttgtaagtctcatctacttctctcactctctccgactattatctttctattggtatttgtactttatacggtcttcttcgctcgaatctgatgaatcttgttctcgattgtttctgttggttgtggaattgaaaagaagtgtaacgcggcggatccgtacaagttcgacggcggaaactctgccggtttccatctgcttactggcgacaccgttccggctagcttttcgaggacacgtttggaagattcgatttatcagaacaccacacgacttcgtatcttttccggcactgctaatcctatattggctcaggttcgttcttagctttgttagtcgttggagttctttggatttaattgcaagaattagtagcttggaactgaaattagtttaggaagaaactgatatagacttcggaattagtatcttaaaactggagatttgttcaattgcaaagattaggattaggaa

SEQ ID NO: 151536 - DNA, 494 bp, Arabidopsis thaliana landsberg
gtttttttctccgttgtcgttgaaacggctaacattgtgctcaggcagaacacaactgtagacaaggtattaacatgtctaactctttgcataaacctatgatagtgttgacaaatcctctacggctgtttcattggagtaacatgttaaattgaggcttttgttttgtgtattgcagccggaagatgcaattgtgatagagatgaaggagccagtgtctctctcatttgccctgaggtacatgaattccttcacaaaggcaactccattgtcagacacagtgacaatcagcttatcgtcggagttgccagtggttgtggagtataaggttgctgagatgggttacattcgttactacttggctcctaagattgaagaagaagaagacaccaatccctaagaccccttttatatccacaatttctcttcattctaaaatgttgaagatttattgacaatgttggtgttttttttggtgagattcctttgtatcc

SEQ ID NO: 151537 - DNA, 1084 bp, Arabidopsis thaliana landsberg
cttcttccattgttgtagctcctatcagctatcgaggtaactgcctaagcaaatctgtagctaaatcgccttccatatgaatatgcatcataattggatgcaaatgtgttggtattataaccaggctttacttctccggtcctttttggtgccaggtacgaacagcattctttgagggtaagaaccggatagattctttaattgcagatatcggaaactggggagccactgcagtgactattcatgggcggtcaagacagcaacgttatagcaagtctgcagattgggactatatataccagtgtaccaaaaacgcttctactaacctacaggttataggaaatggagatgtgtactcatatttagactggaacaaacacaagtctgactgtcctgagttgtctagctgcatgattgctcgtggagcactgatcaaggtgtgtgtatgaccaaaaaatatcagcattttcctagcaaatcattttatagcctcaatggacttttgacttgtgcagccttggatctttactgaaattaaagagcaacggcattgggacattacctctggagaaagacttaacatcatgaaggacttcgtacgttttggtcttcaacattggggatccgacacgaaaggtaaaaaacacgcagcatgaaattgaatttatgtttttttggtttgctctttctctcgtggctaaagttctgccttttcttaaccttttcaacaggagttgagacaactaggcatttcttgctggagtggctaagctacacatttaggtacatacctgtcggtttgcttgatgtgatcccgcagcaaatcaactggcgtccgccttcatactttggtcgtgatgatctcgagacactcatgatgtctgaatctgcgggtgactgggtgcgtttgttatatccttctccttcattccaccttactttggactatataagcttaagtttgctataatgttactatatgcaggtgcggatatcggaaatgctgcttggaaaggttccggagggcttcacatttgcccccaagcacaaatccaacgcatatgacagagctgaaaacggctga

SEQ ID NO: 151538 - DNA, 558 bp, Arabidopsis thaliana landsberg; identical to SEQ ID NO: 77587
  unsure (1)..(558): unsure at all n locations

SEQ ID NO: 151539 - DNA, 809 bp, Arabidopsis thaliana landsberg
tgcatttgggtaataacacacaggtaagttcaaatgaaaagttttattgtttcctattaggagacgtaagttgtttctagagatctcaagctgtttacttgtaaatcatctttaggctgcaatcatgaggattggtctaagagagatgaaagcactctcaaagcttttgtttccatctgttaaagatagtactttcttcgagagctgcggtgtagcagatgtcattacaacttgctgtaagaactgaatcaaaacccgagttattttcgcctttttgtccattgttacagcgattcccttttgactcttctttcactgactattacagtaggaggaagaaaccggagagttgcggaagcatttgcaaaaagcagaggaaaaaggtcttacctttgttaatcacatttcactgcaactgcttttagttatcattgttttgatggtttggtggtgtaaacgtcacaggtcttttgatgagcttgaagcagagatgctacaagggcaaaagctacaggtagactttgtgaagaacataatactctttagttttgtctggttaatcatcttcgattctgcttgtgatgattatagtcctaaattagaaagtggttctctttgtgtcttatgtctgactgttgcttattaaagggggtatcgacggcaaaagaggtctacgaggtgttgaaacattgtggatggttggagatgtttccgctcttttcaacggttcaccaaatctgcactggtcgtcttcaacctgaagccatcgtccaataccgcgagaacaaactataactttttattgatgg

SEQ ID NO: 151540 - DNA, 1071 bp, Arabidopsis thaliana landsberg
cattggcaagtcctctgtacgcaccggagtctgctttagattgtttgaatggggagctcttggaagagtttgtgagtgtaagaatgcatgagcttttgtgaaccatctacgtctcagcgatttcaaaattacaatcctatttatttgtctttttgactcaatttatctgggaatttcaggagaatttcactgctgcacggatggtattggcggcaagtggagtagaacatgaggaacttttaaaagttgctgagccattaacttctgaccttcctaatgtaccaccccaattggctccaaaatctcagtatgtcggtggagattttcgccaacatactggtggagaggtaggtattcatgacagatttcccatcactggacaagtgtgtctgagatgaaggtgtttctatgtcacatttcttattgagcttttgttgttccattttcaggctacacactttgcggttgctttcgaggtgcctggctggaataacgagaaagaagcagtcaccgccactgttctacaggtgtctaattgaattttactttttggttgctttaactttcacttgtttcgatcaaatttttttttctggcgaaaaagtaataaaatgtaatctaattgctattagatgcttatgggagcaggtggctcattctatgcgggaggtcctgaaaaaggaatgcactcgtggctttgtaagtcaaatcttgtatttctttttggcctattctagttttgtttattgaactagttcacggaccatactctcgcactgataagctatcagtaatagtgatacaagttcttatgtctggttacagatcgccgtgttctaaacgaatatcaggaggttcagtcatgcactgcattcactagcatctttaacgacaccgggttgtttggaatctatggttgctcggtaagttcagcaatcctgatgttgctttctatgtttttcctttcattacttatccacatttttctattgatgagatgtgtaacaacggaataccaatttttgtggctaagcccaagaaatattgactttgaggtatctgaaaaagtaa

SEQ ID NO: 151541 - DNA, 862 bp, Arabidopsis thaliana landsberg
ctgagagtttcaaagtgtgcttctgttgcagcagaagctttaaggagaaaacgaggcagacaccagtgagcatcaagagactattcgaagcttactcaagaaacggcaagatgtctttcgatgagcttctaagatttgtgagtgaagtacaaggagaacggcacgcaaggttggactacgtgcaagatatcttccacagcgttaaacaccacaacgtttatcatcaccatggacttgttcatctcaacgccttctatcgctacctcttcagcgataccaactctccttttcccatgtctggccaggtatctaagttaggaaactttttatggatttctttcacaaatggttttgttattgtgtatattatatgttcttggttgggttaaggtgcatcatgacatgaaggcgccgttatcgcattactttgtgtacacgggacataactcttacttgactgggaaccaagtgaacagcagaagcagcgtagaaccgatcgtgcaggctctcagaaaaggcgtaaaagtgatcgagctcgacttatggcctaatccttcagggaacgctgctgaagttcgtcatggcaggttggtcccactaacgaagtcttataatcaacaaacagactccaaaaaatgtcacacactatatgtgttttggttctctcatcaggacgcttacttcgcatgaagatttgcagaaatgtctaaccgccattaaggataacgcgtttcatgtgtctgactatccagtcatcatcactctcgaagatcatttgccacccaagcttcaagcgcaagttgctaaggtaagttggatttgcataaacagagaatatatttcgttctttgaaatacagtga

SEQ ID NO: 151542 - DNA, 1046 bp, Arabidopsis thaliana landsberg
agaaatttgaatgtatttcaggctaatatggcagacatttacgtcctgaatatagaagttttcctttgggatatcttatccaacatatagccaattgtatctctaaggtatatttcaatttcaatagagtttagaatatatataatggtagctttgttctgattttgttattatttgtaggtaaccattctcgaccattgggtttacaaggaagaagaaggcatgtacactttcaattcaaactctgaatttggtgcacagagatggctcactgctctccaaaagcattactgcaacacctgccccgtttctattccttcaattggtcacaatattcaaagtagtgaaaattctgttttttaaagtttttattgttctattcatcaattttagtttgattttacactaaccatgttttttaacgtttgtacttgtttagtattcgaccagatctgtcgcaagaacttgcttaacctatcttcatttatggttaacgtattttgttcgggagtttgcgggataactggacaaaggtggaatcggttgaatacagttggagtttcggctaataacattagaatgttcacgcaagaaagtcgaggcatgagtgggatcccttgcgttttggttagcgctaccggtttagctagaatgcacactaaaccagaagtaatgtttggattaatcaacggtgcagaaaaacaagaaatatggagttatttagagtctgctaaagatatgaaagaactaattcgtatcggaagacatcctaattcatggaatgaagtctctgttttcagcattgaggtacgtaaaaaaattcatttggtttagtaataccaatcgattattgagcatttgatttatgaatagagaacaattaaatatattgcagtggaagggttcgaaggagtggtatctgattcaagaaacataccacgatgaatcaggagcaatgataatccacacttgcgtaaaagcgccatattttgcagctgcaataaacggtggggatttgtctggcgtcgaactgttacccagtggat

SEQ ID NO: 151543 - DNA, 650 bp, Arabidopsis thaliana landsberg
agttagagatcatggaagattctcttgaagaagaacacgctcctctcaacaaacgatccagggttttttgttgtgagaacttttgtttagtactttgatcatttatagggtgggatttttattgtctgggtttgaaatgaattcagctatggagcaatggaacaagtgtctctaagtttagtctacttgaggagccaagtcctttgggtttgagtttaaaaaagagcccatcttttcaagaactgattgagatgaaactttctcaaagtggtgatgactcaaattcggttaagaaagaaagttttggttttggtggtgtcggaaccgttgagaagcttaaagcttctaactttcctgctactgttctcaggattggtcaatgggaggtgagtctttcaaagtttgttttttattggtgtgttttggaatctgattttgagttttgtttgtagtataagtcaaggtatgaaggtgatttggtggcgaaatgttactttgcaaaacataaacttgtgtgggaagtgttggaacaaggtcttaagagcaagattgagattcagtggtctgatattatggctttgaaggctaatttgccagaggatgatcctggaaccctgactattgtgcgtatgaaatgaattcttgcgatc

SEQ ID NO: 151544 - DNA, 1315 bp, Arabidopsis thaliana landsberg
gagtggttggatcacattgcaagatcgagggaactaagttgaggagtgcttgggggattgcaggactcatgcttggctttacgatcatcgtttttgtgtttgttttctctctgcgcagatgggttatgacaaagagagtgaagcaaagagatgatccagagcgaatggaggaaagcagattgaaagggtttgttgatcagaacctgtatttcttaagtggaagcagatcaagggagcctttaagcatcaatatagcaatgttcgagcagccgcttctgaaggtgcgtttaggagatattgtcgaggctacagatcatttctctaagaagaacattataggagacggtggttttgggacggtttacaaagcttgtttaccaggtgagaaaacagtagcggtgaagaagctaagtgaagccaaaacgcagggaaaccgagaattcatggcagagatggagactctagggaaagtgaagcatccgaatcttgtgtctttgcttggatattgctctttcagtgaagagaagcttctggtatatgagtatatggtaaatggaagcttagatcactggttaaggaaccaaactgggatgctagaggttctggactggtcaaaacgcctcaaaatcgcagttggagctgcaagaggtctagctttcctacatcacggtttcatccctcacattatacacagggacatcaaagcgagcaacattctgttagatggtgattttgaaccaaaggtggcggattttgggctagcaagactaattagtgcctgtgaatcccatgttagtacagtcatagcagggactttcgggtatatcccaccggagtatggtcagagtgcccgagccacaaccaaaggagatgtctatagctttggcgtgatactattggagcttgtcacagggaaagagccaaccggtccagactttaaggagagtgaaggagggaacttggttggttgggcgattcagaagatcaaccaagggaaagctgtggatgttattgatccactgctcgtatctgtggctttgaagaactctcagcttcgtctgcttcagatagctatgctttgtcttgctgaaacgccagctaagcgccctaacatgcttgatgtgttgaaggctcttaaggagatatgagccatataaccttaaatgttgtagttgtttcttgttgtttaagtaaactgctagtactaaccaaacaagggagtggtagggtttgtatttgtaatgttaatgtaagtgttcttcagtttcttctaaatgtcgaacaaagaaaaataggtattccaatttccaattaa

SEQ ID NO: 151545 - DNA, 973 bp, Arabidopsis thaliana landsberg
tcgttttgtaattctaatcaggcacatgttatcaattatcacattttcaataaaaactttacattgaaatatcagtcattcctacgtgagctcttcctctctcaatatactactacttacttgctttttgggtgcaacaaaaacaaaaaaagttagagatagagagagataaaaaagagttaataaaaagagctcacaacaagaacacaacaccacaaagccttcccctttatttttttcccgtgtaaccaaaaaaatcaaaaagattactctctctttaatatctgggtttatactacagtccttctttggtgcaaagatcccaaaaaatcaaaatcgaaagagagaataaatcaaaaggaagaatctttatctgctttctctcgatgaggatccggaaacgacaagtgcctcttcctttatcgtctctattaccagttcctctatcagatctctactttaaccgctcaccgacggccaccgcgagatactttcgcggtggttataaagacggcggtgatgattttggttctcttcagctttcgcttccgccgccgtcgcagatttctgatcggcttattcaaagagatttgataaagaagaaggaggaggtcaaggctttggtaagcttcttagtatacgtatagagacaccaatttaaaacatccaattcgtttttatcgatggattataacaaattggatttttgggtgcaagtttttgttgtgtcgtgtatgaagacagaagaccgtacttgactctcttttttctttattttttaaaactacttttttggttgggtgggaatatttggtttaattttacaccactgagaataactcttgtcatttgcagatcttattacaatggaatgttcaattgtttatcttacttcccttctgttttgtttttgctaaaaggatgatgataatggtgatgtagacgtcaagagtcgttctgatgcatcgggcag

SEQ ID NO: 151546 - DNA, 3193 bp, Arabidopsis thaliana landsberg
aaagcttgggaaaagccagttaagggacgctttcagttcaagattcagcgagagtgtcgatcgacacactcctggtgtcgatcgacacctgtttcggcccagagaagtccattacgctttcaagtttacagaagtggaaatttgccccaggagactttcctatttgcattattagtccttgggtgattattaggtcatttatatagttttagaggtcattatttagacctataaagttcttttcatccctattttcatagagacataagctattcatccctattttcagagatccatccagttttcaatacagttaagagatcatttcatactcttaccttatttgttgtgtttatgctttgttactcaattatgttgcttgtttcaatcattatgtcttagtagtttgcttgttaggtttaggatttctcattaggattcatatggtttagtagatcgccacctgttaggttatctgtagaattcttcatctttaattgttctcaatgctagttctagagtaattaactagaacttgaatccaaacaatagatatacctgccataggtatctgtagttggatctattatttgatgagcctggtttataggtgtgtaataggaatcggcctatctactaaggtgaacaattgaactcgttgagaatgcatgtttaagttatagatctctcgtcttctccggttattcttagctataggcatagggagtttcgcgaaacgccactggttattccataataagattttgagtttaagaatggttcgataacaacctaactatcattagatctactaaccaatagttttcctgagaataccctactcctagctctttattaaatcgtttacaacccaatcaatctgctgttttcttactttcattttcttactatgtcactcataccctgctagcttaatcttgacatttaactcaacgtttgaaagaagaactccgtgaattcgatcctaaaatactgcaattgatctcttatttgagagagtagttctaggtaatttgaaccatatcagcgagtcaccaatatcatggggaaagttaggaagtcctttgttagctttgcttcaaggcttctgagcatgccgcctcctacggctccggtttaaaaagaagttcgtcctctctacgacgttacgaccccaatgcttcctttcgtggtttctggcccttctgatgttgatcaggtctcccatgagatggtcgacctgtagtctcaagacaggatgtgtcttgaaggggccgacatcgtgccagctcaagagatcgccgagtgcgatcaaagtcagtccgttcaggtcgtcgagcctgaagttcaaaatattaccgacgaccgctccgtcgtcgtttatgccgcccctccagcaggcgaagaggtcaacacgggcctaactatccttgatcgagacaaggacgaaaccgttgctgagcccgggatttccaggaggtcccgtgaggagaaagggaaaggagtggctaaccaatccaagaagaggtcggcttctgaagccggtttagatgaggccgttgctccaaagacgtttcgcctgtcgcgaggcgagactcttaattctgaccagtttacgttcaagtattctggtgagaaattcctcgtgagagatcaagaggccgccagccacgtttggcgcaacttgatgctccccgggacgaaggatttccctaatcctgatgatctggttctaaaagagggatatcagaagtttgccagatcatcacttgaggtacgcgctagttacatgtcttcctgttgcctaatatctttgtattttggatttaaccatgattctttttccagaccgctgccctggccaacgatctgattgcgacatatgatcgcaagttgaagctgaagctcgccgacagagtggccttcgataacctgaagaagtgcgctgaccaggccaaagccatctatgccaaagacatgaaggaaatggcagcattgagagatgctgccgagattcataaggcagagctgagctcgttgaacgacgaggtgaagcggctcaacggtcgagaagctgatcttcagaaagagatcagcgatcttcaagtcgcgttggttgccgtgaaagagcatggggagagggagtgcaacaggctgcggaatgaccgagcttctaaagtcgcccgtaccacaaagaaagcccaagctcgtcttgatagagtgaaggcttatctcaaggagcaagaggacctcgtcgggccgaaggtggacgctgagaatcaagctaaaggagctgaggagatagtgggtattctgatgcagagaggcgcgaagattgcggcatccgagctcagcggccttaaggagttaaccagaagggcggccgacgaggtcaatgctttgaacgtcatcgagctcggggatgatgacctgaacatgtccccggatcagctcggtttttcgaggcaaacctctcaagttgctccggtggcggaccagcacggctcaaatgtcgaccttgttagcggaagtgatattcgacgcgtaagcgttgaagaggcgaaccagacgatctgaataggtcgtctttttaatttattttgacatcgatcgtggacccaattttcggggcgatctcaaaactcttatttaaccgtggacccactttcggggcggttttttaattttaacttctattttcgatggttttccatcttgcctgtttcggaggcagaatagtattttttccatgtatgagctttgtcattttttggaaaaggaaattgagggaagtcaacccgtaatcatggaaattcccattttcccagttttggagaaaatgcaaatattagtgtttctcgggaaaggaaaatgagaatttccagatcgcaattgagaaaatttccaattcgattcctgtatttgcctctataaatacttctttgttgatcaacaattgcttcaccggacttttcctcctatttgcaagatggagagtgttggatcgtcttcctttgttggcaaaaatgttccgactttcccgaatgctgaggcgattgaacgtgggatgccgttcttcaataaccttcgagttccctggactctcctattccaggcgagctcgatggaaagacgtgaagccgagggtttcttgtcgtgtgtccagtcaaggcataaggaataccgcgagatc

SEQ ID NO: 151547 - DNA, 841 bp, Arabidopsis thaliana landsberg
tatccgttgaagatatgcccactaacacgaaacatggactccctaccggtaaaataaaaggtaatttagaatgtcagagaatattaatccgtcacacatgcatgcattataatatcttggtttcccggatctttccaaaaaaaaccttgatggaatcaaatacacattaaatctttccaaacttgatggtggcccggatctttccaattatattcaaggtttaactatattgacatattcgttctaaaatgttatttcgaaacatatatatgtaggaaccaccatattggaagccatccagaaagcagtagatcccactactgaggttgtctacgtggaggaaccaaaccaagatacagcgaagcttcacgccgacgcagcatacacaattgtggtcgtcggagaaaccccttacgcagagacatttggggacagccccacgctgggtataaccaagccaggtccagacacgctcagccacacgtgtggtagtgggatgaagtgtctagtgatcctagtcactggacgtccgctcgtgatcgaaccttacattgatatgctcgatgctcttgcagtcgcatggcttcccggaaccgaaggacaaggagttgctgatgtcttgtttggtgatcatcccttcaccggcacgttgcctcgcacgtggatgaagcatgttacccagcttccgatgaacgttggcgacaagaactacgaccctctctaccccttcggatacggaatcaaaacctaaatcaataacgtacgataaccatgtatttatatgaacaatgtaactgtaacactttcccgatcaatattaattaaatttctgttacatata

SEQ ID NO: 151548 - DNA, 1083 bp, Arabidopsis thaliana landsberg; identical to SEQ ID NO: 13125

SEQ ID NO: 151549 - DNA, 971 bp, Arabidopsis thaliana landsberg
gtgcctcggctatcacctttggcacaggtgtgtgtgaatatcttagcatgatcaagttgatttctagtactgaggtgaaagaacatggcttctcttttctttttcaggttagggacgcagggaatctgttgaccagggcgggttttagtctttctggtgttgatgttgatgaatatgtagttaaatacaagagtggtaaactgttccacttttttcctacttcatcgtttgcaacaacgtgtatcttccaagaattatttctgatttgccttctcgtttatatctttctactcagcgatggatcttatagagcatcttcgtgcgatgggtgaaaccaatgctcttctcgagagaaacaagattttgaatcgtgaaactgctcttgccacggcagccatatatgactccatgtttgccacagaggacggcactatacccgctacttttcaggtctgtccataaaatttcagaactaactcaacagtgaaaaaaacccataacctagcttcattattcaagatgttttgctacaatccatgattaaaacaattttatgctaaatactacaagtgaatttgacaacatttgaggcctaaagtatatatcgtttggcattcctttgtaggtgatttacatgacaggatggagagaacattcgtctcacccgcaggccaaacgaagaggttcagccaccgtatccttcacggatctccagaagcaatttggtggtcaatcttgattggaaatgagacacattcaataaacagagactttacaaatgacacttgagagagaaatcagtgacttaagctataaggtacttggaggaactcttgtagatttgtcggagtctttcactgggcgaaagcatcgcaattatgacgcctgctttcgcccatgtatttcgtatcgaataatagctgatcagaaacatatttgtattttacaaaaatattacgaatacttaaaaa

SEQ ID NO: 151550 - DNA, 1563 bp, Arabidopsis thaliana landsberg
acatcatctcttctctctcgcagtttcagattccttctctccgttgattctcctcctcacatccctcttctacgcccttcttccaacaccctaatcccttcctcttccttctcccgccgtatttgggactcctgcagcggcggcggcggaggtggcggcggagatgattatgatcacatcagaagtgacgtcaattgtcctcgttgctctgctcagatgcacgtcatcttctcaaatcgtccattgtctctaacagcaagagaaccagggatctatcaagctgttaatttctgttctcaatgcaaaacagctttttactttagaccgttcaagctctctcctttacaagggagttttattgaactcgggaaagttaaaggaactgatgatgaccatgatgatgatgatgatgatcagaaatctttccctcggaattggaaaattcaaggtcttagaagcgatgaagatggtgaggatgctgatgaggaggaggatgaaactaatggtggtgataaagagaagcaatctgtgattaagcttccaacacctaaggagatttgtcaagggcttgatgagtttgtcattggtcaagagaaggctaagaaggtttggtttcggtccctagcttcttcttcttgttgttctaaattagattcttgcttacatatctttccttttgtgcaggtgctttctgtggctgtttataatcattacaaaagaatatatcatgcctctagaaaaaaagggtatgtcttcttccatgctcttatcattctgatactttatatgggttacaacaaagctcgattcttttgctctttttttaattccaggtctgcttcagaatcatataacattgatatggaggatgataatattgatcatgtggagttggataagagtaatgtgttgttgcttggtcctactggttcaggtgcatattgttgcttggcataatgtttttgagggtatttggagctactgtttagtatgataatgatcttggcctatatgtttcttgcttggttataagaacaggaaagactttactggcaaaaactttggcgcgtattgtcaatgtgccattcgctattgctgatgcgacttcactaactcaggcaagttgtttcacttatcattcttaaggtttgggtactcagaacattagtatgttgtacattagggaagcattaggcccactaagatgatgccttacaatccctcatttcgaaaaatattttgaatgatgaagtgatgatgtttttcttgctttttagaggaatcctaacacaagtcttgctcttagcataactaaactactactcttcttgtccaggcaggttatgttggtgaagatgtggaatcaatattgtacaaactatatgtggtatggcttactatcacctcatattatactcaggttttacatatttgtttataccttcatttggaatataatcttaacaactagaaatagtttttcgctgactacgtttgaaactacaaatgtactttgttcctgtctttataacagttcaaaaaaaaaaaattcgtctcaccact

SEQ ID NO: 151551 - DNA, 553 bp, Arabidopsis thaliana landsberg; identical to SEQ ID NO: 30043

SEQ ID NO: 151552 - DNA, 1048 bp, Arabidopsis thaliana landsberg
ggcggtcggagaaagaaagagactaaacaagagaagcagattcaatacgcgccaccgagaagctctctttgtgtgaatgagaaagtaagtaatctattgggagagtctaatcagataaaaccaggaagacactcagtagataatgagcattataggaaaccaaaagcattggtctctgacaagactcgccacgaaagcgaatataagaaagggctacgtcctgttctttggctatctccaaacttcccattacaaacagaggagttgcttcctttacttgacatacttgcaaacaaagttaaggcgattcgtcgtcttagagaacttcttaccacaaaacttcccactggaacatttccggtcaaggtatgttgtcgtttcatgttaagagctaatcttaatgttcttgaagatgagttttttttctttttcttatagagattgtttgtgaatgtaggttgctattccagtggtacctacaataaaagtgcttgttacattcacaaagtttgaagaaattgagcctgtagatgagtttaagacgcctctctcgagcccgacttcttctggctatgagagtccagctgctgcaacaactgacttcaccaactcatcatcgtcctcctcgtggtttcgtcggtctagatcaaacaaagatggtgggagtagtaagtcaaaaacattacaagacccatttgctatacccacaggttatacttgggtcagtcttgaatcaaagaaaaggaaaccaaaaaagggtggtaaaaaaacagaacaagttagctaaccacttcaactcttgagaacataatactaacctacacaggttttcttcatgagatttgtgaaaagacattgaagaaagggtgagaaaggcataaaaattctgatacaactttatttgattattttgtaacatagctcagacatttgcaatgaattgttttcctttccattgtgatgtaaaaacatttgttctgcgtcttttgtatcttttttttattcttcttattcaatatgcttggaatatgcaacacctgagtcgata

SEQ ID NO: 151553 - DNA, 1429 bp, Arabidopsis thaliana landsberg
caaattaatccagacacaacactctcacaatatgatcccttatccaaccgtagaagatgcgtccgtggcgttaggacgaaaccttacttggttcgagacggtttggttcgattactcagccaccaaatccaatttccatgtatattgccacaccattctggttctcttccttgtcttttcactagctccttttcctcttgtgattgtcgaatggaccggttggttcgatcagtttaagattcagaagaaggttaagtattcgttgtctgatatgttccaatgttataaagaagtcatgaagttgttccttctcgtcgtcggcacattgcaaatcgtttcttatccttccatccaggttactattcatttattctttaaaacaaacaaccaaatattttatgatatatgtatattcctttttttaagtgttgtttttgcaacgttttttgtgtgagtgggttgttatacaattttgtgcttttttttttggttatttagagaaaaatcccattaaaatattaaattgaaacgttatattattgcatatatgtatatacccttcttacaacacttttttttgttaatttgtgatgttcttgagatatactatatgtgttaattgacagatggttgggattcgaagtggtttgccattaccatcgttaatggagatagtagcacaattagtggtttacttcttgatagaagattacactaactactggatccatagatggatgcattgcaaatggggttacgagaagattcatcgaatccatcatgagtacacatcacctatcggatacgcatcgccgtatgcgcattgggccgagattttgattcttgggattccgacgtttcttggaccggcaattgctcctggccatataatgccgtttccgttatggatatctttacgacaattcgaggcgattgagacccacagcgggtaaaactacactaaacaaacgtaaaatcattatcctgtttagcgtttgtaaaagaaagattgagtgtttagtgatatcattcgaaaattcaaacgctaaacacaaaaaaagaatttagtaatatgcaaacatagacataaatagttacatattgtttgtagatgcacttgtttacttattttgtttgcagatatgattttccatggagtgtgacaaaattaattccattttacggtggacctgagtatcatgactaccatcactacgttggaggacaaagccagagcaactttgcttcggttttcacttactgcgattacatttatggaactgataaagtgagttttgatcaaacttcaatcatattactttgtccgttagcgttttaaactaattacgtattatcccatacccaccagtgttgacgttgttgttataatgttaactgtcattagggctatcgaatccataagaagctt

SEQ ID NO: 151554 - DNA, 993 bp, Arabidopsis thaliana landsberg
  unsure (1)..(993): unsure at all n locations
caacacaaacacagcggttccatcaactacctttatggattctttggtttctttggaatagcagaaatatcttggattttgagcgacgacatgttccatgggagactacgttacagcttgctcaaatggatcttcaggagtggaatgaagctgtcacaccatcacacatcaacagccatggtacaacaattcgaagtcatatccctaattggaggcgtccaacaaatgggtgggtcaagtgcaatgtagatggctcatttattaatggaaacataccaggcaaaggaggatggattgttcgggaccacaacgggagatatgagtttgcgggacaggccattggtaactgcatagataatgctctagagtgtgaannnnnnnnnnnnnnnnnnnnnnnncaacattgttggagtaaaggatatcgacgcatctgttttgaaggtgacaacaaggagatgtttgatcttataaacggattaaagatgcattttggagcctttaactggattcgagacatactatggtgggcatcgaagtttgagcagacacaattttaatggaccaacaggcagaacaacaaaccagctgacatcctcgcaagaacaccactacaacatcaatttttatttgctaatcatttctgggttccccgtgtaataagttttgctttacattgtgattatacttcttcaatataattcaatatgatgatgacaaaaaaaaaaaaaaatctctttcttctataatgactatacaaatcatattaatctatacataatcaatttcggagaaagaaaaagtaagttataaaaagaacttttttcacggcggcgccggtggaggtaaatcactgcacgttgtagacacaattacttttccggcacgttcaccggactctataagcatcaacactacttctctcatcgtcggtcgatcagacggcgaagatttcgtacagagtacggcaattttcgtcactgtgatcatatgatt

SEQ ID NO: 151555 - DNA, 446 bp, Arabidopsis thaliana landsberg
gatccattgccaaagacaagtgaagctccaagtgtcttggagtatacctttggactgtgagcttgaagaaagtaagcgaagctgcgtatcttactagaggatggccataattcgcagaggaacatgagctgaagagcggagagttcatgacatttgtgtatgatggtcatcgtacctttgaagtgagtgtctttgatcgttggggtagcaaagaggtcagagctgaaatacaagccatcccactttctgattctgattctgattctgttgtggaagacgaaaaagactcaactgatgttgttgaagatgatgatgatgaagatgaagatgaagatgaagatgatgatggtagctttgatgaaaatgaagaaatcagccagagtctttatccgattgtcgaagagactgcaaccgatgctgcaggtttgatagtcttttttcaaaag

SEQ ID NO: 151556 - DNA, 643 bp, Arabidopsis thaliana landsberg
gtgtccctgttttgacttttgtgtttctctacgcatgttttctcatcttgctatatattaaacgatttgtagtatgattctgttgatccaagtagcttgtgagtgactgttcttcttttcaccgagattccatatttgtattgtgcaggtgcagaaaaaagccggtactccagggaggtcgatagatgtctttgctgtgcagtgtgagaagtgcatgaagtggaggaagattgatactcaagatgagtatgaagatatcagaagtagagtacaagaggacccgtttttttgcaagacgaaagaaggtgtgtcctgtgaagatgttggagatctaaactatgattcctccagaacatgggtcatcgacaagcctggcttgccgaggacaccaagagggttcaaaaggagcttaattctgagaaaggattactcgaaaatggatgcgtactacataactcctactgggaagaagctcaagtctcgtaatgaaatcgcagccttcatcgatgccaatcaggattacaagtatgcactgcttggagatttcaatttcacagtcccaaaggtgatggaagagacggttcctagtgggatattatctgacaggacccccaagccatcaaggaaagttacaattgattga

SEQ ID NO: 151557 - DNA, 815 bp, Arabidopsis thaliana landsberg; identical to SEQ ID NO: 4497

SEQ ID NO: 151558 - DNA, 551 bp, Arabidopsis thaliana landsberg
atttcagctgaactaatgagattcagtgattacattccaccgttcacgggagcatcaccggaacaagctcacatcggaataaactacgcttctggtggaggcggaatacgtgaagaaactagccaacatttggtaagaatgagagagattatttaaagatattttcatttttgtttacagcaacgcctactttgaacattccatcggctatctaattctttgattgcaaatggaaaaccttagacactaaatagacaatatttataataatcgataagttttctggatgttttatggattaaagtgtattctttgtgacaatatagggtgaaagaatcagttttgaaaagcaaataactaatcaccggaagatgattatgacggcgggagttccagaggagaagcttaagaagtgtctatatacaattaatattggaagcaatgattatctcaacaactatttcatgccggctccctacactaccaatgaaaatttcagtttcgatgaatatgctgattttctcattcaaagttatcgctcttatttgaag

SEQ ID NO: 151559 - DNA, 1009 bp, Arabidopsis thaliana landsberg
gctcctctgtgcaatgtgaaggagatgaaggttatgaaaggaggacaaccctttcagctaaactttctccccgaggtaattgtgtcttttacaactcagaagtttatgtttgagagtagtaggcctacatctagatgtggtccagtattactccaaatactgataatgaaccttaatgtgacatcaaagaactaccttgcatgattagttatcttttatatgtactatttatcccaagttaattgcatatcgatgttgatcttgttcttttctcagattaattacatgcccctctcggttttaatcaccacattcacaaaggagaaagtaaagagacctcttgaaggctttggggtactcattccatctaaggagcaaaagcatggtttcaaaactctaggtaacttgttggtgtggccttaactcaaacaaatagccctatacttttccttctatatttatcaatacttcatactcctctatacgcaggtacacttttttcatcaatgatgtttccagatcgttcccctagtgacgttcatctatatacaacttttattggtgggagtcggaaccaggaactagccaaagcttccacgtaagtgaattttgattgcttacgaaaagctacaaagaatcgaggcatttataccatttttctagtttcctactttacccaattctgactacttttttttctttgtggtttaatcttcgtagtgacgaattaaaacaagttgtgacttctgaccttcagcgactgttgggggttgaaggtgaacccgtgtctgtcaagtatgtgaactttggagatttttttgatttgatcgttctagtgtgcgaaagagaagattaccacccttatagataaacagtgtatgttatctgcagccattactattggaggaaagcatttccgttggatgacagcagctatgactcagtcatggaagcaattgacaagatggagaatgatctacctgggttcttctatgcaggtaacttcaat

SEQ ID NO: 151560 - DNA, 1697 bp, Arabidopsis thaliana landsberg; identical to SEQ ID NO: 5848

SEQ ID NO: 151561 - DNA, 1078 bp, Arabidopsis thaliana landsberg
accagtcctgtgtctgagtcttcacaagttcatggctttgatagagatattgcctgattacgcacgtgtcatggatgatgggctatacagagccattgatatgtttctaaaggtaaagttgttcttttatcccttaatatggaggctgtgtctctgtttttgcaacattttgtattgatagagtgtcaatgttctttgtgtctctggttaggggcatccgtcgctgaacgaacaagaatgtaagagtctctgcaaattcatagacactcagaaactttcacaagaagcatgcaaccatgtggctcagaacgatcggctgccgatgcagatggtggtccgagtcctctactcagaacagctgcgtatgaagaatgtaatgtccggagagtcaggggaagggctattgctgtcttctcagaaacatagtagcgagaacccgagccgagctgtgtctccgagagacacttatgcctcactgaggagggagaatagagagctgaagctggagatttcaagggtgagagtgaggctgactgagttggagaaggagcagattttgatgaaacaggggatgatggagaagtcaggtcatggtggaacattgctgacctcactttccaaagggattgggaggatttcgatatttggtggaggacctacagaagggaagctgcggaatgctaaccgcaaatccaagtcaaggttggagagaaaaaccgttaggagccgaccagagtctatgttttaggtagcttagaacatgtaaatatcatatgcattctcaacaaaatggggtggttcttgagtattctatatcttatgaaaaatcttgcaagtattgcattgcgattactcaaaaatattttagaggaaattgagttaaaaagggcataactcaatagcttctctgcagtttttatgtatcatttttttcagcaattattctctcttgacaatattgtaaatttgaaaaggatgcgacaaacaaaaaacagttgatctctactaaaaaagtaacaatccttgagagtgtgacaaggccaaaatgtgtcacttattgagcccttggcaaaatatt

SEQ ID NO: 151562 - DNA, 1184 bp, Arabidopsis thaliana landsberg
tcggaaagcttaatttcatgttgattgttgtttttgcagctatggagttggctctttcattggagaaactagtcaatgaaaagctcctaaacctgcacagtgtaagaccatctctctcattaggatccagttcttgtttatggtattcaagtcataatctagtttcttaatacaacttggtatttgaataatgtggtcaacaggtggcttccaagaacgatgatgtccagttggcagattttattgagagtgtgtttctgaacgaacaggtaaaacaaaagacctacacgttctatgttagtggcaaagatatggggttcttgatctgtcaaaaatggaatctaatgaagtttaattaacatcactttgcaggtggaagccattaagaaaatctcagaatatgtttctcaacttaggagacttggcaaaggacatggtaaccatttgtttattcaatttaaaactaataaaacacacctcaattcgtccacttcgtgtcttacactttgtttatttgtaatcaggaacatggcatttcgatcaggagcttcttggtgctgctgcttaatctgagttttagctgtaatctcgcagtttggttaacttttgagttattttgagtatgagatgtaacttttaaggtagatttgatcaatatcgattctgttgtgagagaaaacaagctattacgctccttggggttaactttctttgtgttttcagtattatggttttgtccacttcgtaatatcactttcctttagaacatttcaaatcagcagttgttttgaggtgtaatgtaatggtcactgatattttctattacccctgcatgaaagtagtatgttttatcaacaaagtggtaccaaaacattctctatccaagaaaactacaaactgagtgagtgtccatactttcaaagttttgagtcaatttatcattttctcatataccaatcaaaatctcacaattacaactactctttttttcttctttatacgatgatctttttttgacacaatatgatgatcatgaaagacaattgattatttattcacatgtatcaaatattctaaatactttgattttatattgtgcaaaaaacaaatatcaaaattaaaattttagtaaaattgtataaattgagaggtagaaaaaaaaagttatttgatcaacatggcat

SEQ ID NO: 151563 - DNA, 2062 bp, Arabidopsis thaliana landsberg
atttgagttggacatgttgctggaatctgtgagctctgcggccagaagtgcagaaagtttgttgaacatcgtcacagagaagaaaataagtttttctggctccttcaggatcgaagaccattttacgggtctgtatgcttttttgggaccattttacagttcgtagttatatcttctctcttcccctatttaggtgtcctcatatgtttggttattaactttaccattttcttattgacatatttacagccctaaatttaaggtgtattgagcgactttatggcgaccatggtcttgacgtgatagacatattaaataagaatccagccactgcacttcctgtaatcctaactcgtttaaagcagaaacaaggtgaatggaagaaatgccgtgacgattttgataaggtctgggcgaacgtatatgcaaaaaaccattacaagtcacttgatcaccgcagcttctacttcaagcaacaagattcaaagaacttgagtgcaaaatgtaagtagacttatagaagtcgtaagaagatttatattcaagtagttcctttatcctgttttatcgctcacatacatccggcagtgctatttttcctttcacttattcctttctcattctgtttttttattgcttcgtgaaccagcattgttggctgaaattaaggagctgaaagagaagtctcagaatgatgatgatgttctgttgtctatttctgctggttacagacaacctataaatcctaatcttgaatatgagtatttgaacagagctattcatgaagacatgttcaaagtagtccagttttcatgtgaggagttatgttctacaaaagaacagctcagtaaagttctgaggctttgggaaaatttcctggaggcagtgctgggtgttcctcccagggccaagggcacagatcttgttgaagatgttgtaataaaccccaagactctcgatgtgaatcacagcacatctcctaacggggaggctgctgtgagttctggaggagacacagcaaggttggcttctaggaaacttaaatctgctgccaatggagatgagaattcttcatctgggacattcaaacatgggataggtttgttaaataaagattcgacagggaaagaaaatcttgaagatgttgaaatagctaacagagatggtgttgcctgctctgctgtgaaaccccagaaagaacaagagactggaaatgaagccgagaaaaggtttggaaaacctatcccaatggatattagcgaaagagcagccatctcgagtatgtcaatcccaagtggggcagaaaacaatcattgtgtagtaggcaaggaagttttgccaggtgccttccagatttaagctatttaattttatttgtgctgcttgattatttgtgttgatatttgttactttacaattaaggtgcacatgagattcaagccaaaccaagcgacaccctcactgatattcatcatgatgtagatagcattgaaactgttcattcgactcaggtactagtactacaatcaattgctcgttgtaccatatttacaccattcagttgctcgttgtaccatatttatatattcgcctaaacccactattacctggaggtttccatagcttagggatgtaaaaatttacagtactacctatgggacccaggggtgtaaaaatttaaaatgtgtcttatattataattatgctttccggacccttctgactctgtcatattactagggaggtgatgttggcaattcgatagttttggcaaatggattaaggtcagattcttctaaaggtactaggaattctgatgatcccgaaggtccctccagaaatgagaaagaggaaggtgaactgtcacctaatggtgattttgaagacaactttggtgtttacaaagatcatggggtgaagtccacatccaaaccagagaattcagcagaggctgaagtagaggcagatgctgaagtagagaatgaggactatgctgacgatgttgatagtgaaaatgcttccgaggcatctggaactgaatctggtggcgacgtatgttctc

SEQ ID NO: 151564 - DNA, 1246 bp, Arabidopsis thaliana landsberg
gtttatggttctccttctccaccatggtttttgcccaccgtaagttcttacaccaatcgagaatctaataatgataaatatttacgttttgtagcttttatctccaaacataattacattgtcaatattttttagatatctcaacttattttatgattgtaatgataaagtgaaaacttgtgcatgtgtatataggtgagaatgtagtgagcaatttagcaaggtttgtggtggttgtctggtgttttgtagtgcttgttctcactcagagctacacagcgagtctcacctctttcctcacggtacaaagtttgcaaccgacggtcacaaatgtaaacgatctcatcaaaaatagggattgtgtagggtaccaaggtggtgctttcgttaaagatattctattagggctaggatttcatgaagatcagctaaagccttttgattctgccaaagatgccgacgaccttttgtccaaggggaaatcaaaaggtatcgcagcagctttcgacgaagttgcttaccttaaggctatcctttctcaatcctgctctaaatatgtcatggttgaacctacatttaagactggtggttttggctttgtaagtaccttctgtttcctttctatgtatttttacaaaataaggggacaaataacacatgttttgaatccttgatcaatgtgtaggcattcccgaagaattcacctttgacaggagatgtctcaaaggctatcttaaatgtgactcaaggagatgaaatgcaacacatcgagaacaaatggttcatgaaacaaaatgattgtcctgatccaaagaccgctctttcgtcgaaccgtctaagccttcgtagcttttggggtctgtttctaatagcaggcattgcttcattcttggcactactcatcttcgtgtttcttttcttgtacgaaaataggcatacactatgtgatgattccgaagattcgatatggcgtaagctaacgtctttattcagaaacttcgatgagaaagacataaagtcgcatactttcaagagcagcgctgttcatcatgtgagttcacctatgactcagtacattccgagcccttcaactttgcaaatcgcaccacggccacatagcccatcacaagacagggcgtttgaactaagaagagtgtcatttaccccgaatgaagaacggttaactacgcaaactatacattttgaagatgaagaatctgatattgaatgtgttgttgaacaatag

SEQ ID NO: 151565 - DNA, 2166 bp, Arabidopsis thaliana landsberg
atgtattttgcaagtaagtacctttccttagtttgttctttcttcgtattctcagttcatcaatctttaagagtaatgaacacatggtcttctcttgatttcagtgcgtgtatagtgaaatctatgaaaatggatgctacttgtcctgtttgtaaaatcccttaccatcgtagaggtactttctcttgctctttattgatctcagagttcagctttatctgttgttaaacctaagtttgcagtttgatgattatgttaatatgttagagattcgaggtgctccacatatggatagcttggtgagcatttacaagaacatggaagatgcttctgggattaaattattcgttagccagaataatccgtcaccatcaggtacttaaaattaggaccaatgctttaacattttggttggcttgaacgaaacaaaggcagtgatagactcgttaagttcattttaagcgtagtaactggatttaatcatttcacttgaaattgaactgtctctgaattcaattgaatggtctaaaaagtggaatttggtagtaagaaaacactaaaaatgccgattaagttcccacatgaatgaagagaatgctcggattttacctgaatgaagaaatctgtatttctttctaacttgtgttctgtgatatgcgtctacagataaagaaaagcaagtaagagatgcttccgttgaaaaggcaagtgataagaatcgtcagggatctaggaagggccgagcatccaagaggaacgagtatgggaaaaccaaggaaacagatgtagatgcacctgggcctattgttatgaaaccttcatcccaaaccaagaagagggtgcaactgctccagaatctgtctgctgaaagcttaactaaacctactgagtctgttgaaacagctgaaaaccccaaggactacactgaaaacactgtgattcgtttggatgagcatccatctctgaataaagaaggaaatctttcacccttcttttggttgagagatgaagatgatggggagaactcaagtcagcgtacagaaagtgatcaacttttagggactacaccagttaatgttccctctttcagcgatttgatggactcagatcatgagagcccatcgaaagtgagtactcgaaaaccttgatagtcttttttaatgctatctttcagtattgatattgcattatattgttttgtagtattgatacattctacactagtttatgatagaaatgtgtttgataaatattagttatgctgtggaggttatttttgatttagattgaatactgcgagttaaaaggtctttgacacatttattactcataaaaatcatgctcagttacatggaattccctcattctatccaatatcctaaaaaagtgtcggatcctttgatcttactttttttccgatgaatgtttcaggaagacgagcaacaaaagcccaatccaggtgacatgtttgatagcgaaatgtttgaatggactcagaggccttgttctccggagattctacctagtcctgtgaaggccaaggtaaaggctgttcttcactctgatacagcaaggtctttttgttttctatgatagtgtcatcaagtgtgttgaaatgaactcaaatttcatcgatttgcaggtcctaggtagagatgagattgatcttactcaaaagaagctacctaaagttaaagttgcatcatccaaatgtaaaaaccgcaaagcaggaagtgcaagaaatacagttgctagacgaagcattggggtttcacaagaggacaacatggaatcatctgcagcagcaaccattagtgagaaacaagatagtcgtgggaattctggcacaattatcaggaatgatgtgaatactgatgaaaatgtgaaagctaaaagggctacaagaagcaaggctcagagtacacgagttcagtctgatctaaatgtattcaaggaagctgatgggaagcaggggacaaagaggaaaagatctagcattaaatcctctccagctcacccaatcgcaggacctaatgagctctcacttggaacagaaattgtgggaaagggggatcaggatcaagcccatggtccatctgatacacattctgaaaacaaagtcccaccgagaaaccctcctgaagaagaggggaagaaaatcaatgc

SEQ ID NO: 151566 - DNA, 390 bp, Arabidopsis thaliana landsberg
atgaatcaattcgaatttaatgtcactacaactagcatgcttataatgaacataagcattaaagtcaaggtttactatggtttgtttgatgcaggtctcttcgacctggccgtgtccgctgagtttattagtaaggaaatcgtcaactgccttattcttgctagagaagggctacatgctgtggtgttagttctatccttgtcgactcggatttcacaagaggaagaaaacgcactttgtacgttacagatgttgttcgggggtaaaatcgttgactatttgatcgttgtattcacttgtggtgatatgttggaagatcgaaatatgactttagaagattatttgtccaatggttgccctgaatttctaaaggtatgagtttgattattt

SEQ ID NO: 151567 - DNA, 1165 bp, Arabidopsis thaliana landsberg
tttctgatctggtctgtgaagtccatatattgtttgggtctagacttaaagagaagcatgaatcacattgttttacatcattgataatatgttttttttttttgttgtgattcaggttatagaactagattttctataccctagtgaaggtatacatcgtcgatgggaaaatggctacagaattacatcagttgctgcaacttgggatcaggctgcctttgttcttagtgtgccaagaaggaagcttaccgatgagacacaggagactcttagaacctctgcttttcctagtaatcatgtcaaggtttgcttgctggtctcttattcctttatccattattatttggctttccaacttcttggggtgtaatatatctattttattttttctgcaggaaaaatggggcaagaatctttacattgcatcgatttgttatggtcgaactgtgtcatgaagttctaaattttttgttaggatgcatctcaatttagctttaccatatatccgctaagaaaaaagaatcgttgtgatcagtgatggtatgggcttagggaaccttttagcaaggttgaatgaatgtttgccaaacttcagtgatgctgcaatgtagtgtatcgactgcaaaaacttatcctacttttcaacttggatgacttgtttgatgaaagaagttaaaatttctttagattaaaaaggtcttttattatcttcaactaatgttgatttattagaagtgaacgccacagtttgattttatgtggctagtaatgtgatttttattgtgtttcttgcatgccgttttccgttaatcgtgtaggaaaccagggagggtctttgaaccttttggtcttcttctttagctgaaaaatgaggtgatgctggtttaccaatgttcctttggaaatgtaatgatttgttttctgagatccagagattgacagttcgaagttatatgggttgattttccctactttgttgcagaagttcttcactattgtaaactaacgtagtgaaactttaagtgcagaatacggggcatgtcggtacaactgttgctgcctgtatccaagttgaatggtagttatattttcttaaagctcaaataaattgtttgaagcatgaagaagaaatgtgggaaagactaaagaaaatcgaaatggcaat

SEQ ID NO: 151568 - DNA, 575 bp, Arabidopsis thaliana landsberg; identical to SEQ ID NO: 13850

SEQ ID NO: 151569 - DNA, 564 bp, Arabidopsis thaliana landsberg; identical to SEQ ID NO: 64245

SEQ ID NO: 151570 - DNA, 426 bp, Arabidopsis thaliana landsberg
ggcaaagaagtaaaagagacttaaaactctctctctctctctcttggtcttcctcactcttaacgaaaatggactctttaacactcttcttcaccggtgcactcgtcgccgtcggtatctactggttcctctgcgttctcggtccagcagagcgtaaaggcaaacgagccgtagatctctctggtggctcaatcttcgccgagaaagtccaggacggctactaacagtactggtctttcttccgccgtccaagaggggtcgaacccgccgagaaagttacagagttcgttgtcacattctactatctcgtcaccgacatgtacgagtggggatggggacaatccttcctcttctctccatcaatcaccgcaatatctctcatagtcgccacgcgcccctcagaagggatgactgtagatgtgatcc

SEQ ID NO: 151571 - DNA, 602 bp, Arabidopsis thaliana landsberg
  unsure (1)..(602): unsure at all n locations
aacaccccctttgaactcgatcaagaaagctatgtgtgaagaatcaagaatggtgcggacaccgtgttgcaaagctgaactagggttagagaaaggagcttggactcccgaggaagatcagaagcttctctcttaccttaaccgccacggtgaaggtggatggcgaactctccccgaaaaagctggtatgtattattttttattatgtttattccgtcatgtttgaatattcaatgttggacctttattggtcattattgctcaattattttacttaaataattcttctaattggataggactcaagagatgcggcaaaagctgcagactgagatgggccaattatcttagacctgacatcaaaagaggagagttcactgaagacgaagaacgttcaatcatctctcttcacgcccttcacggcaacaagttagtctctctacctctacattttatacttattttttgtttgcattaacgtttactaatattgtaatcttataagtggttccaatcagatggtctgctatagacacgtggttatnccaggaagttccaataacaagatcaagagctacaggaacactcagggtcaaaaaccg

SEQ ID NO: 151572 - DNA, 2366 bp, Arabidopsis thaliana landsberg
tgtaatctcagagcggttttccttgtatccacacatcaaagtgggccttttaagtcggtttcaggtattgatcactgtttctgagacaatagatgaaaacgggtaaaggatatgcagaaaactcaattttgttgtagactttagtggttgtgggttacatagaaagaaaccctctgctgtctgctgagtgtaaagttgttcatagttttacctggaattgaccatagtcacatcttcgtgcagaccaaagctgaaaaggaggagtatttggaaatgataaaaactggacatctcaatatcattgtgggtactcactcacttctcgggagccgtgttgtgtacagtaatttaggcctccttgtggttgatgaggagcaggttctgttctatctcgttgaaaataagctgtttatgccataatctctgattgattcttggattagttgatgatattctttgttcacttaacagagatttggggtcaagcagaaagaaaagattgcatctttcaaaacatccgtggatgtgcttacattgtccgcaacacccataccaaggacactgtacttagctttgactggattccgggatgctaggttgcgacatgatgtgtttcagattatatgctcactgatagaatttgatgagactaatgagcctttgtttcctctttgttttagtttaatctccacaccgcctccggagaggattccaataaaaacccatctttcgtcattccgtaaggaaaaggtgattgaagcaataaaaaatgagctggatcgtggtggccaagttttttatgtcttgcctcggattaaaggtagaatgcattaaaagatttgtcgttctctacgttatctcttaatatgactacctttgctcttggtcgtaactcagagactagtagaatcagaaaaaccttttgaccatggaatattttttctcaatgtcagcctttacatttttccattatcgatttaccactttattctcctttatcaggactagaagaagtgatggattttcttgaagaagcatttccagatattgacattgctatggcacatggaaaggtatgttgtggcctttcttagtagtactagacatttggatgctcattcataccataaagcacatttcattcatggaatcctcctaagcactgttattgctatcctgctacattgatgcattcgcagcaatactcgaaacaactagaggaaaccatggagagatttgcgcaaggaaagatcaaaatcctcatatgtactaatattgttgaaagcggacttgatattcaaaatgcaaataccataatcattcaggatgttcaacaatttgggctcgctcagttgtaccaggtgccaaagttacttgtctactttacttttgcgtcattgctattgtagttatctttcacaacaaattgtgagtagcttcttagatatcttcctcttgttgcgatcaacagttgcgtggaagggttggtcgggcagataaagaagctcatgcctacctattttatcccgataaatcgctgctctctgatcaagcactggtattgggggtgactttatttgctctcttcccttggcaaacattggcatgtaatgtataagctgacaatgcaggaaaggcttagcgctcttgaagagtgccgtgaacttggacaaggcttccaacttgcagagaaggatatgggtataagaggttttgggacaatctttggagaacaacagacgggggatgttggaaatgtcggtatcgatctcttctttgaaatgctttttgagagtctctccaaggtatattatgaataaagtctacttcgacattctcactgattatgactctgatgagccttttgtttatcctttttaaaaattggcttggttattgacttatgagtcaatcttgttggttgtttctaggtggaggaactccgtattttttcggttccatatgacctcgtgaaggtatgttccatttcaacaaaaggtgctgctttagattaaaaatgacacaagatcagaatgtttccaaatgaaggctaaatacgatagttagtagtaggtctgttgcttgtgcaagagaagtggagaacttcaaatttctatgcagttgttatgcctcgaactgtagcaattaatgcctttctaattcctgtttttgctctgttttccagattgacataaatataaatccccggctaccctcggagtatgtaaattacctggaaaatccgatggagatcattcatgaagctgaaaaagcagcagagaaagatatgtggagtctaatgcaatttacagagaacctgcgtcgcccatatgggaaagagccttactccatggaaatcattttaa

SEQ ID NO: 151573 - DNA, 917 bp, Arabidopsis thaliana landsberg
atggtgggaaactacaattatggcggtagtggcggtttctatcgagattggatgtacaagagattcaatgaagtgacgatgaatttgtcaaccgaatacgtcgcaggagttgaggaattcatgacattcgctaatagtcggcctatagtacagagtagtcgaggtaaatttcattgtccttgtagtgtatgcaagaatgaaaaacacatcatctcgggtagaagagttagtagtcatttgtttagtcaatgatttatgtctgattattatgtttggtataagcatggagaagaaatgaatatggatataggaacgagttacaccgataggacgtattttagtgagaatcatgaagaagtgggtaatgttgtagaagatccatatgtggatatggtgaacgatgcatttaattttaacgtggggtatgatgataactatcatcatgatgatagttagccctgtaacggagccggatatccggctttttcagcgtatccggatccgtatccggatccgccggattcgtaaatgctttacccgtatccggatccgtcgcacccggttattcggttttctggatcggatcacggatccggattcgaatacccgcggataacggattttagtcccaggcctacctacgattactctcgtcgtagaagtaaataatatatacgtttacaaatgatatacattacaatttgacaaagggagagctattcatgtaattattaatacttttcgcatacaattatacaaaccaataaccactccttggtatctatctaaagactcttcacgctctcatttttgcagctgcttctttgatctgctcaatagtgaaaatgccaaagaagtcgtcatctttaacagcgttgatcacagcaagtgctaaatcatcgacgttaaccgggtga

SEQ ID NO: 151574 - DNA, 338 bp, Arabidopsis thaliana landsberg
attgttcgcaaaccagctcacttgttccttgacgagattggtgtggcttacgatgagcaagacacctacgttgtggttaagcacgcggctctgttcacatcaaccatcatgagcaagcttttggctcgtgctaatgtgaagctcttcaacgctgtggctgctgaggatttgattgtgaaaggaaacagagttggtggtgtggagactaactgggctcttgtggactagaaccaccacacacaatcgagtatggaccctaatgttatggaagcaaaaattggggttcgctctcgtggtcatgatggaccttttggcgctaccggtgttaagaggttgaa

SEQ ID NO: 151575 - DNA, 744 bp, Arabidopsis thaliana landsberg
aagcagcgagagagagagagacttattattagggctccgtcaaatttccccaatttctctctgattcctctctagaaatcgaacttcttcttcttcgtccaagcttttgaatcgaaaatcgatggcggatcagagttctaagccgttgcagtttttcgtgagactactcgacggaaaatcattaaccctaagtttctcctctccgttagcttatggcgagcagatcaagcagcggatcttcgagcaaacgaagatcccgacgcatctacagagattgataagcggaggataccaaatctccgacggatccgcgatttctcagcctgacgcaaccgtgaatctggtcctttccctccgtggtggtaaaggaggattcggatcgttacttcgtggtgggggtatgaaagctgggcagaagaagacgaacaacttcgatgcttgtagggatatgagtggacggagattaaggcatgtaaacgccgagaataggcttcaggagtggaaggatggtgaagaagggaggaaccttgagaaaaaggctcttgagtacctgaagaagcaatccaataaagttaaacaaggtgttggaaatggagctacgcagaagtatgttagtaagtataaggaagaatctgataagtgtattttggctgttgatttggctttgaatgaatctttcaagaatgggaagagaaaagcgaagattggtgctgaatctgaaaagaagaaacggctcaaaatatg

SEQ ID NO: 151576 - DNA, 3151 bp, Arabidopsis thaliana landsberg
agaaaggagatgcttttcacaagttcaataactttataactttggtggaaaaggaatctggagagaagattcaagccttcagaatagacagaggaggagagtttgtatctggagagttcaattctttttgtgaagagacagggataagaaggcatctcattggtccatataccccacagcagaacatcgtagtagagagacgtaacaggaccttattggagatggagagaagcatacttaaacacatgcatatgccgaatttcttatggggggaagtcataagacattctacctatcttttaaacagaatcgcaacaagagttcttacgtacataaccaccccacatgaatgctttcgagagaagaaaccattcgttgatcacatacggatttttggttgtacggcatatgcaaagatagataagcaacacttgaggaaactagatgatagatctcggatacttattcatctaggaacagagccgggatcaaaagcttatagactactcgacccacaagaaaagaaagtagtagtcagccgtgatgtaatctttgatgagacaaagggctggaattggacaagagagaactcaacacaagacggtgatggaagcttcaaggtcatgattgaagatttcgggactcatagacttcaagagacataagataatactgaaatagaccaaaatttagaagagaaaaaccagaatgatgagtccgattctgaaacaagtcatgaagtaatacaagaaacaacaaaatcaagtgaaagtgttcctgctttaccagcattgagaagaacaacaaggcaggttagtaaaccaaaatatcttgaggactatgttttgcttacggaagaggaaggtgagatgttactcttagctttaaagaatgagccttgaagtttctatgaagcaaaagaacaaaaggaatggatatgtgcttgtgaggaagaaatcaactctagtgaaaggctaggaacatggaatctcgtggatttgccaattggagtgaaaccgattggactgaagtgggtattcaaactcaaaagaaactctgatggaagcataaacaattacaaggctcgtcttgttgctaaagggtatgtacaaaagtatggagttgatttcgaagaagtctttgcctaattgtttggtcattgttagacctaagttatgttcttttagcttttgttacacattttgagagaagaatccaatccctttagagaggattctgaactactttgctattattcttaattaatcaatgaaaactatgcagattatgatttttgtttatattgtcatgtctgagtaatcaccttgttcggtttagggagtctcaatagggatttagatggattagtagatcgaaaaccccttaggattattcttagagttcttcatcttgattattctttttgctagttttagattgattacctagaacttgatattagataataggtatgcttgccataggtacttgttatttgaactatcatagatgagcctaggcatttaagaaagaacatgtaggctcatagaagggctctggtttagatactaggtaaactaatcaagctcattaacaatgcatactttagcataggatttctcggcttctctggttatcttagctttaagtatagagagtttcgcggaacgccaccggttactctataatcatagtctgagttcgagaacggtgcaataacaatcctaatattagctagatctacaatttatctatctcccgagacaattccttagacccgacgctttaatcacttgaatctacaactcatttacttgcttatttgtcttcaatattcaattactttatttagcttatcaaacaacatcataagtctattgtgtgaacatcgagaacttagtggaatacgacccttaagtgctaacggcgatctcttatttgagggagtaagcttaaggcaatttgagctatatcagtctgtgatagtgacttttgaaagtatttctttgaaccgacctagataggcgttcagtggttcgccgttctcctgagtcatgctccaaagatcagaactagaggctccgggctgaatacacacttggtaatgctttaagaaggcagttgacaactaggtgaagttgtcaatggagtttgcctcctacctggagaaccaggtcaaagctttcccgacgagaccttcaacgaagagttggtagcaaccgatgtccctctgctcaactgagaagtgagctttggcgactgttgtcatgaaggaggtcatgaatgacttgaggaactctcgtgcgcgtaattcgatcagtgaaagaagtcttatgagtttcttcaatcattcgatcaatctctaaagccgaactgacgaccttatggacctatgatccgatctctcgaagtttcagatagatatcgtctatctgcccgtcatggtccaaagctgctggcataaaaatgtgaccggatgacatcaggggcggcatagatggtctgccgtcctgattggcgggatggtgcgatcctgggaacctagagttgaccatgttggactgtgcgtccgtgaagtcaacgctaagaccgcgcggttggatcgttcttggcggtgttgcttcagagttcggacgtggcgtgattccttttgctaactcgtcgagccggcggttagtctctgcgacagatcttttgtcacggtcgcgaggatggctttgaggtcttccaaggataaggacaatggagcgacggctggggcgataggattcgcttctcgaggtaattgatcttcaaccgtcttggcagctaattctgccacggagggaggatctcctccggtaaggaggctagatttcgtatcgtcaccgttaaatggaaggatgacgggatcgatgatcgtttgaaccatgttttcttgcgagagcgtagagaaaatttgtttataatcccctacaaggcacgccaattgttgattttgtaaatcaaacaatgaatttatactaaggagttagataaattcacttctctcttagctctaaagtaaccaaagactagatgaaaagaagaacatggttgcttaagaacgaaggtagggcttttgcttcagaacaatgtaagaaaaatagggtttctatattaagttgcagat

SEQ ID NO: 151577 - DNA, 1317 bp, Arabidopsis thaliana landsberg; identical to SEQ ID NO: 1729

SEQ ID NO: 151578 - DNA, 1145 bp, Arabidopsis thaliana landsberg
  unsure (1)..(1145): unsure at all n locations
tactaatcnagtctatagngaacgaggcattgcttatggatttagnaattacggttccggccaaagatggagttatgagagattgcatatattttagtaatgatcagtatcatagatgttgtgggattagtctacgcgatggttataacgctgaccgtatttgcgtttaccaaatcggaagcgattatgtggtccaagagtttgaacatctaactacttcctcgacaaaacttttcaaggatgctcgttggtttttccccacttttggtgataaatggttgtgaattaatactatcaagttttgtctttttggtaagggtggattatttgtttttgggtttgattagcaacacggctttgatactttcagctttttggttccactttttcttactgctattttgttatgtttttagctgttttttaaaattagctttttcgtacttcgtactactattttgttattctgatttcatatgaaacctagctcaaaattaaaatacattatttggaaattcataacaaatagtgttgcagttaatcatatggagtttatcgcgatgagcctatgatgaacaaactagaatattggcctacgtaccttctagacttctggcctatgaaataaaagttttgtaattttcttatgtaatttaatccctcactttttgaatgaaaagacgattttatggcaaggttaacgcttcaatttgttgactattattttcccactttctttactaaatatttagttagtcactcataaattatattcaatgaatcaaaaaacacaagtgcggttgctttgtgagcagaccaattacaaggcgtcgtgcctaagagaacaagaataataatttttctctctatatatttgaaattaagaacattaaaaaataaaaataaaataaaaaaaacaagcttcgtattcacggatatctctgatctcttgtttagttgtttccatctatggattcttcatccagtaattctacaggcgaagaaggtacgtacgttcgggctaatttgttcatgatgaataattaagatagctgaaatagcttatatatgattaactaagtgctaccttgtatggaactagcatgtcttgtaaatcgatgcaggacggaccccgttgcatgggg

SEQ ID NO: 151579 - DNA, 1486 bp, Arabidopsis thaliana landsberg
  unsure (1)..(1486): unsure at all n locations
tgaatgatatcaggttagggttcgtggtggagatattgtcgcacgcggcgattgtagggttcatgggaggagccgcaacagtggtgtgtctgcagcaactgaaaggattacttggcctccatcatttcactcattccaccgatatcgtctctgttctccgctccattttttctcaatctcatatggttcgtttcatcatttgtcgaaatgtgaaaaaagagttttaagtaatatgtacatatatatgaattagtattaatatttgcagtggagatgggaaagtggagtgctagggtgttgcttcctaatcttccttcttacaactaaatacattgtaagtttaacttgttaatttaatctatgtatatacgtactgattaagatacgttttggatttaaatttaacaaagtatcaattatgtaagtgaagagcaagaagagaccaaannnnnnnnnnnnnnnnnnnatgtctccacttgtttctgtcatttttggaaccattttcctttacttcctccatgaccaattccatggtatccaatgttggacgtttttcctctccttttcttttgcctctacggctaaatactcacacttagactcgaatatttacctttgcatatttacgttcttatatttaataaatctatgaaaaaaattataaacaaaatcgagaagcttattcgcgtaaggcggagcaaacaaaactgaagttgtgcattataagactgtaacgccaaacgaaatattcactctgagaaaatactacacaacgtactaataattaattttgttgaggatgaagatcggtgaactaacgaatgggattaatccaccgtcaatcacacatttggttttcacgccaccttatgtaatgttggctctcaaagtcggcattatcactggagtcatagctctcgctgtacgtattcattaaatctcgaccaatattgagtccttaaattggttgtaataactgttgtttaaataaaataaaataggaaggtatagcagtgggtagaagctttgcaatgtacaagaattacaatatagatgggaacaaagagatgatagcctttgggatgatgaacattcttggttccttctcctcttgctatctcactaccggtaattttatatcattttcatgttctttaccaatcatatatcttcattagtaaagaacatttacatatgtttgagtccgactaatcattcaacgttaacacttaacactacgtaaaaggttactaccaacattattggtgatgaaaataatcaatagttatagttttgagatgatatcagtttttggtttttgtttttagagacttatttggtatcaaatgatgattatattctcttgaaacataatgattagtattaaactcttaaagatttggaaaaaaaagcacgtaactatgttgatatataagccaaaacattatgttgaagggccgttttcacgttcggcggtgaactacaa

SEQ ID NO: 151580 - DNA, 629 bp, Arabidopsis thaliana landsberg; identical to SEQ ID NO: 52145

SEQ ID NO: 151581 - DNA, 469 bp, Arabidopsis thaliana landsberg
agctttaggtagtcatttacggaataaatactctgaaggtatcctggaagttaaatactatactgggaatcaatatattgatcagattgagaatttctgtattgagcgggctctaactgcgtttggtcttgaattctgataaatggggtgttaatgttcagccttattcttgtacttctgctaacttcgcggtgaataccggacttttattgcccggtgaacggattatggggcttgattcgccttctggtggtcatatgaagtcatggttattgtactcctggtgggaaaaagatttcggctgcttccatcttctttgagagttttccttataaagtgaatcctcaaactgggtatattgattatgataagcttgaagataaggcgcttgattaccgtcctaagattcttatttgtggtgggagttcttatcctagggattgggcttttgcgggggttaggcggattg

SEQ ID NO: 151582 - DNA, 609 bp, Arabidopsis thaliana landsberg
gaggatccccaaaatcatttaagattattaatgactaattaaaatccataattgtactatactttcttaactaaatgtgtgtgtgtgtgtgttttcttttgagagtttagctacgaagatgtgttggttccggtaggatttaaagcggtgtccgttgaggagaacccagactccattcccactcgtaaggtactgtgcgagatgacatatatgttatatcaaaatataagtcgatattttattttggtatataaacatgcttgtgagttgtgttttattattagttgcatgttcaaatcgcattataatgataattccttcggatgtattataacagggcaaagagaagcttgcgaggtggaagaagattaactgattcaagggagagtcagagagatcatatcttactgtttagtaagatcagtgttatatatgtgtgtaaaatcctaatctattaagaataaactgagtatcatatactctatgtaagatatatgtgtttaaaggtgaatgcttatcaggccgtgaccagcgtctacgtacgccacgacggtggcgagtctctccccttgttgttatgtcacatgttccttatctgtatctgtgtta

SEQ ID NO: 151583 - DNA, 647 bp, Arabidopsis thaliana landsberg
gcaccaccgaaccgaaccaagtggattcaattcgcaaccggaaatcctaaaccggaacttcccgaaccggttgtagcagcagaagagaagaggcattacagaggagtgaggatgaggccgtgggggaaattcgcggcggagatccgagatccgactcgtcgtggaactcgggtttggcttgggacgtttgagacggcgatcgaagcggctagagcttacgacaaagaagcgtttagactacgaggatcaaaggcgattctgaatttcccgcttgaagttggcaagtggaatccacgcgctgaagatgttcgtggcctgaacaacaaacggaagagaaacggcgaggaggaggaagtgacggttgttaagaaagtactaaagaaggaggagagttacgccgttagcgacggagagaatgttgagtcacgtttgacggcgatagatgactgggatttgacggagtatctgagcatgccgtttttatcgccgttatctccacacccaccgtttggttatccacaattgaccgttgttagaattctatgtttctgatagggccaacttgatgtacgctgacgacgcattaggctatatattatgcttatttgatgttcacactcgagcaaaaattatccattcctttattt

SEQ ID NO: 151584 - DNA, 390 bp, Arabidopsis thaliana landsberg
ttggatctgggacccaagctggttcttctgaagacttcaccaactcagtctcaagagccctgacaatatgcataaatgtatattgtggcctctcactggacttttgggtcgcttcagtggtgaacaagatcatcgtacctacgaacccatcagcagtcaaagttaactctaatggtgaagttcttcaaaccattcctctcaaagataaatttggagacactttgctcagcgaagtcaacgaattcgagggcaatttatatataggaactctcaccggaccatttgctggaattcttaagatcgaaaagggttcttgtcctgccacttagatctcttatttgaatgcagccgatgtgttacaatcatatatatatatttgagctttttatt

SEQ ID NO: 151585 - DNA, 814 bp, Arabidopsis thaliana landsberg
tactacttataaacatttatttctaattgtttctagtgcaaagggggtaaaattgggattgctcacagtccagcttggtttgaggctcatgagctctcggatgaagagcacgaaactcctgtaactggcctgattgacttcatattgggatggtaaaaaatatcatttactattttaccctttagtatcaaagttttaaatatatgacaaatactattctgattccacaggcatttgcatccgaccacatatggagattatccacaatcaatgaaggatcacatcggacatcgactgccgaaattcacagaggcacagaaagagaagttgaaaaattcagctgattttgtaggaatcaactattacacatcagtgtttgcattgcacgacgaagagacagatccttcgcagccaagttggcagagtgattctctcgtggactgggaacgtaagtttcttttttactgttttcttaatttcgatgcatatataatttatatagttagactattttcaatgttctcacttgttaattttatttatacttattccttttttttccagcaaggtatgtggataaataaaatgatgcttttgccaacgagggatactattactaattttgttattatttaaatataatattaaaatactaaaattgatgtttcaaaaaaataaaaataatactttctcttttttttagcctgatgttgctaaagtggaagtctacgcaaagggtttgaggagcctcttgaaatatatcaaggacaaatacggcaatcctgaaatcatgatcaccgagaatggttagaaa

SEQ ID NO: 151586 - DNA, 1428 bp, Arabidopsis thaliana landsberg
  unsure (1)..(1428): unsure at all n locations
cgagctgataatatagtaaagatgctgagtttataagagttcgtcttgttcctaaggctgatccttgaacaattttgggtcaggtaatttgtctttgtattgtctattggtcatcttgcttcagttcttgtcatttgattttgtattcatctttttttcttcaaatctacagagtttcggtggcttttgtgcacttacatatctgagttttgcacccgaaggactcaaacaagtgctaataactggaggaattccaccaattggtaaagcatgtacagcagatgatgtatatgaagccggttttgaacaagttgctcgccaaaatgaaaaatactacaagagattccctcaagacattgagattgttcgtgaactcgtaaattacttggctgaatctgaaggtggcggggtgagggattacaacatttgctcaatccactgaccagtttagtttagttccttacttgtctctgtttctttgtctttaggtacctctcccatcaggaggcattcttactcctaagggtcttcaaactcttggtctttctggtttaggatcaagtactggttttgagcgcctgcattatatgtaagagtttagcttaatttttatcaaccacctcacatgttctgtgttaaatctggccttcttaattgatcataggttggagagagtatgggatcctattttagttactggagctccaaagtgtattagtcagttcttcttaaacgctgtaagagacccacaaaaatttgttgttgtcgattatctgttctaagatagtctgtctctaacatgcttaatctgttgtgcagtntgagagttacagtaagttactgatgcattaagtcactaaacatgtcatcatcataaagatttgcattggtttaaacaaaaacaagctctcattgcatattcagggaatacaaaaaacgcaaaaaagaaccctcaaggaagaagaaataaagagtttacttaatttaaagagttttctacaaacaagagatttagagaggttcaaggtattcacacatatggctacacaaaatcagtaatccttttgcttcactaagctgtcctcttccggtttggtcaataggcttgtccaaagccatagtgagcttggaatggttagtaacaaccctgatgggttttgatgctgtgctaagataacattgtactttgccgctttcatatcgtgatgatgcaatcttcttgtgagatgtctcccatgattagcatcacatttgatggtgcaggattgtcaaccgccccaaaataaagatctacgaaaatcttcttatctctcccatctttattgtctgaaaccatatatcatcaatcaacgcatagatcaagatctaacgcttcaaggagacggaagattacgaaacgaacacgataaactaattggagcagaatga

SEQ ID NO: 151587 - DNA, 1244 bp, Arabidopsis thaliana landsberg
caagaagttaacacgaaaacgctcgtttttcggtggtgaagcggcggttgtaatcgacatcgacgccggaactgtgccgacgaccgcaccgaactgtcaatctcaccgtgtaaatttcaaatctttcgatatgccgcctccaggtaactgtttcttcgattgatattataaagtcaatttgatttggctcatctccatgacaaatttctctgtgtccgtgcaaaaaccagtaatgtaataacatttgactggtttttctgtagaaatttcgaaaagggttttagactcgaagcttgaagcttgcaaattcgcattcttgaagctaagtgcggttaaaacgacgagaatgaagaactataagcaactgcgtactctgcttatgttgaaagaaatatctcgacgtggtgctgatcgagactttcttaaagtaaacaattcagtctccatgttttttagcatctctcactgttttgcttattacccttaacgtcaaatttacaatctttgtttcaggatccggagaatagtgtaactcgaatactgtgttcggttctaaagcaagtggtaagtacacatctttatttggtgaagcattaaatgtgaaccacaaatcgattaaaagtttgaattttgtgcaggtgagtaactcagaccgttctttaaagtctcttcgtgggtttcaatatgagacattggatgatcaagagaagcaacaggtgaccaggatgatagcaagcgtacaaggaatgggtagtagaaaatacgaaccagaagctgttgatcatctagaggacatgactgagccaatggaaatggagatttatttgggaaacggagatggtggggattttggtgacattgttttggagccaatctcttggcctttagagtcacagctaactcttgaatgggttgagactttgatgggtttgctaaaccagtccacatggaagaactcggtttccgagttctcgttgatattgccacattctgtggctgtttctctggtggattgtgcttcgcagattctagaaaaagaagccaattgtgttaaaatcaatggctgtagtgaggattctagagtgattgtggttggagatctccacggtcagttacacgatctcctcaaaatctttgatcaatcaggaaggccttcacagaatcaatgctttgtattcaacggtaattacattggtcgaggttcttggagcctagaagtgttcctggttctcttagcttggaag

SEQ ID NO: 151588 - DNA, 892 bp, Arabidopsis thaliana landsberg; identical to SEQ ID NO: 57219

SEQ ID NO: 151589 - DNA, 402 bp, Arabidopsis thaliana landsberg
aatgatcttattgggataccatctggtattaaatggaaacccaactaaaagagagttatcaagttattattgtctgattagctcataccttacggcttagataagtagattctggaataattcatgtagctaagtgctttatgattcacctggtaaaaatgacacttgagatgatgattgccacgcatttatatttttgtgggatccaggtgattgttgagaaggctgagaagagtgatataccaaccatcgacaagaaaaagtaagcatattaatggcatcagtatccttttcattcggacctgacttgttaatcatagtgcttgataactaagcttttttcaataagcaggaacctagtcccggctgatctgactgtgggacagtttgtgtatgtcattc

SEQ ID NO: 151590 - DNA, 999 bp, Arabidopsis thaliana landsberg
  unsure (1)..(999): unsure at all n locations
taggctgtagcgatagcgagatcagtggcggcaatgatgcactatcgaattgatggaaccaaagagggngcccccgagggcctatgagcgtcgtcggttcaaaaacctcttgatacagtgccaagggtaagctacgaaaacattaaattttattgagttctgtttaacttcaatatttgtcacataattctaagaaccaaacgcaatgatattttagtttctatcttgatgagcatttatgaaaaattataggttcgttttcgcgatctgccgtgaacttcatggcgggagtcgaaacggcggtttcaaacatagttatggccatagttgtagctctaaccttagagttcatcacaccactcttcaagtacactccaaatgctatcctcgcggccatcattatatcggctgtcctcggtcttatcgatattgacgcagcgattctcatatggaggatcgataaactcgacttcttggcttgcatgggagctttcttaggagtcatcttcatctcggttgagatcggtctcttgatcgctgtaagatcatttatataatagattgttatctacaatagatatctatataaagcaaacttatatttttggttgttggtgaaactattcatataggtggtgatctcttttgcaaagatattgcttcaagtgacgagaccaagaaccacggttctagggaagctgccaaattcgaatgtgtatcggaacactctacagtatccggacgctgcccaaattcccggaatcttgatcatccgtgttgactcggccatctacttttccaactccaactatgtccgagaaaggtaaatatatatctacacatcatccatcaacattttctaacttattatttaggtttaaattcaaaactgaaatctggttattaacaaaacgtttttacattcaagctgacaaaacatttttttaaatacataagaaactctataaattaataataatgggaccatgaaatgtgtat

SEQ ID NO: 151591 - DNA, 2060 bp, Arabidopsis thaliana landsberg
  unsure (1)..(2060): unsure at all n locations
agctctgttcttttgtgtttttcagatntatatagttctactatgacttgaacttaatcaaggattcaatgttccttagggattnttttcagatctatgngattttagataagagtgtgattgatataccaacttggcaagttggttatgattttttacatctgccagctgttaaaaagattgaatctttggggaaaaaataacttggcaagttggttatgttttcactatgaggatttgttttatcttttattgttttgtggtgaaagaatcttagaatctgtgagtatatttgggttaagagaaatgatagagatgggaaattctgtgaatacaaaagttttctttctaagaaagtgaagaaattaaagaaattgatggaaagtggggtaggttagttgcacaataagcatgtggatgatttggcaaagacagtcagagagagaaatagaaagattctcacatgtgattctactaatttagttaatccttttctgctacactgttttttggatactattgaatccagtctgtaatatactagtttgtttagtaaactaaaactatagcaagttcttgcatttctaagaatgtgaatgagattgaattcaaaagtgtcataaatcagtataagtagtgaattatacattgtctatttttttaatgttttctaataagaagaatacattttttcaaatggcagcaagagaactcgagaattgttgacaagtgttgcatatgttcatttaaaagagtatgatatatcgaagcacactcggaatcttgcacctgcaagtaaagccattctactttctggtcctgcggaattttatcagcaaatgcttgcaaaagctttgtctcattactttgaatcaaagctattgttgttagatataactgacttctctattaaggtaaatcaatcaatgcatgtttactatttcccactacaaaacagaatagctcataagctttttcattttgtattctttggaaacagatacagagtaaatatggatgcaccaacagagaacctgtaagttactacttgtatgtgttttgtttttatgttgatgatttcagagaagtaattttggtttcttctattattggtttgtagtttcacaagaggtctatttctgagttaacattagataaagtgtcgagtttgatgggttccttctctatgctctctcaacgcgaagttgaaccaagaggtaaaaacaacacagactcttccctcatttttcttttcttattacttcaaacatgatctaaagagtttaacattcttgtaaaatgtagggacattgcgtcgacacaccagtggaaatgatcttaaatcaaggtttgcctttgtttcccttgaagttagtttaatcgatttttcgtctttgtgagctcactagctcctttgaattcaggagtactgagagctctaatcgtcttccaagacacaagagaaatgcttctgctgcttctgatatcagtagcatatcttcccgctcttcgagttctgtttcaggtttggaaaactgattattgtatcttcttattacatttgcattcaacttcgtgttcttagttcttacgtctttttgtttcatctatgccttatggcttctagcttccagaaaacgcactacaaatctatgtttcgacgagaaacttttcctgcaatcactttacaaggtaaaaagacaaaccttatcacaagtttgctacattgtttttcaatggatgtcttacaattattgtcattttctgtaggtcttgagttctgtatcggaaacaactccgctaatcatatacttgagagatgatgagaagcttcttgagtcagaaagattctacaagttgttccaaaggctcttgaacaagctctctggtcctgtcttaattcttggctcaagagtattttaacctgaagatgattgccaagaagtagaccaaagtatttccgctctattttcttacaacatcgagatcagaccaccagaagaagaatttcatctcgcgagctggaaaatttggttagaagacgacatgaaaatgatttc

SEQ ID NO: 151592 - DNA, 572 bp, Arabidopsis thaliana landsberg
ctgaatctgagctatctctggatcagcttgggatccgccacgtcacttctgacagccgccggagatgaacctcacgtgaccgttcttcagatcggatcttctgtgtttaaccgtcgaggaggactcttcttcttcttcttcttcctcgctcacattgttcagtcttgaaacactctaatggcgacaatgagcaaagctcaaaggaccaaacccacttctggatctcagcgtcttgttctgttctgtatagtggtgttctcattcctcctcctcttctcttcggtgatctccaccggcaaattgggattgccttatcaacaaaccctaatcgactatttcgtgtggtctcctcgtggtaagagacagcattcgttgtcggagaagtacttgtattgcggaaacagaatcgattgtcctggcaaaaactgtgagacctgtgctggcttgggtcaccaagaatctagcctcaggtgtgcacttgaaagaagccatgttttttaacaggtaactgaattctctgtctgagctttggtcaagacaaaaggaacctttcgctatgaaattggcaaatt

SEQ ID NO: 151593 - DNA, 737 bp, Arabidopsis thaliana landsberg; identical to SEQ ID NO: 61774

SEQ ID NO: 151594 - DNA, 692 bp, Arabidopsis thaliana landsberg
  unsure (1)..(692): unsure at all n locations
tcggtaagtttatttttntgtagaaattattaattcaaatatgtcatagtttanatatttggtgtgtttttttagtgggcagatttatgtagaacatatctagtggaagcaaagtggtacaaaagaggatacaaaccaagcttggaagaatatatgcaaaatgcttggatttcaatttctgccccaacaatattgatccacttttactgcgttttctctgaccaaatctcagttcaaaacttagagactttgtctcaacaccgacaacacatcgtccgatgctcagccaccgttcttcgtttagctaacgaccttggaacttcgccagtaagtgatctatcttctaacttgatgtaattcatgcatatatagtatatgagtaattgagtgaatgtttttcttttttttttggtaaaacattgagtgaatgtttgttaaaatgtagactgaattggcgagaggagacgttctcaaatcggtccaatgttacatgcatgagaccggagcttcagaggaaagggcacgtgatcacgtgcatcagatgattagcgacatgtgggacgacatgaactccgaaacaaaaacggcatgcaattcttcgtcacgttctagaggttctaaggaagctgcaatgaatctggcacgcatgtcgcaatgcatgtatcactatggtgatggtcatggatgccctg

SEQ ID NO: 151595 - DNA, 559 bp, Arabidopsis thaliana landsberg
atggcttcgggtggtggtgacgatgggcttcgtcggcgaggctgttcatgcacaaaagacgatttcttaccggaagaatcgttccaaagcatggggaattacctaaaagcccttaaagaaacaccgagtcggttcatggatcgtattatgactcggtcactagactccgacgagattaacgagatgaaggctcgtagtggtcacgagatgaagaagacgttgacgtggtgggatctcatgtggtttggtatcggtgcagtcttcggctctgggatattcgttctcactggactcgaagcacgtaatcattccggtccagccgtcgtgttgtcgtacgttgtctctggtgtctccgccatgctctccgtcttttgttacaccgagttcgccgttgagattcccgtcgcaggtaacaaaattatcatttcctctgtttctcatttatatttatattttcgcttttttttttggatggtatatttatattctcttggtagagaatttctaatttgcaaaagttgaaaaatattaaatttacacgtttaaatttcattttaca

SEQ ID NO: 151596 - DNA, 1885 bp, Arabidopsis thaliana landsberg
  unsure (1)..(1885): unsure at all n locations
ataaacaagatatttttagggatgtatttatctctctcatccgcggagtgagagacttgggagagtgaggatgtggatgggatttggctaatgtaatatccgtcaatgatgtttgttgctgacatagcttattctcttcaattcacaggctccggagggttatggtactcagcatgatccaaatcatcggtgagtgctagtaaaatggattacattgatgtagttgttaatttgttattgctcatgggggtatatttattttagctactgtaactaaattgcatttcttgtactttatttggtttggttacttgtgccgaaatattcatgatagttcatatttcatttttttaatatcttttctgtacctatactacattgctcttacaggtttggcgtatcatatgatgacggatatcctgatgaaaggttgatgcgggatgatgtctacaactatccacctggacataatactctgagtgactgccctcaatctagaaagcgaaactatgaagaaaattatcccagtgaacttcgcaggcaagaaaagccttacatcgattcaaattatgctgctgactattatcatgatagtgaagctgggagtcgtaatggacattaccgtgatcatgaacacgaaaggtcgtccagatatgatggctgcgatgactattcttgtaatgataacaactatagatcgaaaaattaccatcatagcagagatgatggtcgtgaaaaagattatgattatactcgccgaagttatgattctgagtatgaaagggccagtgtgagagatggcagtcgaaagagccgtgatccgcaggacagagaacggaattctcgagatagagaatgggattcacgtgatagggagtgggacaaaagatgttacagccgcgaaagagatgagagtcctcataagagatatgagaagtcacgatctcgatctaccggacgtggggagttctctagatcaagatctcctagaggtcggagccatgggcggagttaccgggaggacagctatgagggggatcactggaatgaaagtgagaggccaagagaatatgaagatagacatgaccaggatcatttttctgctgtataaaatattctctcatccctgctctatattcttttgttacgaagacatttaaaaaatccgttcctatatttttatggtttttgctagaccccatccgccactgttgttgtgaagggtctctaaatgaaatcaacagaagaagatctataccagattctggtaaactcttcatttttttgatctcgtatgtcctcaggttnaaacaatttttcatgcatgacttcattattcccatgtgcatgctaggctgaatgcggtcctttgcatcatgttcgtgttattcgggagcaaaattctgggatttctcgtggatttgcttttattgatttccccacggtggtatttgctttcaactaatctgttaattccttgcgctttttcttgtgatttcttcaacactgtgtgcatttatgtattttgtctgagcaggatgccgcacgcaccatgtggatagaattgagcatgatggtatagttttggatggaaggaaacttatgttccattacaggtctttttttaaataaacataagactttgattgatttagatattacctatggagggatcatagaattactacacatttaaattattgtttcttgaccgtttcagtatcagagtataacattcttacactaaattgcgtgtgttgtagcagccaacctactggtagggctggtgtgtcccgtaggcaggaacatgcttctagacgcagttatggtggaagtcgaaacatgatagttcccacagattggatctgtacaatctgtggctgta

SEQ ID NO: 151597 - DNA, 2696 bp, Arabidopsis thaliana landsberg
ggttgttgttcagggtcctggaccaggaccacgttatggacatgtcatggcactggtaggacagaggtatctcatggcaattggtggaaatgatggtaagcagtttcactcgccacctcattaaatatgtatttatattctccttaaatagcttctttttttctcaatatccttatattaccagggaaacgtccattagctgatgtatgggctttggacactgctgccaaaccttatgaatggcgtaagctggaaccggaaggggaaggtccaccaccatgcatgtaatttgtgattccttcgcttcatttcttgtatgtgattctgtggctttcagttaagtgatttggatctcttgggtttgtatattataactaggtatgcaactgcaagtgcgcgatctgatggccttcttcttctctgtggtggaagagatgcgaatagtgtggtaagccaaagagtttttactgccatgttatgacgtggaggaaatccaaatgctgtattactctttgttaccattaaattaacactgcactgaacaaacttgtttcatgaagagaggggaatagcttttctttgcaaattacttcaaatacgagttcaaataggaaaatatctatcatgttcttaaagtgacaattagagtttaagagcttctttatctgtcttgatatttaatgttcgattgccatggttaatatgtctttgtgtacctctgcgtgatagcccctagcaagtgcatatggacttgccaagcacagagatggacgttgggaatgggccatagccccaggtgtctccccttctgccagataccagcatgctgcagtatgagattcttcttctttttttacttcttttagctagttccatcagaaaaaccaacatttggtggattattttaggtctttgtaaatgcaagactccatgtctctggtggggcacttggtggtggacgcatggtagaagactcgtccagtgttgcaggttagcgaaaggcgagaaacaatctcatgtttgtgttgttaatgagataatacttacgttttttgcttatacatacaatctctaaaatgatggatatgttacttttttttggtacaacttttggctgtcttaattgattaattgttagtgaggcatattatttctttctaaaagcatagttatattcatcctttaagctgcatcattcttctcaatggactgtagaagccaaaatttatttgcaatttatataaaactatcaaacagggatattaaaaaaaagttcactcatccataactcatgaggaagctacaaaattattttcgtaataactagtacatgcattcatgtaagcttctctgactggttcattattttctctttgttcagtgttggatactgcagcaggtgtttggtgtgatacaaaatcggttgttactagtcctagaactggtaggtatagtgctgacgcagctggtggtgatgcttctgttgagctgactaggcgatgcaggcatgctgctgctgcagtgggtgatttgatattcatctatggtgggttgcgtggaggtaaggaaaaaagcttgatagctgttataggcaatttaccattacacgtttgtccatgaaatgaaccaggcatatagtactgagaatccagtgatctactaatttggcatattatttattaagttgttagtgtatgatagtgtaggatttgttttttaagtaggtagtttgatcttttgttaaagtctgggacttaatattatcagtattagttagtaaaaccattatagagatcattcttcaccaaatatatgtgccgtagcttcttttctcttccctttgcagaccgtgcattttcttaaaaattatagctgctaaacttaattatattctcttgatcctataggagttttacttgatgacctattggttgctgaagatcttgctgcagcggaaacaacatctgctgcctctcatgctgctgctgcagcagcagcaacaaacacgccacctggccgttcacctggaagatatggattttctgatgaaaggacaggggagctaccagaatcagctcctgacgctgtggtgctgggaagccctgttgcaccccctgtaaatggtgatatgtatactgatattagcactgaaaatgcaatggttccaggaattcggttagtgtcttaatatgtggggtgtcgtattgttagcacacctatgcatttagttgtaaaatatttatcaaacaacattgtaggagaacaagcaagggtgtggagtatcttgttgaagcatctgctgcggaagccgaggctatcagtgcaacattagctgctgcgaaggcacgacaggtcaatggtgaagttgaacttccagatagggatcgtggtgctgaggctacgcccagtggaaaaccttcattatcattgattaagcctgattctgcagtaccaaatagtgttattcctgcaggggttcgacttcatcatagagctgtgagtcaatctaactctatcaagaaaaatctgtcatttaccgtaattccagctcatttaccagtggtttacatctctaatttctgatttttgttttgcatttatttttggaactttgtaaggtggtgggtgctgcagaaacagggtgagccttaggtggaatggttagacaagtattcattgatcaatttgaaatgagg

SEQ ID NO: 151598 - DNA, 495 bp, Arabidopsis thaliana landsberg
  unsure (1)..(495): unsure at all n locations
attgaagggcccaaaaaggtatatgaggaatggcttccagtcaagtcttcttatgaccccgggatgccaaatcttctgatgaatgcgtatgtcaaaaacgaccaactagagacagctgaggggttgttcgaccacatggttgaaatgggaggaaaaccaagttcaagtacgtgggagattctagctgttggtcataccagaaagaggtgtatttcagaggctttgacttgtctnnnnnnnnnnnnnnnnnnnnnnnggtccagcaattggaggcccaaggtgttgatgctgtctggtttcttcaagctctgtgaagaggaatcggatgttaccagtaaagaggccgttttggaattgttaaggcagtcgggggatcttgaagacaaatcttacctagctcttattgatgtggacgaaaacagaacagtaaacaacagtgaaatcgatgcccatgagaccgatgcgcttctaacacagctacaagatgatttgtaa

SEQ ID NO: 151599 - DNA, 1589 bp, Arabidopsis thaliana landsberg
atgtttatatcagagcctaaaggccaacttctgatgattgatggaaaaactgaagaagatgtttctagaagtttggagagggttttgcttacaatgcggattacagcttcagaacctaaggttcacctcagctaaattcttgaactgttatatccttggaacaatttcctctcacctgtatcaaagaataattttgtgggtcgtacaggacgtggcatttgttattgatggctgggctctagaaattgctctgaaacaccatcgcaaggattttgttgaattagctatactttctaggacagccatatgttgtcgcgtcacaccttcacaaaaagcccaggtaccccacccaacgttaggtgctataagtattcaattttcctagtaccaagtggccttccactggtcatcttattttctgttttcgttgaacttttggctcgactttacagttagttgaaatcttaaaatcctgcgattatcgaacccttgcaattggtgacggtgggaatgatgtaagaatgatacagcaagctgatattggggtcggcatcagcggaagagaagggctgcaggcagcaagagctgcagactatagcattggaagtaaggaatatatgtacataatatgtatcttcaagctaataccaaggaaacaatttctgattggttcttgctggactactctttgattgcaggattcaggtttctaaaaagactgattcttgttcatgggaggtattcatataaccggacagcatttttgtcccagtattccttctacaaatcggtgttgatatgcttcatccagattttgtaagtttattatctcagatatgttctcagtggatatcatccaagtcgttcatgaaatactgacaacagaatctatgtagcttctcttttatttcaggcgtttctggaaccagtctttttaattcagttaggccggatgggcttataacgttttctacaccagtgttcctgttcttgttagtgtaattgataaagatcttagtgaagcatcagtgatgcaacaccctcaaattttgttctactgccaagcgggaaggtatgcttgattaataatgtctaaatctggtttcactaaatctgaagtcaactgttcatacgtttatgcatatttgttaatttcatttttctcacgattcaggcttctgaatccaagcacatttgcggggtggtttggccgatcccttttccacgtgagtactgtcctctcaaatctactcaattgagtacattttcttcactacttcaaaagtcacaaaaaattactatgcaaactccacacacctagttagaatgcttgtagtaacttttttttcttctttcttcctttttgttcatattcccttgtaataaatctggattctggaatctatttgcaggccattgttgtatttgtaataaccatacacgcatatgcttacgagaaaagtgaaatggaggagcttggaatggtagctctttctggatgtatatggcttcaagcttttgttgtggctcaagaaaccaagtaacagctccttgtccttgtgacgacgctcatttagtctcatacataa

SEQ ID NO: 151600 - DNA, 982 bp, Arabidopsis thaliana landsberg
cgctctggtcaggtatcgcgagatcacttgtaattttcaacctttgacaaagtcttagtttttttctttcctttctctgcagccactgctggaaagtcccaaggctaaattgtctcagttctgtcatgtggcggtataacttttatgtgaagcctacgttatatatttactcaacgattatatcacttgatgacttgttacaggcagctaatattctcaatatccatgatgttccaaacatttggcatgttcctctcctactccgtgtaagttggatgtttttttttggctcttccaagataaaggaaatagaatcatgtatgctcttggcttgctgcagaatcaaaacgctcatcactcgattctcaaacaactgaatctaactaagttagtctcatttcttatatggtcttcataagttagccgatatcactttcagtgtaacaccaagttcaataaactcatctctttcagcgttgcgacagcacctgatctggatagctggaataagatggctgagacttttgataacttgacaaatcatgtgagtatttagtgtttacacattttcttttacaagccttgacttttcttatttctgttatgcacaggtccaaattgctatggttggaaagtacattggtctaacggattcttatctctcggttgttaaggtaaacttggaaagtgaatttatagactttggtcttctaccaatcgcatttggtttccatcgcaggcccttcttcatgcctgcattgcatgttcattgaagccacatatcgaatggatcgcagcttcagatcttgaagacgaaagtgagaaatcggtatatgttaataataataactagaatctttctgatccagagtttatatcattgttttccttttaagcatcagtttctcctttgcagactccggaggcgcatgctgctgcttggaagatcttaaggtagaattcagtctacaattctctgctt

SEQ ID NO: 151601 - DNA, 735 bp, Arabidopsis thaliana landsberg; identical to SEQ ID NO: 11249

SEQ ID NO: 151602 - DNA, 1106 bp, Arabidopsis thaliana landsberg
ttagttaatttgagctaagattcacattttcctctgttttttccatattctctgaagcatgacaaaacattcacactttcctctgttttcttatgtcaaaattagaaccaataactgaaagatttggtaaagaagaggtaatgggaagagcatgtttgccgagatggcgattaggaagactaatggcaggattacaagtcatcttagggttactggtgatcactgtgagcctctcatgtctctaccgattccattccgtgggttacttcttgcaaaacgaagacacttgcctcaatatgtacgcaatcaaagaagtcagcagcgaaggattcgacctaaaggcgctgcacgatcgtgttgatgaagtactagaaaagatggacaacttgtacgagaagctagagaagacggtaaaagatatggagaagagcaaagacggaagcaaaaaggagatgaagaagtttcttgaagatgaagtgatgaagccattttattatgctcatatcggattaaggcaaatccggttgccaaaacccgaaggaatcagaaactcaacggaaaaggaagagcctttgatcaataagtttctcattgaagagataaggcagtacattacaccaaaggagaatcgtgttgggaagataaacatgtttggaacagagagagtttacaacactattggtcatgcttgtgcgttgatgaagatggagctagagaagtatatggattatgacgttggagcgtattgcgatgatgattggaacttagcacagaagctgatgcttaacgggtgtgatccgttacctagaagacgatgcttgacaagagcatcaatgacttaccaaaaaccttatccgatcaatgagtcactgtggaagcttcctgatgatagaaatgtaagatggggaaattatcaatgcaggaacttcgcgtgcttatcaagcaagaacccgaaaaggggttacacgaaatgcagcggatgttttgaaatggagaaagagaaagataaatgggtcaagaacagtagtttgttagttgattttatgattgaagatgttctgagagtgaagccaggtgagatcaggattggattggattatggtgtt

SEQ ID NO: 151603 - DNA, 580 bp, Arabidopsis thaliana landsberg
ttggctcattcgattattataggaggaaaccatggagctaaggaaatctcaagtggccatgcctgttttcttggcaataatgagtctaatggtgagtcaagtggtcttcgccgagaaagattcaggttcaatgtcccctcatgatcgggcattagcagaaatgcaagcccttaaagcttcattggttcggcgaaatctaccggctttggtatctcctcctcctacccctcctcaggtatattatataaccttctctagtcataatgatcatgtagtttatgtatgattgagattgctcaaaaggttttcatcaagtgataacatataagataaaatgatgtatgtcgtacccagtccgttcgtgtaccaagtgatatcatatggtgccgatcccacagggaaattgtatatcacggatgcaacattaaaagctatggaataagcatctgatggtccacatcatggaccttccatgctaggtataaatgatctcggaggagcaagaatttatcttaaaggtgaagttacttaatcagtccgcctctaccgatttccttaaccggcgcccgaaatcttcttg

SEQ ID NO: 151604 - DNA, 2160 bp, Arabidopsis thaliana landsberg
catatccaaaaccatagaaatcattactcgaataaaaatccattggttcgatccatttgactcgactcaaaaacgggttccaaaccgcgagtttgtagcttcttgatcgttcgttcttgcatctacataacaataatccatcacaatggaccatagtggagatttgagctacattgtcgaactcttgcgggattggtgaagatgaacgagctcctttcactggatcgatgatctgaacgatacgatcgattcttatgaaacgttcttgttcttgatttagatccaaggatttgtagatgaatctcttgtccttcaagagagcaaaccattgtttacacgtcaatttgaattgcgtcaaatattcgactggaatcctacaacatatttcttctattatatcaataggaagcaacgaacgttcacatgaagccatgcaaaaacaaattgagaaaaaaaatcagaaaatttatgacaagtggtcttgcttcttatactacgtcgtgaatggatggtaataaacaattaaatgttacctctagtttttttttttgagagaatggtttttatccgtatatggcttattacaagtttcctcctttttcgagtttggtttgaggtctatattgaagatgagatactaaaaattgaggtaaattctttagtgtgaaggaaaattagtaaatacgatacgtttggaattgtttactactaaaaaaaaaattgttttagaccaagccagtccgacaaaaaggcgtgtgaatcataagaagtatcacatgatgctagacataaaagatttttcaaacatgacaaaacaaattgtgagtgtcttagtcatgccatttgaagtagaacgaaacttagtgatgagacacgtaacatcagtgagaatcaagatctaacttcggacttatcgtacgtaccacgtccacctaagtgttatccatatctactacatgtctatcttcattcaattttttttttgcattaacttgtaaacatagtgcataataattagaatcaagatttgaatccaattcgcttactaaatcctaaatgttaaaagcatacatgtttttcaaatcctacttttaggtgctaagttttttttctaaggtagttagagattgttagattttatatcattgaactgatcatcagtctctatactaacttctagatctcattgaatgtttactcaattttttttaattttttgtttggataatcgtctgctcgtggttttgatgcgtacgaacactcgtcaccatgcatgtcaagctctccttcctatataaactaaaaccacccattattgtcctcaaaaacaaacacatcaacaaaacaacaagaaaaaatggcaataaccaacaaattaatcataacacttcttctccttatctccatagctgtcgtccactgcttatccttccgtgtggagatcgacgagttcgagccaccacagcaaggagaacaagaaggtccccgtcgccgtcctggtggtggctctggcgagggatgggaggaagagtcgacgaatcatccataccacttcaggaagcggagtttcagtgattggttccagtcaaaggaaggttttgtgagagtgctgcctaagttcacaaaacatgcaccggctctcttccgaggaatcgagaactacagattctcgttggtggagatggagccaacaactttctttgtgcctcaccatttggatgccgatgctgtttttatagtcctacaaggtaaaggagtgatcgagtttgtgacggataaaacaaaagaatcgttccacataactaaaggtgatgtggtaagaatcccttctggtgtcaccaactttatcaccaacactaaccagacggttcctctccgcctcgcccagatcaccgtccctgtcaacaatcccggcaactacaaggttcatatttattgttctattagtcattcttatgtatcttttataccaagatcagtagtatatagttatagcgtgagcatagaggtttgttttagtgatgttgttgtgttattactccggttttgcatgttgataagaccaaaaaaacaaaaatagtgacatcgttgtgtcaccattcggagttatccgagttattgcgtaatgttcataaaataactaacattgtttaatcttga

SEQ ID NO: 151605 - DNA, 1502 bp, Arabidopsis thaliana landsberg
aggaaaattatctatttttaaagccttaacgtattctagacacataatataagtaattcacggaataaaagaacataaatcaaaggtatacttgacaggaaaaaaaatcaaagtataatcagaattttactaaacaaaaaaacattgatggggtggtaggactgttctcgcacgtgtgagtaggcatgtcagtatgaaggtcaaggagtaagcgcgaacctcggctgccttaccggctcggctcccgctaatcacattgttgcctcttcttactaatctactagtatctttttatttaatgctaattaactcttctttatatatctcctatccatcataaatgaaggacgtggaatcgacgacgaaccggcaaaagtatataaatagtttatgaatgatgatatcaatgcaccatttcatttaatatatatttttgaataccctttgacaatttaccctttgatttggaccatgacataaatatgttagaatttaaaccttttagttttacttttcttctggtacaaatcagaccattgatcaccgtaccttcttcgacccaatacaaattttgttggctcaaacccatttcaatatgggctaccatgtaaatagcaaatgggatattacggcccattaaggcccacagaaaagatatatctgaagggattatagttagctgtccatccaaacagagcaagctttccttcttatcccgaacaattcggtctgcttcgtctccctccctttcaattttcgtagacgaaccaacgaaaggtcttttctagtctagtcacttcacttctacggctactgccatggcggcttctttctcttccactgctcccacgacaccggttcttcgattcagagccaactactccaagcctctcctctctctcccaggttcgaattttgtttcttcactgtcctctattatccatttggctccaaatcgttgttgctttaatacccttggatagattcgtgtttgaggataatctcttcggcgatatctccctctacacgcttaattgcgtgttcgttaaagacagacaagcttccgctcggtgccggcgtcaatctctccggtggccccgttgtcaagcgctctctacagaagaggcaggttccactcatgatttgggagttttagggtttgctgaatgtctctaatccggatgttctttgtttggaaaattccacagattggtgataaggtctgctactattgaagaaatagaagcagagaagtctgctattgagactgatgttgtacgttctttatatcttttttggttactgtttagtggaaacgatttggatgtgattcttgttttttggtttgtgcaatccagaaatcaaagatggagaagaccattgaaacgcttcggacgagtttcaactccataaggactgggagatccaatgcagcgatgcttgacaagattgaggtattaagatatacagctaccaaataggtttcatatgtataacttgaa

SEQ ID NO: 151606 - DNA, 570 bp, Arabidopsis thaliana landsberg
taaggttttaagatagtaaatgactctgaacgagtcggcgtagaaggatagtggcaggttttcatctgtctgttatgggacatgaatatgtgtaggctcaggtaggaatgttttgtgttctaagattttggaaatatatcaagctttgcatctgccggagctccttcagacaatagtagctctctttgtgttaagggtgtggctcgaaatggttctcccccatggcgagaagatgataaggatggacattacatatttgaactgggagatgacttaactccacgctgtaatcccacttttctattaccaaaaaactgttttgataaaatcctgaagataccttttaaatttctctagatttttttgtcaatggctttgaacaaactctaggtgttgtggtggacctcgtgtatattgttttgatttcagtattctgatttctctatgctcttcttgctttgcagataaaatttatagcaaaatgggggaaggtatgaatttatggctgctgtacaagttattttcataggtcccgtgtagttatcgcatctgatttcctaaactttcctt

SEQ ID NO: 151607 - DNA, 879 bp, Arabidopsis thaliana landsberg
  unsure (1)..(879): unsure at all n locations
cacaaaacatgtccgatatctccaatggaaataaactctcatacttttctcaagaaagagtgaaaaacaaaaaacttggtttagagaaatgagaggtttaccaaatttctaccattcttacaccttcttcttcttcttcctcttaattctgttccctgcttactctatctctgccaacactttgtcggcttcagaatctctaactatctcaagcaataacaccattgtgtctcctggtaatgtcttcgagcttggtttcttcaaacccggtttagattctcgttggtatcttggaatttggtacaaggcaatctctaagagaacctacgtatgggttgcaaacagagacactcctctctctagttccatcggaactctcaaaatctccgacagtaatcttgtcgttttggatcagtccgatacaccggtttggtcgacgaatctgaccggaggagatgtgagatctccattggtggcagagcttcttgataatggtaattttgtgctcagagactccaagaacagcgctccagatggagttttgtggcagagttttgattttccgacagatactttacttccggagatgaaacttggctgggatgccaaaaccgggttnnnnnnnnnnnnnnnnnnnnnnnnnnnnnnnnnnnnnnnntcaagtggagatttctcgttcaaactcgaaaccgaaggcttccctgagatttttctatggaacagagaatcacgaatgtaccggagtggtccatggaatggaatccggtttagtggtgtaccggagatgcaaccatttgaatacatgattttcaatttcactacgagtaaagaagaagtgacttactcatttagaatcactaaaagcgacgtttactcgag

SEQ ID NO: 151608 - DNA, 1358 bp, Arabidopsis thaliana landsberg; identical to SEQ ID NO: 59366

SEQ ID NO: 151609 - DNA, 832 bp, Arabidopsis thaliana landsberg
agatatattttgcaaaaaaattatgataaagaaacacatctttcatttacatttattgagatttataattttaatagaaagtaattatggtgaaaagacacaatccttagaaaacatataatatttgctttttaagattatatagttcttatttttctagtataataagtaaggcatcgatattttaaatattacgactcatgcaggtgataaatgagactcttcgaatggcaaacatggctcctataatgtatagaaaggctgtgaacgatgtcgaaatcaaaggcaagtatcactcaagcatggcagcactcgaagtcaaaattctatatatattatattttaaagttgagatcgttgaccaaaaaaataaataaagactgttcagatttatagagaaataaattataattggttcaacaggttacacaattccagcgggctggattgtggcggttataccaccagctgtccatttcaatgatgctatttatgagaatcctttggagttcaatccatggagatgggaggtataaattttcacttactctatagttcctgtaaacaaaagtgtaactcaaaattaatgaatatatttggacaggggaaagagttgcggtctggatctaagacgttcatggtgtttggaggtggagtgagacagtgtgtcggcgcggagtttgcgagactacaaatttctatcttcattcatcatcttgtaacaacctacgatttctcattggcccaagaatcggagaacatccgtgcaccactcccatacttccccaaaggactgcctatcaagatttcccagtcactctagaatcttgtg

SEQ ID NO: 151610 - DNA, 625 bp, Arabidopsis thaliana landsberg
gaattaatgacaacgacgacggtacaaaaccaagagaagaaattgtgaaggacacatttaggattgaataccataagacacatttcgaagaacttcacaaagctatagtgttagttcttgatctgtttctggtttagtctctgatctttctgacaatatttaatcaaattcggtcgagttttttttaactaataaatttatgatatgtttatagggaagatgggtgtgacgtaagaggatattacgcatggtcattgatggacaattttgaatgggagcatggatacactgcaagatttggtctatactatgttgattttgtcaatggtctcaaacgttatccaaaagattcggtcaaatggtttaagcggttccttaagaaatcggtcgtcggagagagtaacaaagaggaggtagaggagatgtcacgcgcggaagggaataagacttttaagggtttcgaagaatcggcgggtttctttgcatctttcatggcaatgaaccaatcgaggagagatgaggagaataatcgctgctcctttgattttcctcatactcattttggtgttttgcaaggcatagagaacccatcttcattttattgatttcaaatcccttatgtttt

SEQ ID NO: 151611 - DNA, 504 bp, Arabidopsis thaliana landsberg
ttgcttatgcagctgaattcctcaagcattttgggaaatatgaagagatcacctgattctgtgtaatgaaggataggaaaactggacagcctcggggatttgggtttgtgacatatgctgattcctctgtggtcgacaaagttatccaggacaatcacattataattggcaagcaggttagattgatatgtgcttcacatctttcgtgtgttagttgtgttgtgccttgcagcgcgataacattcaacgttttgtttgctctacaggttgaaattaagcggacgataccaagaggatccatgagctctaacgatttcaaaaccaagaagatatttgttggtggaattccttcttctgtggatgatggtaaacactcttccataatatgattttcttatttcagaatcatgtttttattaactaagtttctcatctggtgattggtgtttgtatagaaaagttcaaggagttctttatgcaatttggagagctgaaggaacatca

SEQ ID NO: 151612 - DNA, 438 bp, Arabidopsis thaliana landsberg; identical to SEQ ID NO: 70443

SEQ ID NO: 151613 - DNA, 1016 bp, Arabidopsis thaliana landsberg; identical to SEQ ID NO: 47640

SEQ ID NO: 151614 - DNA, 718 bp, Arabidopsis thaliana landsberg
caaaaaagccgctatcaagaatcatcttgataagggtggagatcccgagaaggtgaataatttgttagatccgcttagattctctcgaattcgattgttcgattgtgttcttctatccgattgatttgttgtcatgttagtctctcaatgttgaattttgatccgatctgagaaaaagtttgagtttttggcgattaatcaaaaattagggttttgatgatttagatgtgtcatgctttgataattgagtggttaaagttgggttctttgttaggttatgagtttgatttgttgtgttatgtgttgattgcagtttaaggagttagcacaagcttatgaagtgcttagtgacccggagaagcgtgagatttatgaccagtatggagaggatgcactcaaggaaggaatgggtggtggaggaggtggacatgatccatttgatattttctcatccttctttggtggaggcccctttggaggtgagtctccttggacactgtacactttatgatatcgcaattgagaattttcgtttgaaaatgtttctgtttttgaataggtaattccagccggcaaaggaggcagaggcgtggtgaggatgttgttcatcccttgaaggtatctcttgaggatgtgtaccttggtacaatgaagaagctttcactttctaggaatgctctctgctctaatgtgtaacgggttagtacattggactcgc

SEQ ID NO: 151615 - DNA, 883 bp, Arabidopsis thaliana landsberg
  unsure (1)..(883): unsure at all n locations
tatgctgataagagttatgttaacagatnaaaaggagatcgcagagtgagaaaccagagggatcttgccaatcccggcttaagatttcatgagaatgattgaacacaatgtggcgtcaaaggtattgctggttcttcccccaatcccactttgtcagcagataattgaattgttcatcacgttttcccaattatcacggttctgccttagatttctatggcaattttactaaaaggtttgcttctgtttttcctcaatggaagcctggaactccacatttcggcaaccacacagacaagtgggaggatggttcagtatcggagacatcaggcgtggtcgattcagacagaaggagttatatatcagatggaatgtctacaccgctgtcaatatcaagagcttatgttcattctcactctgacgatgatgatctggatgaagacttgcctaggcgttcggaagatctatcagaagaatattgcagagaagttcaatgcattgagactgaggaatcagtcacagtctataataacaagaaagacaagagagcagaacctgaaaacgttttaggctgtggtgaggatgctaatggtgaaacgagtgtaagccagaacgtcagggtgagaagttggaaccgcagagagactgtgtcaggcccgagcactccgcctgaaaacatagggacaggtttcctcggaagaccagagagtcacaagattgcgtttcctgatttagagttcggttctactgtatcgaggaatgattctatgtcttcttgcgggagcgattccacagggactcagagcatcagaacgccgttgggagaagaaagtggaattactagtatccggactttcgttaagggcttaagaggggctagcgt

SEQ ID NO: 151616 - DNA, 530 bp, Arabidopsis thaliana landsberg; identical to SEQ ID NO: 3942

SEQ ID NO: 151617 - DNA, 1363 bp, Arabidopsis thaliana landsberg
cagagagctcaaagccatggactttctcggttccacgacgggtagcggtacgttagcaatgttgttctcgttttcggaatctattttgcctctggattctaggtctttccttctgaaacctcttttcctgagatggctttctggtttcttacactcggttttgttgctggtcctgtttttctcatgggttcgtaagaaaattaggggggatagcggcgttacggagagtttgaaagataggagggattttgggtttaagtcagctctgttttgtagttcagctctgtctctgcttaatctcgtgttgatgtcgttgagtggtttctattggtacgagagtggctggttagataatgaacagctagtttcctcccttgggtttcttttgggaatggcttcttggggggttttgtcgatttgtttgcatcgctgcagagattgtgagcataaaaaggctccctttttacttaggctatggttggttttctatctagtggtctcttgctactctcttgtggtagattttgtgatgtacgagagacgtgaaaccgtacctgttcaccttctagtgttcgatatagtcgcttttattgctgctgtgtttctcggttacgtggctgtcctcaagaaagatagaagcaacagcaatggagttttggaagagcctctgttgaacggtggtgattctcgtgttggtggtgatgacagcgttgagttaaataaaaccaatgggagtggtgaggctactccttactcgagagctggcattctcagtcttttgactttctcatggatgagtccattaatagacattggaaacaagaaaacccttgatctagaagatgttccgcagcttcatgatactgacagcgtagtcgaaatagctcctaagtttttttatgcttgaatcaccagatgggggcgagagaggtgttttttaccacgttcaagcttataaaagccttgtattttacggctcattgggatattttagtgacagtctttttttgctttcatctacaccgctgcattatatgttgtgccaacactcattgatactttcgtgcaataccttaatggacgtttgcagtataaccattaaggatatgtgctactcattactttctttgctgctaacattgctgagtgcctttcacatagacattggttctttatgcttcataaagtttgctttaggatgatatcactctttgtttgtgatgaaatatgaaaagggtctgacccttttttgtcagtcaaagcaaggactcacacgtgtggatattttatatttcatgactgtggatgctgagaggattggtaatttcagtatgtacatgcttgacccctggattgtcttgtt

SEQ ID NO: 151618 - DNA, 498 bp, Arabidopsis thaliana landsberg
aaactaaggaaagatccaaaccttactgctgaagagatagttaggttgaagctgatggaagagattccgaccttcagcgaagtgttccaagagaacaaaggggtgattgaagaagcagataggttcttctctgctctggaactcaacaaagccaaggtagcatcgcttaaatacgaatacagcgacctgaaggaaaaactaggaagtatccaaatggaagtagacacaaactctgagacaatccgtcaaatcgatgaccaaatcgctcaacttcaagccagacggtctgaattgaagcggtacatcgggaccaaggagaaagagagggttgatctaagctatggtcaaaaaatggtagcgaactcaatcccgaaagtcgtacaggaagttcaatcagctaatttgaagaagcctgaatgggaatgcaagaaagacaatgcgcttaaacgtgaagcagagatcctctctaaattcactcctctcaaaggcttcttcctc

SEQ ID NO: 151619 - DNA, 424 bp, Arabidopsis thaliana landsberg
tgtatgtacatcccttttgaggaatttgcttatagatcattatgtgtagatgtatccttttactaatcgtttgtttttaaatagcttcatctacgaagactggtttatgccacacactgctgcaaggctgaagttcccttactattgggatgagcaatgcattcaagaatcacaaaaagacgagctttaaagcaaagtccgaggctaaaagcaagcacaacctttagatagtaaaattatagttgaggctttgtgacactacgtagatactggtaaattggcaaggattttacatgaatgttgttgttacaagaaagtaaataaatcttcaatctttgatgttcttaagtaagcgagtcttattggtcatgaaaatatgtaagtgtgcacatgattgcgataaatttatagagtttcactcact

SEQ ID NO: 151620 - DNA, 417 bp, Arabidopsis thaliana landsberg
gaattcgtcagtcaatccatatgaagcagcttggataggtcgttggactcagtcaggtagttaagtgaagtttcatgatcgtgagaccaatctgctctaagcagttgatgaggcctgcagatgaaaatcatggagtcgaggtcttgccgtttcctatgttcagggtttctcaaaagagagagactactactactactacgtactagtccgtctttccatgaagatgttggttcaagctcgagagctatggttaatagaatgccctggatgtatccgcaaggagagaacttcagttctagtaaccgtcttgacttcccaattcaagaaaaaacatactcaaaacttgctagagttgataagaccggtgaggatttacgcaacgggtgattctgttaactatacctaaaaaagagagtc

SEQ ID NO: 151621 - DNA, 1064 bp, Arabidopsis thaliana landsberg
cttactatctgctgatgtacattttcaggttgcaaaagaagcttcggatatggtttttgcagatgataatttcagtactattgtctgaggtgtagcagaaggtcggtccatttacaacaatatgaaagcttttatcaggtaacaaaaagcctttacactatatgacatcttgtaacatttttcctctgtaaattggactaatcttttggttttaaatgattctgttacaaggtatatgatatcatcaaacgttggagaagtaatctccatcttcttaaccgcggcattggggataccggaatgtatgataccggttcagcttctttgggttaatcttgtaacagatggtcctcctgctactgcgttaggcttcaatccagctgatattgatatcatgaagaaaccaccccgcaaaagtgatgattgtctcattgattcatgggttcttattcgatatctagtgattggttcttatgttggagttgcaactgttggaatctttgtcttgtggtacacacaagcttcattccttgggattagcctaatctcagatggacacacattggttagcttcactcagcttcagaactggtcagagtgttcttcgtggggaacgaacttcacggcgactccttacacagtcgcaggtggtcttaggaccatcgcgtttgagaacaatccttgcgattacttcactctagggaaagttaagccaatgacattatcactctctgttcttgtggctatcgaaatgttcaactcgctgaacgctttgtccgaggacaacagtctcttaacgatgccaccttggagaaacccttggctactagtggccatgactgtctcctttgcgctacactgtgtcatcctctatgttcctttcttagctaatgtgttttgggattgtgcctttgagtttcagggaatggtttgtggttattcttgtttccttccctgtgattctaatcgatgaagctctcaagttcatagggagatgcagaaggacaagaatccagaataagatcaacacaacgtaaaattttgatcaccacaaaagacaaaag

SEQ ID NO: 151622 - DNA, 512 bp, Arabidopsis thaliana landsberg
gtaaaacccaagtaagcaaattagtgacgtggtctcaagctttatttttgttgtagcagactgaccatggagaagaagagttatgtagtgtgtatgaaccaacgaatcatctgtacataggagatgtgtttatggtgagtagcgaagaaatcataaggccaaatttatcgatccgagaaggaataggtcagtcttgagctgtttacgtttcatcatctacttctttttatgagaaacatcagattcaaatgttgtttgttgtttcgatgcaacagagatcatagtatcggtggggatgacaatgccgcaagttatatctcatgtggacaggacaacaaacagaactcctcaccaacacagtctcagggttcctctcaacagactttagttaatagctgtatggcctctataccgtgtaaagatagtttacgcgtcgtgctcaatcgtgaattattttaacatatgtagtaacaaacattcacgaatttatctactactcaaattcagtccca

SEQ ID NO: 151623 - DNA, 533 bp, Arabidopsis thaliana landsberg
atatgaccaatctcttgaaagttactgttgtgtgaatgacctatttaattgttgtatattcttattgttcacaggtacattccccttaatcggctaaatgaatccattcgcattaaggaaaagttggaaccaggatgttctgtttcttctctgtcaacgggaaaaggagttgaaagagctaatagtagtcttatccgatgcaagctaggctcaactgaagcagttgtgaaggttttgtttttaccttttgtaatctctatctgtttcacgaatgagtaaatttactgaatagtttcttatttcctcagatgcgcacattagaggtttctggagcttccttagatgacattaggacttttgagtatacatgcttaggagaagtacggattttaggagctttgaaacatgactgcattgtggagttatatggacatgatatatcgtccaagtggataacctcagaaaatggaaatgaacatcgagtattgcaatcttctattctgatggaacacatcaaaggaggatctctaaag

SEQ ID NO: 151624 - DNA, 532 bp, Arabidopsis thaliana landsberg
atgaaccgaggattacagatgaaatttcagaggatcaccctcgcaagtaagtgaagataacaactaaacaaatcgaaactttattttgtttttacacactctgttctgttcttcttcatgtgcaggaatactattgggcctgaaacccaaactcctgcccagcccacaaaagctacagacacagtttaatctctctgttcttcgttcacacgacgaggatgaagaaacaaaatttccgctgattttatattatctcaccgttaataattatcgaagtcttgaactttgacagagcttgtaattcgaaacttttcaaaatggttactttgtgttgtgttgtgttgtgtaaactcttaaaataaagaataaatgaatgttattttatttttagtcttcttcaagttttggtctgcgatcgtgaaatttacgcagagagagatcagaatcgaagaaaacattgcaatataaaagagtcaccttcgagttcgtgtctcactccgataaagcaatgagtctattcgggcttggaagg

SEQ ID NO: 151625 - DNA, 923 bp, Arabidopsis thaliana landsberg
tgctttattacataatgagcactcctattaagagcaccctttgcaagttagctttgttaatggtgatgacgcatataggaattcaaggttcaagctcattccctacatatccaaggttggcgtaaaagattacctctatttagttttattatttgtctgtccaatgcattcatacctgacttttggtttggcgatattttcagggctcttggatagttaagcaaagtgtgggaaagaaagcatgccttattggtcaagccctggagatcaactacttcaggggaaagaactatattgaggtaacacagtaaggattgatgctagatcctaacaggaattagtatctatctaccacaacagtgtgacttttcacgtttgagccacgcattgttagaaaatcttatttttttgtacacctgttattttcagctgggcgttgatattgggtcatcaactgttgcaagaggagttgtgagtcttgttcttggttacctcaacaaactcgtgattgaaatggccttcttaatacaggtaaactaattaccaatctttcctggtttaaatctaagtcaacttcggtgggtattctggttacatattgaagcattggatttgagtgagcaatttcttctttgtgcaggcgaataccgaagaggagctcccagaatatcttcttggaacatgtcggtttaaccatctcgacgcttccaaagcaatttcaattattccatgaaagaccaagcaaagatcaaaagttcagataaactattctttgaaattctattgaatgtgtggtagacacagttaggcgcttcttatgcaacaactccattgataagatcttggtgatactgctgaagtcctttgtatagacctatagacttagttcttttatatattaaacacagatttatttgttacaa

SEQ ID NO: 151626 - DNA, 102 bp, Arabidopsis thaliana landsberg
ggtagagccttatcgaatgccgtgggtaaccttgggcttaatagcgcttatggtgatgctttgaacaggcttggttttgatttgcaaagcgtggctagtcag

SEQ ID NO: 151627 - DNA, 743 bp, Arabidopsis thaliana landsberg
actcgatcgtttcttcgatgcttctggtaaatctccttctcatcgagatcttctctgcgatgatcatgctctccaattacattcaaaacctgttgaagaatctaattgtggtttcggagaatttcacaatgatttggttaatcgtggttgttgcgtagagaagataagttcgtcactatgtgctccgattgagtctgactttgggaatttagattatccaattggagatgaaggtcagatttacaatggtcttaagtttcctcgatcgatcttcgtctttgaagaagagaaagtaggatctgtaaatttgaatgattctcaggaagaaacagaggagaagaaagtttcttctgtagtcgaaattgttccccaatctcatgagaaacttgaagatgatgatgttgatgaggagttttcatgctatgtatcaagcttcgattgtaagaacaaagaaattgcaacagagaaggaagaagaaaacagagtggatctacctatagaggtggaaactgcagaatcagctccgaaaaacctcgagttctatattgatgaagaagactgtcatttgattccagttgaattctataaaccgagtgaagaagttcgagagatttccgacattaacggagattttatcctcgatttcggcgttgagcatgatttcacggcggcggcggagacggaggaaatctccgactttgcttcgccgggtgaatcgaaaccggaggatgcagagacgaatc

SEQ ID NO: 151628 - DNA, 1054 bp, Arabidopsis thaliana landsberg
atatctatcgccaggtgtcaaattacaggagcttctgagaaggataaatctcggaggttcccggtctgaacgacgtagagacgaagcgaaacaaaagtactataagggagagaagtatcaaaattctcatcggaaaaagacagatctacaaattttgagagacaagccatgactaaggtgaaagatgagccacgcgcttccgttgaaggtggatgtggtgttgccgacggtgacggcggcgcggctgagatcggcggtaccggatctgttgagaaatcgattaacgaagttaggtatgagctgtgtttactgttgatttcacatgtttttatctgtttctctctttgctttgagtttagtacttaaaattgtatcttgtttctgataaggaagatcagcatttcgatctggttactttagtttctatttagggaaagtcatatttctcaatggaaccaatttgttttttggctggaacaattggattcttaacaaacttgtgttcttcaaagtcctttaatgcatacataagttttcatgtgaatttgattaatagaacttcaccgttaacatgtgaaattggagagactggattcatatgtggagagttttcttaatgttgcatcaataagtccatctttatagtgtcggtcacaagtttaatagatcttctgctattgaaggtccacggagattcaaaccgctgagccaacggttcctccaaatcaacttactattttctttggtggaagtgttactgtgtttgatggacttccatcagaaaaggttggtccattagagctttgttgttgtcagaaaaacttcagaattttgttctcactgtgatctatgcctataggttcaagaaatccttcgtattgctgctaaagcaatggagacaaagaattctacaagcatcagtcctgtctcatcgccagcactgaacagagctccttctttatcaagcacatctaatgtggcatccccagctgcgcagccatttcctattcagaaaatctcgttttgcagatccacggctggtaagtattcgatt

SEQ ID NO: 151629 - DNA, 542 bp, Arabidopsis thaliana landsberg
cttaaggacaagaagaggcaaatgtttcttaaaacaacagcagagggccggctacgagctagacaaaagcgtaatgaggaggaactcgaaaaagagaaaagaaatcaattagaggaggaaagacgtcggtatgtatgccaattcataagtcaatgttagaaagggaaaaagggagcaaatattaatcctttgtttttgtctgttttctggttgtagtgagaacccagagtcttacttagaggagttgcaagctcagtacaaggaagtgttggagagagttgagcagaagaagcgtctgaaaacaaacgggtccagtaacgggaataacaagtctggaggtgttgggcgaggcgagcgactcagtgctgcacagagggagagaatgcgtctgctgacgacagcagcctttgatagagggaaaggcgaggatacgtttggttctagagatgaagattggcagctctacaaacttataagcaaggataatgacgatgatgacgaacaacctgattagacaggcagagttggctcgtttgtcatcc

SEQ ID NO: 151630 - DNA, 587 bp, Arabidopsis thaliana landsberg; identical to SEQ ID NO: 54042

SEQ ID NO: 151631 - DNA, 2148 bp, Arabidopsis thaliana landsberg
  unsure (1)..(2148): unsure at all n locations
agttaactactcaagtccctcccttttcggcgtcgctattctcggtctcattctgtctcccgtaagtcctaactaagctttctctcttcagtcttcagcctccgcccgttattgttgaaaagttttagcctttttgttaattactaatttactactcttgttgtgaatttgctgctactgttgaagccatggaagctcggattttgcagtcttcttcttcctgttattcgtctctttacactgtcaatcgatcccggttctcttctccgaaacctttctccgtcagctttgctcagacgacgagaacaaggactcgtgtattatccatgtcgaagaaagatggtcgcactgataaagatgatgacactgatagtctcaattacaaagattctggtgttgatatcgatgctggtgctgagcttgttaaacgaatcgcaaagatggctcctggaattggtggatttggtggtctctttccattaggtaaatatatatggaaaactgcaaaaatttcacctgaatgttgaaacttttcgtcttctaatgaatgagtgtgtgtgagcaggtgatagttatcttgtagctggtacggatggtgtagggactaaattgaaattggcatttgaaactggaattcatgacaccattggaatcgacttggtatagcaaattctcttttgtgtgttttgtgatactagcccataaactcatggtttagcttattgttataggttgctatgagtgtgaatgatattattacttctggtgcaaagcctctgtcttttccctcattactttgctcctagtcgtctttatgtagaccttgttgaaaaggtaccatggtttcatcatctctttcccctttttaatatgagattgctttaaggactttatattgatgtatgctttgttttcaggtcattaaagggattgttgaaggttgtcggcaatcggaatgtgctctcttagggggagaggtatgtgttacggttttgacaatgtagtttacgcatctttccatgattgtgtatcaatttggttttgttttggtttttttagactgcagagatgcctgacttttatgcagagggcgagtacgatctaagtgggtttgcagtaggcatagtaaagaaaacttcagttatcaacggaaaaaacattgtggccggtgatgttcttattggcctcccgtctagtggtgttcattccaatggtttttctctagtaagaaggtaaagagttagcgatagtcgaggttttaagcttctgatttcatggcttttaaccacattccaattgttgcagggtattggctcgaagcaatctttcgctgaatgatgcgcttccaggtggatcaagtacccttggtgatgctctaatggcacccactgtcatttacgtgaaacaggttggttttcttgtcaacaaatattcattccatcatcacatttgtaacaactctatgactttctctctctctgttattcgaaggtacttgatatgatagaaaaaggaggagtgaaaggtttagctcatatcacaggcggaggtttcacagacaacattccccgagtcttcccggacggtttgggtgctgttattcacaccgatacttgggaacttccaccgttgttcaagtggattcaacaggtaatgaatgaggagagaatcataaacagaacgattacgtttatacttctagaatgtttgaatgttttttggtttattgtatagactgggagaatagaagacagtgagatgagaaggacgtttaacctggggatagggatggttatggtggttagtccagaggcagcttcacgaatactagaagaannnnnnnnnnnnnnnnnnnnnnngtatcgcgtaggagaggttgtcaccggtgaaggctaagctatcagtagagtgttgtgtgttcttttttcttctgtgtttggtttccccccgttttaagaattaatccttttgtatacggttttataaggttacaaaccaagatgaggcattttttaaacatcgtgttattatttgatctaattttataaaaacagccaatttatttggcctggtttattcttgtagcacaaacagatgttggaggatgcttattaacgttttaatatataaacatgttgtttgcctaga

SEQ ID NO: 151632 - DNA, 1489 bp, Arabidopsis thaliana landsberg
gtataacaatcttttgtgttagtgatgaagttttgattgtctgatcatgttgatactgacaatgattacattcacacgagatcttgaatgagttgtgttttgattctcactgtcacagatctgtcttcttagtctagatctataatgtagttacgtgtaatacaacactaagatcttaagatttatattttgtgaatctgtttgaccggttctgttattatggatctgaagtgtgtgtgacttggatctgaagtatgtgactttgatggttatgtaaagtgaatctgattcgtgtttttcgcaggatggggtacgaacgaggacttgatcatatcaatcttggctcacagaagtgctgaacagaggaaagtcatcaggcaagcataccacgaaacctacggcgaagaccttctcaagactcttgacaaggagctctctaacgacttcgaggttcggttttcggacttttaagtatcgacttttaaacatcttgtgtgaagtcattgtattctaattggcttttggtcatggacagagagctatcttgttgtggactcttgaacccggtgagcgtgatgctttattggctaatgaagctacaaaaagatggacttcaagcaaccaagtgcttatggaagtagcttgcacaaggacatcaacgcagctgcttcacgcgaggcaagcttaccatgctcgctacaagaagtctcttgaagaggacgtggctcaccacactaccggtgacttcagaaagcttttggtctctcttgttacctcatacaggtacgaaggagatgaagtgaacatgacattggctaagcaagaagctaagctggtccatgagaaaatcaaggacaagcactacaatgatgaggatgttattagaatcttgtccacaagaagcaaagctcagatcaatgctacttttaaccgttaccaagatgatcatggcgaggaaattctcaagagtcttgaggaaggagatgatgatgacaagttccttgcacttttgaggtcaaccattcagtgcttgacaagaccagagctttactttgtcgatgttcttcgttcagcaatttattttgctggaactgatgaaggagcacggaggggaattgtgaccacaagagctgaaattgacttgaaggccattggagaggagtaccaccgcaggaacagcattcctttggagaaagctattaccaaagacactcgtggagatgacgagaagatgctggacgcacttctcggtgaagatgatgcttaatcaatcaatcctccacagagaaacataagctgctttacaggttctgttatctattatctccctctctctctctttgatgagtttcaaatcgtttgattttgtttctacaaaaaccttgtttgtttctgttgtgtgttttgagttcctaaataatgcaaaagagagagacagagagaaccagtgtggtctcttaagttatatatatatgaagagcattggcct

SEQ ID NO: 151633 - DNA, 1705 bp, Arabidopsis thaliana landsberg
gaaacacctagttaacacacgcgcttccacacgcgccaccgcctctgctctcttcccttcacggtatcaaacactatttctctttctactttccttcttccaaattatttgatgtttcttaacctaagtaagcaacaaataaagagagaaaatactcatttttctgtggaaacaataattaattcccatgaaatggattagcctatagtaggaccttgattataatgaaactgatatgaacatatatatctgaaatttttaactatcactggctcgttggtaaaacaattttgtattttccacttgattaagtacaagatgatattattcccagatctagaaagttcagaaatcagggtttcttctaggactacggattcagatcagttaagttatataatatttgtgtattttatgtattcaatgtcatatatttgctgaattcaaacgcaatggatctgaaaagaaccctttgatgtttgcaaaagtgtattttagttttaagtctgaaaaaacttgtttttgaaaatattaatatagtttcttgaagataaatatattcgtacagaaagcataagcaatgtactagtgtacagtgcacaaaaaggcatatgccattaggcgtaaatggataataccaaaacaaatccagttcaggttttgacacgtggtagtttagtaagtttacatacatacccctgtcgaaaactcgcaggtaagagtgttattagcttgacccaaaactcaaatctcaaaactgtaaccaaatcatgatttttcatcttcaatatgaagccacatttagttacatgctgtgtagtccatcttttcgtaacagtgtaacacattatttttcatttatgatatgagtagacatgaggtggctgattttctcatagcgttaatttaagataagaatttggaccgacagctttgaagatatagaaatgttgatggagctgactatgacatatttggtgttacttgattttatttttaatttttaaagaaaaggcatttacggggtcactttttatgaaaaaccaaactttccatctttaataatatactaagacctgataaagaaaaaatctatataaagaccatcttcgtaataattcattctttttggggttgttgtgggtttgtggtggcaatgtctcacctacctagcaacaatctcccacccaacaggaaatttgtttttatttccttgatatgattaataaaattgataccgaaattatcatattaataaattgaggtcggttagatataaaattcgtctgaaatattctttttatttccttcctttttaacagtcggagtggacattcctcggcgtatgacaagaacgtggaggatgaattgcatgcgagtgcagtacctgacgaagttataaagccagattctgataaatattggtctcctcaccccaaaacaggagtcttcggtccctctacgactgagcacagcgccaccgccgagggtgcacaccaggacacagcagtgctggaggagaccgcctggtttcgcccaacaagtctcgaggattcggacaagactcaccatgtttgagtctttctttctctctgctttttactggcgtaatgttgtaataaagttctacgtaaacaaactgtaatgtcaaatagcgtcctcctgctatgtttgaacgcttatgtttaagtgattgattacgttg

SEQ ID NO: 151634 - DNA, 1020 bp, Arabidopsis thaliana landsberg
cggaaccgtgaggaagaagatataggtatgtttttctagttatctttctttttaatatctcgagataatccttcaccatgtgcaaatccttttttcagatataccttcacttccacaagatatccttattcacatcttcagtttcctcgagatatcgtccttagtttcctcagctcaagtgtctcggtacttcctcctctatatttccacattacagagtcttttgcatcttcttttttttttccttctacttatctgttttgtttcatctgtttgtagctcttggaaccaagcaacgcatgagaactctctgtggcaatcacaatttgaccttcacttcaatcacaaagtcttgattcgtatgcagtccgatattgactggagagaagcctttaagaaagcatacatcggttagagcttttgtccacggttttatcttttcccctttcagaaaccgctgctttctctattatgtaatttctaaagtagagtttgtgtaaccgtgcagcggctaattcatcggaggcattgagatctggccggggatactgcagttactgtgattctattgtttggcacgaaaacttgagatgtctgaacaaacaatgtcggttgaaatcaggcaacaagccactcgacctcataacaactcaccaggtaagctattcttgcttcaaatgtttgtctcgttttatatatacatgctaaacaagctatttatctgcctttggtggttttgttacctcacaggttgtcaactatttgctggggatagagagttctgatgatgaaagcgaatcagacgatgaagcctttcctggacgactatggaaactttcttacgtgcctgattacttgtaaatcactaaagagaaatatatggccctatatgggcttgtggtacctcattggaccatttggccttactaagaatgtttgtgtagtttcaagcctacttgattagctttttgtttgcggatacgtatggtaatattgtgttttatctaaaagaagtttcta

SEQ ID NO: 151635 - DNA, 751 bp, Arabidopsis thaliana landsberg
aaagaaagagaaaaagattaatcatcatcaatctaaagatttaggaatctacaatttcccagtagacagatttcacttttgcgtcttcttcttattccatttgatctaagtttctcgaaataggtacaaagttcgagtctttttcttgtaaccgcgtgaaaccaccaagaaacctatagtaagagtttctgcaaatgtgaattgaagacagctcatcactctgtcaaacttctacagtattaagttaacgaagcaggtacagccaaactaaaataacgcggagttatgggaatcatcgacggttctttgcttcggcggttgatttgtctctgtctctggtgtcttctcggtgaaggagtgacggtggttacggcggaggatgagaagaaagtggtacataaacagcttaatcaaactccgacttgggctgttgctgctgtttgtactttcttcatcgttgtttctgttcttcttgaaaaacttcttcacaaagttggaaaggtgtgttcttttttttctgggtttttgctaaatctttgtacttttgttgtttgtgttgaatttgagggtatattggagatgggttctgtttgatttgtgaaaagggactgtctttgtctgagattttgtgtttatgttaatgtttgaattggcaaatttgtcttgaagtgaagaagttgttcttgattaataggttctatgggatcggcacaagacagctcttcttggcgctttggagaagatcaaaaag

SEQ ID NO: 151636 - DNA, 954 bp, Arabidopsis thaliana landsberg
caacaatggcttcgtcatctacaagtatctctctccttctcttcgtctctttcattcttcttctcgttaactcgcgtgcagagaatgcgtccagtggatcggatctcgacgaagaattggctttcctcgccgcggaggaatccaaggaacaaagccacggcggcggttcgtaccacgaggaggagcacgatcatcagcaccgagacttcgagaattacgatgatctcgagcaaggaggcggcgagtttcatcacggcgatcacggttacgaggaggagccgttaccaccagtcgacgagaaagacgtggcggttctgaccaaggacaatttcaccgagttcgtcggcaacaatagcttcgcgatggtggagttttacgctccgtggtgcggcgcttgtcaggctttgactccggagtacgccgcggctgcgacggagttgaaaggccatgcggcgctcgcgaagatcgacgcgacggaggaaggggatttggctcagaagtacgagattcagggcttccccaccgttttcttgtttgtcgacggagaaatgcgcaagacctacgaaggtgaaagaacaaagtaagtgtacaatgtttctttctccaactgttaggattgagatatgaacatagctcatcaggtttagctttggatcttgagagattgtttgatttggaatccgagaagaattttttaggattattcaacctttatgaaatggtacaatagagagaggcatgtcacatgtgatctttgattttattctctctgctttggtttctcatctgttagttttccatacgaattattggtcaaaaagtacgtttcaccattactggtgtcctcattgcagggatggtattgtgacttggctgaagaagaaggccagtcctagcatccacaacatcactactaaagaggaggctgaacgtgttttgtccgctgaacactaa

SEQ ID NO: 151637 - DNA, 293 bp, Arabidopsis thaliana landsberg
gtgatgcgtttagacagagagaagaagaagaagattccctagacaccaaaagaacgaatcgtggatcttccgcccactcgcttcctcagatcgcgtgaacaccactcaccaatttttcttctctttctctcttcttcttctctatctccttttcgcagatcgataccccaactcgcacccgattggcgcgtgttgtcttcttcttcttcctcctctcgacgacgaagagattaaaaagagacggccttttctcagtttctgctccgattcgtatatcttctgtttcgtacgag

SEQ ID NO: 151638 - DNA, 941 bp, Arabidopsis thaliana landsberg
tttggcaatggcagcacaccgttgaaatcaatttttctgtctgtggttatgacgtaagcctttgattaactctccgatctccactatgaatggtatagggagtctatgatatacatgttcagaatgattgtgttagttggttttaattggtcatatgagtcggtagtatatatacatgtatatgagtaaattaacactgtgtttatagaggcacatggtttgcctcaatctaaacttttggctgtagtgcattcatagatttccctacgtttggctgttagctcggtgaatggtatgctttgtgtttcatataattgttaatttactcatgtattcgcattagctcgtcagattattataaatgcaggatttactaataggtgacttaacatcaaaaagaaacgctgttttatcactcttaagcagtaaacatgcaacattgttaaataaaatgttgaaattgatttgaattgcaggtatacaagccaacacttgtcagatttgagaatgccgggggattggcggcaaattctccagctgaagtgacgaaaggtactccttgaaagcagatagattacagtgtagctgtgtcatgtagctctcagctcttctgagatgaatatctgccttttccccttaagtccagtcatttcccccagaaataatacgttaacaatttgtgactgctcctacagatgtagatgttcttgtaattatggtaacaaacgaggttcaggctgaggatgtcttgtatggacatcttggagcggttgaaggtatatctctatatcctagattttagcactggaggttagagctgactttcctatattttctttcaaatatttcagctataccatctggagcaactgttgtacttgcgtccacagtatctcccgcgtttgttagccaacttaaaaggcgtctagaaagtaagtttt

SEQ ID NO: 151639 - DNA, 2308 bp, Arabidopsis thaliana landsberg
  unsure (1)..(2308): unsure at all n locations
aagatgggttttctctttctattctgttatcttcttgcgtttcttggctattctccggtggatgcggcggtgaagaagtaccaattcgatgtaggtgttcgataactcggaatacaaattatactggtttaactaaaccggtttatgtaaacccaaaatatgtaggtttgttgtattaacgtttgaaatttggaacaggttcaagtgaagaacataagccggatatgcaatgctaaaccgattgtcacggttaatggaatgttccctggaccgacggtttacgcaagagaaggtgatcgagtcatcatcaacgtaaccaaccatgtacaatacaacatgtccatccattggtaaagcatctatttcctatgtcttaaaccggctcaaccggtttaatcattctttctgaaccaaaatataacggtttgtttaacaggcatgggcttaaacagtaccggaacggttgggcagatggtccagcatacataactcagtgtccgatccaaacaggacagagttacctttatgatttcaatgtgaccggacaacgcgggaccctctggtggcacgcacacatcctctggctacgagccaccgtctacggagctattgttatcttgcctgcaccgggaaaaccgtatccattcccacagccataccaagaatctaacataatcctcggttagtgaaaataaaacaaaaccggtcggtttggtcccatccttaattttttctttttttcattgccttggttttttatttgactgtaggagaatggtggaacaaagacgttgagactgcggttaaccaagccaaccaattgggtgcaccacctccgatgtcagatgctcataccattaacggaaaacctggaccgctatttccatgttccgagaaacgtaaaagttctaaacctttttaaaccgtatgttatcggatcggaccggattctcggatatcattaaccattttttcgtatatatattttcagacacgttcgttatagaggccgaagcgggtaaaacatatcttctaaggattatcaacgcagctttaaacgacgagctattcttcgggattgcgggacacaacatgacggtggtggaaatcgatgcggtctacactaaaccattcacaaccaaagccattttactaggaccaggtcaaaccactaatgttctagtcaaaactgaccgctcaccaaaccgctacttcatggcagctagtccgtttatggacgctcctgtatccgtagacaacaaaaccgtaaccgcgattcttcaatacaaaggcgtaccaaacacggtcttaccaatcttaccaaaacttcctttgcctaacgacacatcatttgctttggactataacggaaagctcaagagcctcaacacaccaaattttccggcgcttgttccattaaaagtcgacaggcgattgttttacacaatcgggctagggattaacgcgtgcccgacttgtgtgaacgggacaaatcttgcagcttctataaacaatatcacattcattatgcccaaaactgcactcttgaaagcacattactccaacatctcgggtgttttcaggactgatttcccagaccgacccccnnnnnnnnnnnnnnnnnnnnnnnnnnnnctcacggctaaccttggaacatcaacggggacaagacttagccgagttaagttcaatactacaattgagctcgtcttgcaagacaccaatctcctaaccagttgagtcacaccctttccatcttcatggctacaatttctttgtcgttggaaccggtgttggaaactttgatcccaagaaagatcctgctaagttcaatctcgttgacccgcctgagagaaacaccgttggagtacctaccggtggttgggctgccatcagattcagggctgataatccaggtataaatcaatctctcaatgcacatatatgattatgatgatgaccatatgtgataagtagatcaactgatcaatgcatgtgttgttgcaggtgtttggtttatgcactgtcacttggaagtccatacaatgtggggtttgaagatggctttcgtcgtcgagaacggggaaacacctgagctttccgttctaccaccgcctaaagactatccgtcttgttaagaatctaagatgggaatactactctgattcttcgtccttatttgttaagtttcgctgatgatattctttgttgattgtatttcccttctgttgatttgtgtctgagattgtttcctatggggctgcacaacacaatacaccccgaaattgtataagaaatgaaattaatg

SEQ ID NO: 151640 - DNA, 843 bp, Arabidopsis thaliana landsberg
ccgtacctccttctacacgttggtgacattctgctcaccacatcttcaatggaaaggagatccgcccctgagttcaaccatcctcttccaacgaattattactagtctcagctcggagtttgaaatggcggatcaaggtcgtcttcatcattttctcgggattactgtcaacaaagacgcttcgggtttgtttcttcaccaacaactatgttgccgatatgaccaattgcaactcgtgtcttactccagttgacatgtaacaaaaacttgccacaaataatggtccctcggtctccgatgatcggagtccgatcccagagtctatcgaagtcttgcaggagctctacagtatttaactttcacttgcctgaatatctcatttgtcgttcaacaggtttgtttaaccttatatgatccccgagaatctcatttcactgctttgaagcgcattctccgatacataaacggaaccattacacatggtgttcacatgactcgctctaagaatctctgtcttgctgcctattcggatgctgattgggttgggtgccctaatgcttgacgctccacatatacaaaaagagtttggtaatcaaaaagagtgattagatcggcaagaaaatgtcttgaattcagtcgcagataaatcaagccgtgacattacatgttgaatagtaatcaagccgtgacaatacaaataataagaagaaggacgtagaagaaacaataaaagaatgaattaagtaagaatcattttgaactttcaccaaaaatttgtgacccctttatctgtctttagctctcagaagaaacatgaacaattagctccgagagattcagtct

SEQ ID NO: 151641 - DNA, 227 bp, Arabidopsis thaliana landsberg
gagctgcaaccttgttgtctccattgatgggctttcttttgagttgggcattcgctaataactggtctctgaaacttcgagtaatgggtcgattaatcggaggttgagcctttcctccttgaactccgggaacagaaacaagatttccgatgtcaccgaaggcacgccgattcatcacagcaccgtttttgttctgaatcttcaaaccatcaacgagaggagcacct

SEQ ID NO: 151642 - DNA, 2640 bp, Arabidopsis thaliana landsberg
tacccgacgagctatggagaaagatcctagagattggcgtaaagtcttcgactttctcgtacaaagatctttgctgcatctctatctcctctcgccgtctcttccgattgtcctgcgatgattccctctgggatcttctgctcgtccatgatttccctaaccacatcgtctctgcttcttcttcttctgaatctcccaccaagtttatctacatgactaggtaaccttgtttgattgaaatttgtgctttctgagatttcttctgttgttagtgtgagtatttaagctcctatggatgtggttgataggtttgagagggagaaggagaggaaattagctgcccatagaagagctttactcaggaaggagagtgaaatttctgaatggggccggaggattcgtgaattggaggcacgattgtccgacgaggctgagagactacagtcttcttctctgcaattttcagatttgctgaaagtgaggtagtccccaacctggtgaacattttgtcagatttcagaaagtttcgttttttaaagtcgttatagctctctgtctatggctacgaatagaaattataaaggagattgcttgttcagttgtgacagtttagaaagatgattctttgttgatcaagtgaaatgagattggtcctactgttcttgcctcatgcatccttctcatgtaattttttaatgtctttctcaggcaagcatcagtagctttgaacgtttggcagccggaggtagtacgtggtagacaaaagcaaatggttgagcaaaacgctgttcctgttgagggtcgattgcgtgcacttgagatggagatgaagttatgcaagcagcaaatcatgggtttgaatagggcacttgtgagtcttagttagggaattccaatcatgttccacacttccactggttgactttttaggtctcttaaattgttatctccgtaattccagagggaggtaaaacaccgatatgacatagcaataaaagagctagaatccatgaagtatcatcctttacgagattacaagtcgatacgtaatggagaccaaggaagtaatggcaagacgaaaaagttgaaaactagcatcaactatagtggagaccaagtaagtaatggcaagaggaggaagttgaatacaagcattgattgtaagtttatgaacatttctcacttttcttcatgtagtagtgttaccgaaaaattctattcttactctcgaaaaattatacatgagtatattcctgaaaatctgcttgttctttgaagtgtgagacaatgcaatgtagaagagttttatgccgatatggacttgtccgaaactatgacgtgggatgtttaatgtttgaagttatagatttacattgttgatctttgttatcttagttgtgttatcgattgtgggtttttaatatacttatgaacacttgttatcttgattccgcaaaagcagttccagcaaaacccagaaacacggagaagctgttccagtcagaatcagaatgatggttggctgttccagtcagaatcagtatgatggttggctgctccattccacagagagattgaatacttgagagttgtcgtcgttgtattgcttgtaatatttccaattagatttgcagaagaaagctgaaattttgtcacataatgtggtcgatatagaattctgtaagtttggaatatcatgaataaagatgtatttgtttaaaaggtataaaactccttggttctttggcatgtctgggtcaaatcaagactctgttctgctttactgttcccattggacctttttttgtactcggattttccagttttggtttatagttttttactagtcttttcatgaatgtgatgatgatatggaagaatgctcctaataaggaatggtttcatgatcatcattgaactctagagaaaacgattatagatactaactcatggctaaatggtttcttaatctggttttcgttgcattgaatcatagtcggttcggaatctcccgctcgaaaactgcctggaatctagatggaggatttacggatatagacatctgttgtcaatcgggtaattatgtttttactattaaaacaaaagttaccctattagccgcgtacagaaattcttcagcgtgtgggtcccgatggcgacgtgtcacaatttaccttttgcttaatcttaattggataattttaacaaaaaggtcaaaacagtggcatagtcgtaaatcctgtaaatttggtccctcccttttttaactcgccggctaagtttccgtcactcccaccacttttttgattgaccaaaggaagaagaagaagaagaagaagaatctgaagagagcgatgaagcatattttcaagaagctacacagaggtgggaatcaagagcagcagaatcgaaccaacgatgcagctcctccatcggatcaaaatcggattcacgtttctgctaatcctcctcaagcaaccccttcgtcagtcactgagacgcttccggtggccggagctacttcttctatggcctctcctgctccaaccgctgcttcgaaccgtgcggattacatgtcttctgaggaggagtatcaagtgcagttagccctagcgatcagtgcttcgaattcgcagtcca

SEQ ID NO: 151643 - DNA, 996 bp, Arabidopsis thaliana landsberg
catctttgacggtttatgtccctctagttgctgggacaatagcacgctccttggcttgtatctcttgttaccctgttgagttagcaaggacacggatgcaggtaactctttaaggattttcgccctcattcattgtaatggtgtggagatatggacacagaaccaatggatatcgattcctgtgttttactaacaggcatttaagggaacgcaaagagatgtgaaactgcctggcgtttggaagacattagttgacgtcgtcaacccagtgaagggctcaaataatggatacaggatgttatggactggtcttggttctcaacttgcaagggatgttccattctctgcaatctgctggtcgatacttgagcctgtgagttaatctgtctatgaaaaacacatccatattcatccattgtgtcctcacgattgtttcattgtgactttagacccggagaagcattcagtcggccatgggtgaagaaccaagggcaggtagtataataggtgcaaacttcgctgctggttttgttgcgggtgcagttgctgcagcagctacttgccctctagatgttgcaaagactaggcgtcaaatagaggtaaacatacctttttcacttcatctttcataattccactgtgttgctctacaaactagaattcatcgccagcttgcattaagtaagttttggatcttaaaccaagtaacagttaaatttgtttgaattatgcagaagaacacagatagagccatgacaatgaccacaagacaaaccttggcagagatttggaggtatgagttagagatccattagacaattttcgtgtttccaaacttaaccatcccggtcgggtttttggtatagggacggagggatgagagggatgtttagtggagcaggggctagagtgggactagcaggaccatctgtagccattgtggtatcgttttacgaagtggtcaagtacggactgcacaacttccaccaacagtaa

SEQ ID NO: 151644 - DNA, 1489 bp, Arabidopsis thaliana landsberg
caaaatccaattctctctctctccctccagattcaaacgatccgatccaaaacttttgagatccgagaagatgtctacgttcagcggcgatgaaactgctccgttcttcggcttccttggcgccgccgccgctcttgtcttctcctgtaagcaattttgcttctctctcatttcgcatctgactcaattctcttccaattcgtatcattccctttgatctgatccagatgattgcttctagagattttttatgacaatcgttggcctaattgattgatgtattagtgttcttagatcagaatctggctttaggtattgatttgtgattgtgattgggtcgtaaattgagatgttgttactggattttggtttttaggtatgggagctgcttatggaacagcaaagagtggtgttggtgtggcttcaatgggagtgatgagacctgagttggtgatgaagtctattgtccctgtggttatggctggtgttttgggtatttatggacttattattgctgttatcatcagtaccggtatcaatcctaaggctaagtcttactacctatttgacggatacgctcacctttcgtctggtcttgcttgtggtcttgctggactctcagctggtatggctattggaattgtcggtgatgcgggtgttaggtttgttcctcacagagaatgtttgaatgaaaaacgttaacgtcatgtgtaatgtgtatcttgacttgtttttggttttgcgattctctcagggcaaatgctcagcagcctaagctattcgttgggatgattcttatccttatctttgcggaagcgctcgctctatacggccttattgttggcatcattttatcttctcgagctggtcagtccagagcagaatgagagagcacaaacaaatgtaaaaaaattccaggtacttccttatcgatcaacttataagtgcggtatgtagtatcgggagccgatattttgtggattcttggtttgggaagcagatcttgccaccttgctttccttggttggtggttacttgagtgtaggatgttatttggttggtaataaaaagagagcttggcatttgttttgtattcttgtattgtctgcatttgtcttgatgaacttgaaaatattttgtttgtaaagaagtttgcttctgataccatctttgaatgttatgagattaatcttttgttccttccaatttggtcttaagctagcttttctactgaacaaaacattatattcggagggggttaagcaaagtaatgactatattaatcattcatagggttcctcctaagccagttatctccgaaatcctttactgcagctagatcttcttatggaatctaatcgttcttgtttttatagcgtcgcatcgaagcttcttcgtcttcgtatggaatcccttcctggtttcggctggttgatgaaaattgccaacgattggaactcggggaatgtggtggaaaaggaaacccacg

SEQ ID NO: 151645 - DNA, 590 bp, Arabidopsis thaliana landsberg
tatttgggggtgacgaaaagagcccgcctttgtgttctaatttttggtaccagaatttttgaaaatccccaaatttttttgtttctcttcttcataatcgttgaattagggttttacaatttcgagtttccccaaatctgaaatttgagttttcttttttcttgacttttcacgttttgattcgcctgttgtttgggtttgaaatggcgactgaaaccctagatgagaagacaccggaagtgaattctccggcgaaggaggaaattgatgttgttccgaaggaggagaaggaggtagagaaagaaaaagtggattcgccgagaattggcgaagcggaggaggagaagaaggaagatgaagaagagggtgaagcgaaagaaggagaattgggtgagaaagataaagaagacgatgtagaaagtgaggaggaagaagaagaagaagaaggaagtggaagtaagaaatcgtcggagaaggaaacggtgactccgactagtgagagaccaacgagggagagaaagaaggttgagcgtttctcgttgtcgactcctatgcgggctcccccgagcaagtccgtttcaattgaaaag

SEQ ID NO: 151646 - DNA, 401 bp, Arabidopsis thaliana landsberg
aatgattatactcaatcatctccatgttgtgagaatcttgttctgattctacatgaaagctttgctcgtaataatttcaacaaactcgttgactctacaagcaaaaccctcatgtgcttactttcaagtaagtatatgtagttttttgctcgaaataacaaagaaaaaaaagaacaaaacagcatcttgtgtttggtccaattcttgaatcttgaaacattcttttgagctctctataactatttaaaaaatggcggatggatacgagaaccatgctcctgaaaaccttcaagtaagtatccacaaaacccaaaatgttttttgaacaaattcttgttcagttgtttgtttatgtatatgaatttaataaaacaggggaagtatcaagcaatgggtggttt

SEQ ID NO: 151647 - DNA, 553 bp, Arabidopsis thaliana landsberg
aatactaccggcggcggatttcaatatcccaacggagctgaaaccggcttcaaaataatgccggcgagtcagccggttagtgtcaacacttctctattttctttttaagacataaaaattcctaattaattaataaaaaataaaatttgccgggtcgggttgcgatgtaaatgggtcgggtcaggacgaggaaatgttagatcaagtggttaaagaagcgataagcaaaccgtggctgccgctaccgctcgggctaaaaccgccgtccgcggagagcgttttggctgagctaacgcgtcaaggcatctcagccgtcccttcttcttcttgtctaatcaacggctctcatcgtctccgctgacgtgtccatgatgaaacagaacccgtagatatgatgacgtcatgcgtggcgtacttgtccgtgtctgacgatccgaagcgggaactgattcggatcctgagagttgttttttaattgttgtttttaattttttgttgtcataaaaacatttgtttctattggtattattaaagaagatcggacggtggagat

SEQ ID NO: 151648 - DNA, 414 bp, Arabidopsis thaliana landsberg
gaagatggtcattgggaagttatcaacaacaaggaggtaatgtcattgtactcttcctgaaatcttaatcactctgctggttaaatggaaacttgtattgaaagttatatgatcatgtgcctgattatttcctctttcgcttggtgtaggctttgcgggcgctgttgtcagttttggacgataggggcagacgggaagctcgtcttattgagtcgttggagaaacgagaaagttttctttgtcaagccatgctgagtagacaggtgacccagtcggagacagcccatttcacagatatagttagagaggacagttcttcacctgtttctgatatagacaacaacctatgtctgaatgaaattgccaatgatcaattctcctcgcaacatgcggctaaagtatatgagattggaa

SEQ ID NO: 151649 - DNA, 421 bp, Arabidopsis thaliana landsberg
  unsure (1)..(421): unsure at all n locations
gataattctggaagaggaancaatcntgttgtctcggcgatttgctcaagtgtcgagtgaccaanaacacgatgtaccgattactaggtctaagggaagaaactcggcgagtcctgaggaatctttggggaaacggaggaagcgtaagacggtgaagctatacgaagattttgaagagaaggaagcggataggaagaagaagagaaaggggaataaggaggatgaggatatggcggagggagatgatgatcaggcggaggaagaaacaaatccggaggctgaagaagaggaagacgaagaagaagaagagaagcctgatgatgcgtgtcctgttggtgattcggttaatgttacgggtaaaggaaaagggaaaagaactcatttcaaccaatttgcttatgatggtaacacttatgatctg

SEQ ID NO: 151650 - DNA, 293 bp, Arabidopsis thaliana landsberg
  unsure (1)..(293): unsure at all n locations
tatcagggattctgaagatgcagcaggacgccttcctagctgattccaaaagaatcagtggtttcccccatgactgtaagttgcgtntgatatgagatacaaaacttctttcagtacgttgtcgtaatggagaaagaggaccttcgtcgataatactaatagctatatcggaaagtgatgacgttgatctcgtctcatcctccataattcaaccccacttgcatcctcgctttcctggattcagatcatctatatttgattatcaaatttcagattcaattcaaaaacaataa

SEQ ID NO: 151651 - DNA, 914 bp, Arabidopsis thaliana landsberg
tctactcaccctcgctatcctcatctctctccgattgctcgaatcgcgttaccttccgattcattcgccgcttgggagtcaaaccgggaaccaaaaacgttcataacctctggctagaactctccgacggcgaacttctctcgccgattcaactcctccagtacgcaccgtcaacgtcgtcaccgttcgagtaatcggaaaaaacggacgaatcctagtggaagctcatcaggaattatccgatgggagtattcgtgaaagatttcgtcctttatcagagaaaatgaagcctgaagaatctcccgacgaagcagtttttcgcgccataaaagaagagctcggatctatcttcaatggcgatggtgataacattggacagagaattaagattcttcccggaacttataacagaagagttgaagaaaggaactcgctatcgtatccaggattaccggcgcgttacgctcttcactctgtggatgcaacggtggatggattaccggaggaagatttctgtacggaggagaaagagtacgacggaggagactcaacggaagattcgattgaaacactcgccgccggaaaagctgtaactgtgaaacgacattactggaaatgggttagtcctgattcgattcgatcttaaaaaactcaaaacaaagattttcacaaattttatcaatcatgcttttgatacatgaataatcagagagccatgtaaagatacatatacacatttatatatgttcataatcatcttcttcgtttggctatttttgttttagtggatactattctccagaagttttgatctcactatagcttatgtgagaaacttgaaagttcatgaatacactagcttatcttcttcgagttcattgttttgtgcagagattttgtcaatcttattaatt

SEQ ID NO: 151652 - DNA, 502 bp, Arabidopsis thaliana landsberg
acctctaaacaatctcaccttgggtctccctctctataacaaacattaatacacacaccaaaaaaaaacctgtttatgtctcaaagatctctgattcctcattcttcttctatagcttttggtctccattctcatctcttaatctccagtgagatcagctccaattctaactggtctctctaaataaaaaacagaaataaaaatccaacctttttcaattttcgttcaattttcccggaaaaaaaagcgatccttttgatttttcgatttctccaagtaacaattcaaaatgggtctaaagggttttgctgaaggaggaatagcttcgattgttgcgggttgttcgacccacccgcttgatctaatcaaggtccgaatgcaacttcaaggcgaatcaacttctattcaaaccaatctccgaccagctcttgcttttcaaactttgaccaccgtgaacgcgcctactctacgcgttggtgtgatcggagtcggatctcgttta

SEQ ID NO: 151653 - DNA, 559 bp, Arabidopsis thaliana landsberg
atggcgggtcttcaagcgaagacgttaatgttcgttctggcggctgccttagcgactcttggtcgcacatttgtggaggcagacttcagtaagaattttattgttacatggggtaaagatcacatgttcatgaatggtaccaaccttcgacttgtcctagacaaatctgcaggtatatagtaatcttataacacaataactttaaaatcagtccatttaattttagtctattatttcatgagaaacttgatagataaacatgtataactgtttttatgtttttgtttgtttttgcaggatctgctattaaatcaaaggtggctcatttgtttggaagcgtagaaatgctcatcaaacttgtgccagggaattctgctggaaccgttgcagcctattacgtaaaattttcttttgaactcgatcgatagaattacaaaaaaaataaaaaaaaatagaatcaatacgcaattcttttatatatagaaaaattagattaatgttttcagatttttctttgtagctatcgcctacgggaagtacacaccatgagatacacttc

SEQ ID NO: 151654 - DNA, 456 bp, Arabidopsis thaliana landsberg
gtaatatgcatatatactacaaaaaaatgaatatccttacgaaaaaattgcgaccatttttcgtcagaaaattgtgaccatatacatacaaaactgtgacatatttatttggtcataaaaacgttgctatttcgttatagtgttataaaaacgctcctttctcaaagttaaagatgttttggtaattatatattttctttcgtgttaatttctcgtaaaaaattttctgctatttcacttttgtttattgtttcttttataggaagcaaacaatgaagacttctcttttattggtgtgatgaagaaaacacatcagaagcttgatggctcgtatgttgatcaacgagcacggttggttgcagacacttatgaaaagcatatacaagaacgcttgggtcaacttgaatcttctggggaagagaatctgacagctgaaactcttgacgaacactcaag

SEQ ID NO: 151655 - DNA, 2854 bp, Arabidopsis thaliana landsberg
atggaggatgcaaaagcagtttgtgagccagaggttctgagccaaatcctcaagtggaaggtcctagcttagctttttcgacatcctttttatttatctttgtttgtaactagtaatttttgctaatcctgtagatgtttatttcttctgcttcaggataagctcaaagtttatcttgctccttttctccatggtgcacgctatacctcatttggtcgtcattttactaatcctgaaaaacttcaacaggtaatctatcctcttaaaagcataaacaagatttaggtctaagcatcctgtatgttacaaggattttcggttcacacttagtcaattagtgagaaagaaaaaaattcaaggagagatgactcttaaaatgtaggatgttatgtctttccaattagcttacttaatctgtcttctgtgaggattattatgctgttggtttacactttctgtcacctgcgtgactagtgactatcacctgctgtttacacactcttgtcaaattttaactcctgtatctgaagcttgttcctgttcagacctattattactttttgtgcagattgttgataggctgcattggtatgcagatgatggtgatatggtgagatttgctcacaaacgttatctgttgggtttaattttattattttgtttacctctcttaagtttttttcttatattctgaagtatgatcttgttagtataatgatcaatgtcttgtgcataaacaatgatgtctggtttctgggatctcttccaacagattgtcgacttctgttgtggttctaatgactttagctgtctgatgaacgcgaagcttgaagaaacggggaagaagtgcttatataaaaattacgatctttttccagcgaaggtaatgacttgtgtgtgtgtgcctactattgtcgtaagttgtaaagtcttatcactgatacggaagcaacatatgttagatcgtggtgtgttctattcatcagtcttctaggattactcattgattagctatcttactttcagaataatttcaattttgagagaaaggattggatgactgtaagtaaagatgagttggaaccaggttcaaagctggtaagatacaaatttgctttagtatgaactttgtgtaaactcccgtgtcattgaaatagtttgagtagtatctgactgtttatatttttggaattatgagtagattatggggctaaatccaccatttgacgtcaatgcttttgtcgacaacaagtttatcaccaaggctcttgagttccgcccaaagattctcattctcattgttcctcccgagactgaaaggtttcagtttccatctatctcatctgctcctctgtaccattccataacactaatatatcgactcctctctccctctcttgtgtaaatctatcacttttctcaacaggttagataaaaagaagtcatcatatgtgcttatatgggaggataagacgttcctatctggaaatgtaaatctttcgcttttcttttaattttgctttttgagagattgagcctttattgagtttcagttacatgttatgcttcttgcctattcctttcagtcattttacctgcctggttctgtcaatgaagaagacaagcaattggaagactggaaccttgttcctccgccactttctctctggagtcggtccgactttgcagccaagcacaagaaaatagcggagaagcattaccatttgtctagggatgtggggagctcaaagttaaagatagtggaagaagaagcaaacgcatctttgcatccacttggagcttctgatggcatgtgtgatgatattcctatggaaaaggatgaacttgaggtagctgaatgcgttaataaaatcttagtctctgagaaaatcgacacagtagaaactgtagcacgtgtacatcagtcagatcacttgtcacggagaagtcagctgaaaaaggagggaaagaccaaagactactctggtaggaagcttgggaaatctatggattctaataatgtggattggaagagcaatgacatggaagaggatcaaggagagttgagtagagcaccagagagcatcaaagtaaaaattcccgaaatgacatctgattggcagagtcctgttaggtcttccccagatgatatatatgctgtctgcacatcaatttccactacaacacctcaaagatctcacgaggctgtagaagcatctctgcctgcaataacaaggacaaaaagtaacttgggaaagaatattagagaacatggttgtaaagtgcagggcactggaaaacctgaagtgagtcgggataggcctagctctgtgagaacttctagagaggacatctacactgttcgtccatcgccagaaaatacgggtcagaaaccgtttgaagcttttgaaccatcttatggtgcaagtttgtcccatttcgacgatggtcttgctgctaagtatggtggtttcggtggaggctatagaatgccggatcctcctttccccccggttcagtttccattgagaaatggtccagactatatgtttgatttccgaggatgttcagaccttgatagagggattggtcaaatagaatatccacatcagtgcggtgggcacttggaccccatgttagctcctcctcctcctccaaatctgatggtcaatgcattcccattgctacagcagttatgcgcctcatttcgatcaaatgaattaccagaggatgagctctttcccacctcagcctccattgcaacctagcggccataatctcttaaatcctcatgtctttccactgccaccgccacctcctagtgtcttcgatatgagtcctaggggttttgccc

SEQ ID NO: 151656 - DNA, 166 bp, Arabidopsis thaliana landsberg
gtacgtagaagaaaatggctgccttatcagagaaagaggctgatgcttatctcgacgcatggcctagatatccgagggattggtttaagaaaattgccgcacggacacaggaccacaaatttgcttgggatgttggaactggtaatggtcaagctgctattggggt

SEQ ID NO: 151657 - DNA, 490 bp, Arabidopsis thaliana landsberg
tctagggtttgtaagagtgattatatgatctcatttcacaatgcaagcggtgctaagcttatagtaaattaatggtggcttgatgcttaattgaaaagtcggaaacttttttattcttctttattgtttacgattcatttcaatggttgacatgtatgccaagtgtttgttagaatgtctaaaagaaaacttcaagttgatcactttggtaaaattggttagcttgtttctgtagaatgcataatctttagtgaaaatgtgattgactacttctgattctttgaaatgtcactgtttcaggctgaagaaaatgttcatcaaagtgatgattgccatgggatgttacgattccagctgaagatatggacactggccttatgcttcaaaaaactcattgtcattcgtctacgcgaagccttttctaaagagaaagcatcaaaagattttggatacttgataacaccggcgattcttgagaacatcggtaaag

SEQ ID NO: 151658 - DNA, 894 bp, Arabidopsis thaliana landsberg
ggaagagataaaacagcggaagagagaaggattgctatatgcatttttgatgatgtagcagaacaatgccgtgaagctgcctttaagtaaggatacgcatccactggatcattttacatttgtaggtttccagttttagagttctgataagacaccttatatttgtttggcagatattatgatacctatcttccatttgtactggaagcttgcaatgacgagagcccagaggttcgacaggctgctgtttatgggcttggcgtttgtgctgagtttggcggctctgtattcaagcctcttattggaggtatgacatacctttgcccactggtaggtttttgggctttgatccatacttgacagttaagtaacacatgattttatgtcaacagaggctctgtcaagattaaatgttgtgatacagctgccaaatgctcggcaatctgaaaatgccatggcatatgataatgctgtatcagccgtgggaaagatctgccaatttcaccgtgatagtattgattcttctcaggtagattataatagttattttggtttcgccatcgtacccatacatgtggttggttttgatgattcacaagttaccttgttttggttttattaggtacttcctgcgtggttgaactgtttgcctataagcaatgatgtccttgaagccaaagtggttcatgatcagctctgctcaatggttgaaaggtaagcaattgcgtttagattctaattttactgtcgttttcattccttatgactatgtaaaacagctttgattgatgataaacttgcaggcaagatgtagccctttcaggccccaataaccagcatcttccgaaaatattaaaagtttttgccgaggttttgttagttacgctttgcata

SEQ ID NO: 151659 - DNA, 710 bp, Arabidopsis thaliana landsberg
ctgcataagcacaccgcggcagattctagtgaaatggggtttgcagagaggaacaagtgtcatccctaagtcattgaatccagagaggatcaaagagaacatgaaagtgtttgattgggtgatccctgaacaagacttccaagctctcaacagcatcactgaccaggtaaacttaccaaactaccaaccagaatctctagatgatcttttacaacgagagtaaattgcttgctatgatgaaatcgcggttactgctttaatgggacagtcattttattttagttaggaatcaccgttatttctgttagtgagaaacagagcacttgttagtcttctctgcttcctgagttcttgttatagtagtaactagtgaggaacaggacagagtaaggaaacagagcacttctttatcttctgagtttgttagagaaaactaacaatattttcagcttattcatttgatccaaatgttcacactttgggtcttatttggccctgatgcagaaacgagtgatagacggtgaggatcttttcgtcaacaagaccgaaagtccattcccgagtgtggctgatctatgggaccatgaagactaagccgagcccgagaaacaaacataactatgtaaggaatgtgtttgttgtaacttgtaagatatcaaatgtacattttctgaaaataaaagaaagcagtctcccgtataacctaaaaa

SEQ ID NO: 151660 - DNA, 1467 bp, Arabidopsis thaliana landsberg
atgggcaagataggctaccttctgtttctattgctgaagaatggatgctaactggcgacaaaaccaaagatgaaggtgttcgtgcatctcacaagtatgaaagcaccccagatattattctctttaaggtattgctatgcttatttacacttttggaaataagtgtaagtttcggacttctttgacactgctctccttctaggctctactatcactttgttcagatgagctagtatcagcaagaagtgccatggacctatgcatcagtcaaatgaaaaacgtattgagctccaaacagttgtcagagggtgcgtctgttgaaacaattggccgagcatatcatgcaacggaggcatttgtgcaggtatgacagtttttattttaattatcttccccgaatcatatttggagggtgtcttttatatcagggagatacgtggttgatcttgtttgtcctatatttcatttacctgatttggatgattaaagcaactattttttgcctgtttgtgcagggtttgtcgtatgcaaaatcattgctgagaaagcttctaggtaccactgaatcgaccaataacaatggtgaaagaagtagagatgttgatgatatatcttctgatgctggcagctccagtgttggcagtcagtcaacggatgaaccatcggatgttctctcacttacagaaatctggttggggcgcgcagagttgctgcagagcctcttagggtctggaatttctacttctcttgatgacattgctgatcaattgtcatccgaatgtctacgagacagattaatatctgatgaacgatatagtatggcggtgtatatgtgcaagaaatgcaaggtaaaattttatacttgattatctaatccatggttaggccacttcatcaaaaattcgcaataacttctgcgtgtgttacttgattaatttcagattgatgttttccccgtgtggaaagcatggggtcttgctttgttacggatggagcgctatgctcaagctcgagtcaaattcaagtatgaaatagtttaatgctgcggaagaacacatgaattttaacactctttttgcatattgcaacctcaatttgcgtgctgtaatacagttctcattgttttctttataggcaagcctttcaattaaagggggaagacattcctgatgtcattcaggagataataaatacaatagaaggaggtccgcctgtggatgtgtcaattgtacgttccatgtaagtgtctctgtttagctaaaactgttatcctagtatgggcgtagtagagagacatattttgtaaaaatatcctgctaatccagtcacagaaccggaatgtgtttggtcaatataaacttcagttgaacacaaaatgaattagatttttgtaagtacgtaaacgcagcttcattagctaagctctaaggaattgtaaaattgttgagaattgaaaatacaatcatg

SEQ ID NO: 151661 - DNA, 506 bp, Arabidopsis thaliana landsberg
atgatcaatgaacagtccaaatatgattggatggatttcttttcagtaacacaagtgtatgagaaaatgagaagtctttgtggctacgtactggtccatcgatgttaaaagatgatagaacatacctggtaacaatatatttgacatacttctgattcgaaatgacgctttcggtatatggattatctagatatatgtatctcaatttctaccatcgacatcgaatccagcacctgtccaacctcctctgcctttgttcattattccaattcctcttcccctcccttgattctgtggtttctttttcgcttttgattctccttcagctgttgctggtctctgtccatgttctttaccaccttcctcgttcccgtggttattttcaggttttcccgggtgagtttggttcgcattggctgctggtgcgctgtctactacagatttagtctccggttcttgcacctaaatatgaatgaaaaaatgtaagatgttaaaagcatctttcg

SEQ ID NO: 151662 - DNA, 365 bp, Arabidopsis thaliana landsberg
gcgctagtctcttcttcgaacgcttgcaatggatcttctcaagactccttcctccacggttggtctatcagaaacattcgctaggttaaagtcacaaggcaaagtaagtaaattctctcttcaatcaccctaaagtttcaatttttatttcctttctctattcgatttgttcttgattgttgttgaaaacaattttgtaggtggctctgattccatatatcacagctggtgatcctgatctttctacaacagcgaaagctcttaaagtgcttgattcgtgtggctccgacataatcgaactcggtggtccatactctgatccattagctgatggtccagcaatccaggttcgatcctcaaaagct

SEQ ID NO: 151663 - DNA, 629 bp, Arabidopsis thaliana landsberg
attgttaaacttcaagatgacaacagagcattggaccgtctaaccaagtcgaaggaagcagctttgcttgatgctgaaagaactgttcagtctgctcttgcaaaggcttcaatggttgatgacctccagaataaaaaccaagagctaatgaaacagatagaaatttgtcaggtatcactttcgcctcctttacccagcagtactataaattcctggatctctctccttcgttttcgtgagcatgccttgtttatcgattgttcaaattaggaagagaacagaattttggacaagttgcacagacaaaaggttgcagaagttgaaaagtttacccagaccgtacgggagcttgaagaagctgttcttgctggtggtacagctgcaaatgcagtgagagattaccagaggaaatttcaagaaatgaatgtaataattaaattacacgtttagtgcctcattagcctattgctacccttgtacttaaaattcaattcctgtgctaatcatagctatggccattaatcctttcattaggaagagaggagaatccttgatcgggaactggctcgtgccaaagtaagtgcaagcagggttgcaactgtagtggcaaatgagtggaaagatggtag

SEQ ID NO: 151664 - DNA, 1156 bp, Arabidopsis thaliana landsberg
atcctaaacgagactcgcacatcatacgccactcacaaccggaagctaaaggagctcgccacaatccgttcaaaactatcttcatctgaatcggaatccgaatccgtgtcttcttctattcgtcaattctcttccgtgtttctcaaaaccctaacccctctttccatcgcggctcaacgaagaaccgctgcagcagagcgtgttgttagattcgtagcggaatttgcttgtcttcgtagtaattcagatggtgattccgattgcgacgagtatctagaggaacttctaaagtttttggttgctggatctgttgctgcgaatagaaacgcgagattcagggcgtgtcagataatttcagaggtataagagaataattagggttctttctccttcaatttaatgggtaaatgtcttttaggtcatatataggtttaatgcaactgttcattgtgtttgttacagatcattttgaggttgccagatgaagttgaagtagcggatgaactatgggatgatgtaattgattgtatgatgttgcgagttcgggacaaagttcctgttatacgtacatttgctgtgaggtctctttcacgctttgtgaatgatcctgagaatagtgacattcttgatttgctacttgaggtgcttcctctggaacagaatccggtaaagtttctatcttttaccatttctgctttgacatcataaattacattctgattttttgtcctcaatgcttgccaaagtcttattgttgatgtttttattgtttacaggaggtacgcaaaacaattgttttatctctgcctccttcaaatgcaaccacccaagcaattattgattgcacgctcgatgttaatgaatcagtacgcaaagcagcttactctgttctggctaataaagttcctcttcagagtctgaggtgaatttgggcttagagttttggtctatttatttctttcttcttcattgacctcttaatagaagttttttgctatttttgttagttacaactgttctacaacttccctactgtctttctctttctcctgactgggtatttctttcatttccctgctttagcatcaagcttaggaccacaattcttcagagagggcttgtggatcgtgctgtaaatgtttcaacggatgcttga

SEQ ID NO: 151665 - DNA, 1046 bp, Arabidopsis thaliana landsberg
atatgagaaagaagggaaaccgtcgggactatcccctgtggatgtatttgttagtacagtggatccgttgaaagagcctccgcttattactgcaaatactgtcttgtctattcttgctgttgattatcctgtcgataaggttgcttgttacgtatctgatgatggtgctgctatgcttactttcgaagctctttctgagaccgcggaattcgcaaggaaatgggttcctttctgcaagaaatattgtattgagcctcgtgctcccgaatggtatttctgccataaaatggactacttgaagaataaagttcatcccgcatttgtcagggagcgacgagccatgaaggttactagttcttactttttttataaatttgatttgatgagaaaagttttggtctaattgattcttgctttagaaatttatttttcatgagaaaagttatcaaccttttgttatatgggctcttatgaaagaagatggtgactttgaaaattgatttataaggttgtgtgtttttactgattttgacagagagattatgaagaattcaaagtaaagatcaatgctttagtagcaacagcacagaaagtgcctgaggatggttggactatgcaagacggtacaccttggcctggtaatagtgtgcgagatcatcctggcatgattcaggtgagtttcaaatgcttcttatttctgaaaagccttcttatgtgttgtccttcaaaatttaattatactttgttttcttgttaaaggtcttccttggaagtgacggtgttcgtgatgtcgaaaacaacgagttgcctcgattagtttacgtttctcgtgagaagagacccggatttgatcaccataagaaggctggagctatgaattccctggtaaatgatatactttttaaagctctaaaccttcttctttgtaaattacgtcttgccatttattgaaatggttcctgactcttcatttcatctacaaaacttttgttgaagatacaaatctctaaggttctatcaaatgctccttaccttctgaatgtcga

SEQ ID NO: 151666 - DNA, 878 bp, Arabidopsis thaliana landsberg
tgttaccatttcaatcttcatgtaacccttttaagataattttcttcttcctgttaatttatctgaagtttgcttcttatcttcgtgatcgctttttgcaatcacaataatgtctaaccgttccttcaagaatttcatagaagaagaacttggaacattcccacagttcttaatctacgctcttcttgaatggatcctcatcattatcctcttcatcgatggcttcctcgctttcttctctaaccaaatcgctaaattctttgacctcaaaatcccctgtcttctctgcactagactcgaccatgttcttgtcagcagaaaccctgatttctattacaacgactcgatatgcgatgctcacaagaagaatgtctcatctctcgcttactgtcatgtgcacaagaaactctctgagatcaaacgtatgtgtgaaggatgtcttctctctttcgctaccgagaaagaaacagatgttgatacttacaagtctcttattggaatcttgcataaggatcttgagcttcttatcgacgatgaacgtgagcttcaattggcgtttccggttgcgggttcgaagaaagatgaaaacttctatcaggttgagaacagaactaacaatagcaatgacaggtttcagaggcagcaacgttgttcttgttgtgggcagataatgaagctgaaatccgataaacctaagagcaataatcaatcttttttcggagctcctagtccatctcctagagtttcatttaaccaaagaactttggatttgtctaacattaaatacacggatttgcctgaggatgatgatgctttgaacacgaaaggcgcttcgttggatgcagttgatgacagaactccgagtattgtaacaaaag

SEQ ID NO: 151667 - DNA, 1906 bp, Arabidopsis thaliana landsberg
ctctcaaacaccatttttggaaacaccatttcacattccttaaacttttccattttagtatcatttcatattcattgatatggatgtctccaacacgatgctccttgtagctgttgttgcagcttactggctatggttccagcggatctcaaggtggctaaagggtccacgtgtttggccagttttgggcagtcttccgggtctgatcgagcagcgtgaccgtatgcacgactggatcactgagaacctccgtgcgtgtggcggcacttaccagacatgtatctgcgccgtacctttcttggcaaagaagcaaggtctcgtgaccgtcacgtgcgatcccaagaacattgaacacatgctcaagaccaggttcgacaactaccctaaaggtcctacgtggcaagccgtgttccatgacttcctcggccaaggcattttcaactccgacggtgacacttggctcttccagcgtaaaaccgccgctcttgaattcaccaccaggtacgtacttaccttaaccggtccggaccgggcattctttcatgcatgtacaattcacaattggtccatttgaaccaaattaaattttcttttcttagttatgtcttctttggttcggttatgtaaattgtcggctaaattaagggattggcttctgtgatgcaggacgttgaggcaagcgatgggtcggtgggtgaaccggggaatcaagctccggttttgtccaattctcgaaacggctcagaacaattacgagccggttgatctccaagacttaatactacggctcacattcgacaacatttgcggtttagcattcggtaaagacactcgaacctgcgcaccgggacttcccgagaacggtttcgcctcggctttcgaccgagccaccgaagcttctctccagcggtttattctaccagagtttctatggaggctgaagaaatggcttggactcggcttagaagtcagcttgagccggagcctaggagagatcgatgggtatttagatgctgtcattaatacacgtaagcaagaattgctgagtcagcaagagagtggggtccagcgtcacgacgatctcctctctcgtttcatgaagaagaaagatcagtcgtacagcgagacgttcttacgacacgtggcgcttaacttcatcctagctggacgtgacacgtcatcagtagcgttgagctggtttttctggctcatcacgacgcatccgacggtggaggataagatcgtccgcgagatatgctccgttctgattgagacacgtggaaccgatgtatcgtcgtggacggcggagccgttggaattcgatgaggtggaccggttggtttacctgaaggccgcgctctctgagacgttgaggctttacccgtcggtgccggaagattcaaagcacgtcgtgaacgacgatatcttaccggacggaactttcgtaccggcgggatcgtcggtgacttattcgatctacgcggcggggaggatgaagagcacgtggggagaggattgcttggaattcaaaccggagaggtggatctcgccggacgatggaaaattcgtgaatcacgatcagtaccgattcgtggcgtttaacgccggacctaggatctgtctaggaaaagatctagcgtatctgcagatgaagacgatcgcggcggcggttttactcaggcatagactaacggtggcgccgggacacaaggtggagcagaagatgtcgttgactttgttcatgaagaacggacttttggtcaacgtgcacaagagggatttggaagtgatgatgaagagtctcgtacccaaagagagaaacgacgtcgttgttcttaacggaaaatgcaacggcggtatcggtgaaggcgtcgccgttaatgcggctgtggcggttgccgtgtaa

SEQ ID NO: 151668 - DNA, 511 bp, Arabidopsis thaliana landsberg
tggtcgagcaagtcagcggcagagatcatgtgcttaatcatcttagcatcccagctgcttgctttactcatcctgaaatcagcatggtgggattaacagaggtagttttatatcctagtacttgtgtacagaagagggtcaaaaagaagaatgctatgagcaaaatatgcttactgtaactccttatgttttgacattattggtagcctcaagcaaaagaaaaaggcgagaaggaaggatttaaagttagtgttgtcaagacaagtttcaaggctaacacaaaggccctagctgaaaatgaaggagaaggaatagctaaggtgggagaagcaaaagttgttgatttatttatgtctcatgaaagaacatagagatctcattgcttttcattatgcagatgatataccgacctgacaacggtgaaatcttaggagttcatatatttggactgcatgcagctgaccttatccatgaagcttctaatgcgattgctctaggaacgcgtattcag

SEQ ID NO: 151669 - DNA, 633 bp, Arabidopsis thaliana landsberg
ctaataacactgctgctgtgactttatcatatccttagtccaattgggatcttcgtctgcgtgagacgcgttcacacctgcgacagatgaaatcacggaaataccactgcccaacgtgttcgcaataaaagtcctctgatgcctaatttcgtcaatttactgaagaaaattcaacatcaacgccctttttgataatttccccaaagttagtgggccctccacacgaagcatgtatcctccaattgcatattgccaattatttcctaataatattgaaggattattcttttcccatctatataccaccaaccctaagatccgaacgtccattttaaagccgtgcgtttaatcatgatcgtcaattatattggcaaattttgaccacacgatatccgtcatctaacggcatctacagatctaccagaacgttctcattcatgactctatatatttcgcatttcttctcctcaacgctctcataaaaagtagtactcgtgtcttactcgtgccagccactcgcatttctccagattttattatccttcctcgaaacaaggtatgacggaaactctctctctccctctctgatccgtcgttgctgcttccattttcatcttgactcgatcggatcat

SEQ ID NO: 151670 - DNA, 548 bp, Arabidopsis thaliana landsberg
atggcagtcctacaatcacggttagaccaactggaaatggctcgtcagacagcaatgaacgctcaacatacacaatcactaacagagatcagctggggaaaccagatacgaacttatgttctccatgtatgtagataccgaatccacacattttccgttgcaatttgagtttacatgacaataatctgagtaattattctttgcttttgtagccatacagaatggtgaaggatctgcgaaccaactacgaggtctctgatcctgactcggttcttgaaggagacttagatggtttcatcttgagcttcttatcttcttctttagacaaagatgatcctgaacattagtttatagatgttgacatgattgtctcaagagagttctacttatgtttacttgaaacgtctttttattactaaactccgaaaggacttagggggggttattgaacgtaggatttttattgaatctgaaagaaattagaattctatttaaatcttgtgctattcaattgaatggttttataattctactaaattctactgtta

SEQ ID NO: 151671 - DNA, 1345 bp, Arabidopsis thaliana landsberg
tccaaaatatatacacatctttttgatcaatctctcattcaaaatctcattctctctagtaaacaagaacaaaaaaatggcggatacagctagaggaacccatcacgatatcatcggcagagaccagtacccgatgatgggccgagaccgagaccagtaccagatgtccggacgaggatctgactactccaagtctaggcagattgctaaagctgcaactgctgtcacagctggtggttccctccttgttctctccagccttacccttgttggaactgtcatagctttgactgttgcaacacctctgctcgttatcttcagcccaatccttgtcccggctctcatcacagttgcactcctcatcaccggttttctttcctctggagggtttggcattgccgctataaccgttttctcttggatttacaagtaagcacacatttatcatcttacttcataattttgtgcaatatgtgcatgcatgtgttgagccagtagctttggatcagtttttttggtcgaataacaaatgtaacaataagaaattgcaaattctagggaacatttgcttaactaaatacgaaatttgacctagctagcttgaatgtgtctgtgtatatcatctatataggtaaaatgcttggtatgatacctattgattgtgaataggtacgcaacgggagagcacccacagggatcagacaagttggacagtgcaaggatgaagttgggaagcaaagctcaggatctgaaagacagagctcagtactacggacaacaacatactggtggggagcatgaccgtgaccgtactcgtggtggccagcacactacttaagttaccccactgatgtcatcgtcatagtccaataactccaatgtcggggagttagtttatgaggaataaagtgtttagaatttgatcagggggagataataaaagccgagtttgaatctttttgttataagtaatgtttatgtgtgtttctatatgttgtcaaatggtaccatgttttttttcctctcttattgtaatttgcaagtgttatgtatgttgtactttatttggcttctttgtaagttggtaacggtggtctatatatggaaaaggtcttgttttgttaaactcatgtcggttaactggatttgtcttcaaccacaaaaagttttcaataagttacaaatttagacactcaagccgatgcagtcattagtacatatatttattgcaacccaaacttcaaaaacagtaggttgctccaattagtaccctgaattgcctcctgattctagttgataaaaatcaggggatataatacattggatttggaagtttgaaggatct

SEQ ID NO: 151672 - DNA, 1347 bp, Arabidopsis thaliana landsberg
caaaaaaatgagatataagttgaaccgcaagatgttcctgccgacagtcatcaccgctcttcacaatgatctgcaaaagccagaaaagaattggaataataggtcaaacaacaaaattaacagtttcttagggttgttttaatatagtgtacagaaattcctagacaacaactttcaatgtcaacaagtataaaccaacttttacattcagcaggaaagaaattaaaaacagaagcttatcaaaagcagatccccacaatgagtttctaaagactcaaagcatatagccatatacaaaggaatgaatgtaaaaacacttcatgtattttcactgttgaaaatttttgaactttaagtagagatacgcaaccatttatctgacaagaagtaccattatgtattttatttattgctacacaagatgttcaagtggagaaatatactctacaaggaaaagccagcggaagataaggaggtttgctttatccagtacttacagaacgcaagtcccaaccaggtaactttccatatattgaatctttacgtattcttagtcgctttccctcccaaaattcacctgataaggcatcacctgctttcagcatgccaccattggcctagtaaacaaaacaaaacataaatacataaaaggttcaacatctaaaacaggaaaaagaagaagataacccatattctatgttaaacatgcatatacccttggttgtgcatccgaggaatcctgacccgcccctttagaagaaaggcctggaggtgcctctcccttcgctgcagcagcctgcacaggtgatttaattaaggattaatgacgggtcacaacgccaaacagaacacatacaatttcaatatcttgactttttgaacataaacgccttaataagaaaatgaagtgtatagcatgtcggaaggacaatagcaagcacaggcactaaaaacatcgactagttgagtataagaattattccaacaacttgaaagagacatgaagtatcggatatttttgtgaaaaaaacataaaattagttgcctcctaaaagttattgatcaagaaacactcaccctaacttcctccatggcaacagtacttggaacacgacgatgttcctttttacgtgggactgatggatcaggaatgctttccattctaagtcctgggtcagccgttacgaccacccttacccattcaagataattgttcagcccagtccttggggcttcccccagaacatcatcaattggatcgccaaatgattcaagagctgaagtacgatcctccactgagagacttacattgacaagtttcaccttcacctttgacttaggagtcat

SEQ ID NO: 151673 - DNA, 393 bp, Arabidopsis thaliana landsberg
atgaagtcttcttacggttcttcctctaatgatctccacacttttgtcaatgagatcaagagagaaattcagttgtccaacattaatcttgatccttactcatttgtctctccttccgcttacgacacggcttggttatccatgatcgaacaagacatcaacgtagatgataatgagcttaaaccgatgttccaaggttgtctagattggattatgtgcaatcaaaatgccagagaaggtttctggatgaactccaccagttatacaacgacggtggctgatggtggagacgaagacggtgaagaggacatgtatattctcatttccactcttgcttgtgttgtagcacttcagaaatggaatatcgggtgttttcatctccacaaaggtgcg

SEQ ID NO: 151674 - DNA, 2214 bp, Arabidopsis thaliana landsberg
cgtgaagtaatcagaaaccagaaatagtcttcttcttcttcctcacacacatacttctctcaccttatcctccgagatcggaaaatatggagaaatccggctacggcagagacggaatttaccgatcacttcgtccaacactcgttcttcccaaagatccaaacacatcgttagtctctttcctcttccgtaactcctcatcttacccatcaaaactcgctatcgccgattccgataccggcgattccttaaccttctctcagctcaaatccgccgtcgctagactcgctcacggattccaccgtctaggtattcgcaaaaacgacgtcgtgttgattttcgctcctaactcttaccagttccctctctgtttcctcgccgtaaccgcgatcggcggcgttttcaccaccgcgaatcctctttacactgtgaatgaggtttcgaaacagatcaaagattcgaatccgaagattatcatatccgttaatcaactgtttgataagatcaaaggctttgatcttcccgttgttctacttggatctaaagacaccgtagagattcctccgggatcgaattcgaagattcttagtttcgataacgtgatggaactctcagagccagtttctgagtacccgttcgttgagattaagcaatcagatacagctgcattgttgtattcatcaggaactacaggaacaagcaaaggtgttgaattgactcatgggaatttcattgcagcttcgttaatggttactatggatcaagatcttatgggagagtatcatggcgtcttcttgtgttttcttcctatgtttcatgtttttggtttggctgtgattacttattctcagcttcagagaggaaatgctttggtttctatggcgagatttgagcttgagttggtgcttaagaatattgagaagtttagagttactcatctttgggttgttcctcctgtgttccttgctctttccaagcagagtattgtgaaaaagtttgatctttcttcacttaagtatattggttcaggagctgctcctcttggtaaagatttgatggaggaatgtggaagaaacattcctaatgttttgcttatgcaggtaaacaaaaaaacttggtttcagaacctgttcttggtttttgctccttctatgtttgcttgtaatgtataaggtttcgcgtagtttcagttctgtttgtaggctcgtagtcatggatgaatgtttaaatgattgcttcagggatatggaatgactgaaacgtgtggaattgtgtctgtggaagacccgagactcgggaaacggaactctggttcagcgggaatgcttgctccaggtgttgaagctcagatagtgagtgtagaaactggaaaatctcagcctccaaatcaacaaggagaaatctgggttcgaggaccaaacatgatgaaaggtttgaaaatgatccgttcctacgtatatcatatacatgtgcatttgaaagtcatgtaaactggttctctttcagggtacctcaataaccctcaggctactaaagaaacaatatacaaaaaaggttgggtgcataccggagatcttggatatttcaacgaagatggtaacctttatgttgttgatcgaatcaaagaacttatcaaatacaaaggctttcaggtttcactttcacttacccaattctctccttcttcttctcacttgatattgaatggtttgattgatatatctaggttgctccagctgaactagaaggtcttcttgtatcacatcctgaaatactagatgctgtcgttatcccgtgagtcatatattcagaaaaataccgagttgattccatgtccgaacacattaacatttgtgtatgttgtaggttccctgatgaagaagcaggtgaagttccaattgcgtttgttgttcgatcaccaaatagctcaataacagagcaagatatccaaaagtttatagccaaacaggttaataacttatgacacaagtcgtttgaatcaaccggagtgctatggttgttttcttaggctcaaaactatcttgttgtttacatcaggtcgctccttacaaaagattacgacgagtgagcttcatcagccttgttccaaaatccgctgctggtaaaatcttgagaagagaacttgttcagcaagtaagatccaagatgtgaagaatctcgtagatcggagatcagaatctgtgtgttgtctcg

SEQ ID NO: 151675 - DNA, 1859 bp, Arabidopsis thaliana landsberg
gccggcgactaaaaaacgttttttgactccgggaaggtaaaaaatcagaacttttgtttatttctttggtggtttttggaagttgatgacgattgtgatctctttctctctctctctggtttgtgaaaacgatttaagcgtgattgtatgacaaaacaaaatctatgaattgggtgactcccgatttccaaaaagtaaggcaaagatttagtgttttagggttgtgtcatgtttagataagtgatttgcctagctttgtggtttttttttgactaagcgattctaactcttgagggctttttatgttgtagattcgtgacaatcttgtgtatcattaacttgataaattacgttgatccaggagtgatcgcgagtaatggtgttaatggaagctcaaaagtatgtgatgccaaaggggtttgctctgcaggaactggaattcagtaagtttttttgttctgaattttgattttaagaataattatgtttatagttttatgagaaagacttagactttgtgtgtgtctgttgatacaggggagagtttaacttaactaactttgaagatggtcttttgtcatctgcgtttatggttggacttcttgtggcttctccaatattcgctggattgtcaaaaaggtttaatttttatcaacagtttcatatatttgtgttcttgttttttggtgtgtacttaagaatcaatgttttgattatctctgtctttctatactttcatgcagattcaacccttttaaactaatcggtgttggattaactgtttggactattgctgttatcggttgcgggttttcctacaacttctggatgattgctgttttccgaatgtgagtgctttatttacaattccatgttttcgcttttttcactctggtttctgtatattaactaacaatcttttcttttgtaactttgcctataggtttgttggggttggtgaggcttcctttattagtcttgcagcaccttatatcgatgatagtgctcctgttgcaagggttagttttcaattctgttgttattagtcttaattttttgctagtttacttacttctgattgttttttttgtctttctttccagaaaaatttctggcttggactgttctacatgtgtataccagcaggagttgctctaggctatgtgtttggtggatacgtaagtttgcttaactctttctatgggtgcaagttttttgcttctgaggaaaatgtttttataatctatttgctttacctgttcagattggaaaccatttaggatggcgttgggcgttttacatagaggcaatcgcaatggctgtcttcgtcattttgtccttctgtatcaaaccaccgcagcagctaaaaggtgatactagatgctttttaatcaacattgcataatcccttctggatgttttgccaatttttgactaaaatgtccctcttctttgcgtataggttttgctgataaggattctaagaaaccctctacatctattgaaacggctgctcctacagatgcagaagcttcacaaattaaaaccaaaacccccaagtgagtttcgctatcctctcttctttgttactgtctatgtaaaagacaactatatatactaatatacttctttttggggcagatccaagaacctggttgtcctatttggaaaagacttaaaggctcttttcagcgagaaagtatttattgtaaatgttcttggttacatcacctacaactttgtgattggagcttactcatattggggaccaaaagccggttttggtatctacaaaatgaaaaacgcggacatgatttttggagggactacaatcatatgcggaataattggaacattag

SEQ ID NO: 151676 - DNA, 1574 bp, Arabidopsis thaliana landsberg
ctcctctctttgcttcttaatggttttatacaaatttctgatttcttcttggcatttaacagctcaagctattggttatccaagtgcatctggagcaggtcatgaattgcaacaaaggtaattctagtgataatggttcctaatttttcccttattgctgttgttagccctcactttcttaacttatgttgaacgttatgtaatttcttacaggcagtttcttgatgagattgaaataagagagctgcttattgatcatattggtcatcgttgctgttggggaagccgtcctgctcgtacatggaagattcatgctgttgaagactgcaatgtttatgtcggaactcttgatactttcattgaggagagggaagctttgacacagactgtgcctttcactggtggtgaattcaatggaaagaaacatggatctgaaccggggttatgggaactggacctgagaccgcagtttcctactctgtttgtcccgtataaagaaactcaagtcctggttcctaattctgagactgttgagaagtgcacaggtatcaaatgtaatgtacatattaccattaggacaatcagaatgttgtaaatactgatgagacttggtttaactgatccacaggttgcaccggaagaggagatgtagtatgtccaacatgcaatgctgatggagagccaggattttacaaggagaatcagatgatgaagtgttccacttgctatggaagaggcttggttgctcataaagatgggtccgacacaatgtgagttcagatcaagaactctacttatactttgatggttgcaaaatgaaaagtgtggttttaattacagaaaactctcttttctccgcagatgcaccaactgtaacggtaagggaaagcttccttgcccaacttgccaatctcgcgggttaatcaaatgtcagacttgtgacagtactggttctcttctgacaagtagtatcgcagttgtaaaatggtaggttttagaaattcttaagaacatgtggcttgaagtggcaattgaaatatttgattgttgttttcggttttgacaggaagactctgtcgaagcgaaaggtgagtgcaacaagaggagctgggtcagtaccagaagaagtatttgacagagcagaaggagttcagctttgcaacacacaagcttaccagtgcacgccagcttactttgcagactcatatttcctcaacagattctcctcagaagttatctcgttaagagctgaagttccaccgacagcgaatgtagtatgtgagagacacaccatatctgttgtgcctgtgactcgtgtcaccatggaagatcgtgggagagcgttcagcttttacataatcggttttggtaaggagatatacttgaaagattattacccaccaagattctgttggggtttgagtccctgtcttgagtggttaaaggtttgaaaaaccagagttgatctttgttcttctctacttgaatgtaaagagacaagatagagtgtagtcaatgtgtttgaatattagtgtggattgagagctttagagagaaaatcaaactggatttct

SEQ ID NO: 151677 - DNA, 798 bp, Arabidopsis thaliana landsberg
  unsure (1)..(798): unsure at all n locations
taagctcgcaaactacatggaagttgatgagcccactctaaggtcagggactaactatgggcattcttataactattattaccaaatctacttctctctttttctttgacatgtnnnnnnnnnnnnnnnnnnnnnnnatattgttaacatacaagcacaagacccattcagttgattccgatggtaggatcatctccaatgcagacattgatttcttcatcaacaacgtatgttctttcttctctctctgtctttctgatatcgatactctggtgcttttacaacgtttgtaacaactctaaacctggtgacactgcaggacatgatctacgttgtcgaatcaaaacccgcaaaacgttatggtgatttcttcttgcggcagattgccaaggtatgttgtataaactgaaactaagactagtgcacatgaactcttgttttgatctttggctcttcttttttttcctccattgcgcagcttgaaggtgtgatcaacgacatggatcgtgtcaagctggaatgacgacttttctgtgttacacctaattatcaatgcccaatctgatatgatgctttctcttataaaccataagtttacctggagccaaacactttttgagtaactgtcttcaaatttcaaccataaatcatttttgttttgaattattgccatttttttttttcatattgagtatggcagttcagtttttgatcgagttcctttcgaactatttgtcctgtttctatatgccaacgacgagtttagtcttcagtagtacaactttttccgtttaagat

SEQ ID NO: 151678 - DNA, 876 bp, Arabidopsis thaliana landsberg
tggggtcaagtttttatactagatgctttatcgaagtataaagcagctgataaccgtgaaactgaaaatattgttagagagtaacaccaaggttgcaacatgccaactgcgctgttgtgctttcagctgttaagcagacactttcaaaatatatacttctctctggaatgtcacctgttcgccagtcaaaattgtttatgaagtgtcaactatattcccttacataattttctaatgccagtcctctttatttcattgctttccagatgatccttcagcagatggagcttattactagcacagatgtgattcgaaatctttgcaagaagatggctcctcccctagttacattgctttctgcagaacctgagatacagtatgttgcacttcgtaacattaaccttattgtccaaaagagacccactattcttgcccatgaaatcaaggtagcttgatcctgtctcgtagactctccgaaataagcaattgatatattcttatatttgttgataatgcttcatggttttattgcaggtgttcttctgcaagtataatgatccgatatatgttaagatggagaagttagagattatgataaaacttgcttctgacagaaacatagaccaggtaatccttactacacttttatcatctgccgtttgtccaagttattttgttttggtgcacatcatgatggtttctagaccattccaatgtaggttcttctggagttcaaagaatatgccacggaagtagatgttgattttgttcggaaggctgttcgtgctataggccgatgtgccatcaaactagaaagagcagctaacaaaacatcagtgttttacttgagctgatcaagattaaagtaagctacgt

SEQ ID NO: 151679 - DNA, 462 bp, Arabidopsis thaliana landsberg
ttttcccgaaacaagtaaaaagtcacattattatggttttgtgacttgtgtgcgagtttgtagaagctttactgatatagaaatgccgttgccgatgcagtctctcttcctctgtttctgattcctgaataaatttgttaaacgatggagaagatcgttcgttcttcttcgctgattctacttgttggcctccttctttttatgaattttcacggatttgtccggatcgccgaagcaacgaagcgacggatcgagatctccgatgacctagacgacgttgaagacaatgaagaagacgagtcatggaaagagtgggggaagaaagcaacgaccccggaatttgatccgcctccggatttcaccaatatgggattcgatcagatccaagaggaaatggctaaacggacttttggaaccgtcgtcggtttcgtcaagctccggttaggcgtcccccgtaccaag

SEQ ID NO: 151680 - DNA, 947 bp, Arabidopsis thaliana landsberg
  unsure (1)..(947): unsure at all n locations
ccgcgacaaaaggccttgaagagttaaagaatgaatcagaacaaggtaaataatctgatccttttgctcctctcaaatccatctgagacaagtttttaagacgatgtttattttttgttaacagctgaaaacaagagaaacagtatgttggaagcattcgaacgcgagtttgaaggtaaccttaagaaccaaacgcatgaattcatatagaaacaaggatagtatataatatgacagtttggtttcatcttcttgttcatttttctaatttgcagctgctacaaatgcaaaggctaatggagaaaactgtaagaaagcttgttgatatttttccttatgtcattttctatcttttaagtttttgtctgagatgttttgtcacaacagctgcaaagaatccatcaaccataagtactacagtgcagaaatcttctggcggatacaatggtaatataatcttcagattctcacaaacaaatattttcccaaaaagaaacaagatctcaatgtttatatgttctttatttttcagctggtttagaaggtcttctaaagcctgcaggttagctttaaagcttattcattcttgtgaatgtttttaaccgaagaaagtcacaagagtgctaatcttaattgtcttctctctgttattgtttcttgcagatggtgtatgtggttgtttcaacaaggataaagatggtcttcaggcagacactgattcttcgattaacatagcggagatactcgcagaagaatccaaattacaggtttgttttatagatctttcttgaatagacaatggaaggctctcacatctaaaccaatctcatttttgtttatatcttttgcttttgactatggtagggctcagggaccctctcgctcaccacatcatttgacagtcttgttgatactcatagaaaagaaacgtanctaaaggtaggctc

SEQ ID NO: 151681 - DNA, 1730 bp, Arabidopsis thaliana landsberg
ataatgttgctgcgtctctgtcgtcatcgacttcctcttcctctgactttgagcagctctgtcttcttctcgaaatcgtctcctgtttcttctgctttcatggatgcttcaaatcccaattcttctagaaaatctaatgtctcttccttcgctcagtccagtcgaaggtgaattctaatttttcaaattattcgaaaagtcaaaatcccttttgattttccctcgttttttcatgtaaggtttggtgtttgattttgatggatttagcggtggtagaggaggaggatatgagagagatatcgatcgacggagacctcagggtcgtggcgacggtggaggcggaaaggatagaatcgatgcacttggacgactcttgtaagtgtaatcgatcaatactggattctagatgttagagaattagcttgaattttgaatctataatggattgataatcaggacgagaatattgcgacatatggctactgagctgagattgaacatgagaggtgatggttttgttaaagttgaagatttacttaacctgaatttgaaaacttctgcaaatattcagttaaagtcacacacgattgatgaaattagagaggttagtttcatttttttcacttgtttttgtcaacgagcattttcgattggagacgtttttgagatgagtttgtgtatggttttcgttaacttgcaggctgtgagaagggacaataagcaacggtttagtctcatcgatgagaatggagagctcttgattcgcgctaaccaaggccattcgatcacggtaatagaacttgaacaatgaatccttagcatttggctgttttcttcttcgttgagacacagtagcactatgattggatttttgttctcctagttttgatcaatagctttagcttatgtctttgtgcgcagacggttgagtcagagaagttacttaaaccaatactgtcaccagaagaagctccaggtactactaggacacatacttgtaaaattatgttattgttatgtgttactcgagttcatttgaatttctgtaatggcagtgtgtgtacatggaacttataggaagaatttggaatccatcttagcatcgggcttaaagcgtatgaatagaatgcatgttcacttctcttgtggattaccaacagatggtgaagtgattagtggtaatatttgattaatcctattgttgttggtcagacattatttcatatgcatatttatctgattttccatatcgacataatttggctaaggcatgagaagaaatgtaaatgttatcatcttcctcgacatcaagaaagctcttgaaggtatgagaacttaataacttgtctgaaaaaatagtgatatgcccttgaaagattcaatattaaaattccactttattggtgcacccagatgggattgcgttctacatatcagacaacaaagtgattttgactgaaggcattgatggtgtattgcctgtcgattacttccagaagatcgagtcttggcctgatcggcaatccatacctttctgattcatataattcaacatcatgcgaatattgacaggatcctatgccaatgattgtgaggattcttctgatccttgattatgtaatgttgtctcagtgttttcaattgcacatatgacaatttatgaaaactttcaagattatgttgtttcctttgcccaaagacatgagaagtgcagaaataaatcaactgtt

SEQ ID NO: 151682 - DNA, 1314 bp, Arabidopsis thaliana landsberg
actttcgccttcaactccatcaatcctgacctatccggtccaatctccatagccaccatctccgatggttatgaccatgggggtttcgagacagctgactccatcgacgactacctcaaagactttaaaacttccggctcgaaaaccattgcagacatcatccaaaaacaccagactagtgataaccccatcacttgtatcgtctatgatgctttcctgccttgggcacttgacgttgctagagagtttggtttagttgcgactcctttctttacgcagccttgtgctgttaactatgtttattatctttcttacataaacaatggaagcttgcaacttcccattgaggaattgccttttcttgagctccaagatttgccttctttcttctctgtttctggctcttatcctgcttactttgagatggtgcttcaacagttcataaatttcgaaaaagctgatttcgttctcgttaatagcttccaagagttggaactgcatgttagatctctctctatctctttcttacaattcttaaaccatctcttgttcttgtgcatgtactaactgctctttttttgtttacaggagaatgaattgtggtcgaaagcttgtcctgtgttgacaattggtccaactattccatcaatttacttagaccaacgtatcaaatcagacaccggctatgatcttaatctctttgaatcgaaagatgattccttctgcattaactggctcgacacaaggccacaagggtcggtggtgtacgtagcattcggaagcatggctcagctgactaatgtgcagatggaggagcttgcttcagcagtaagcaacttcagcttcctgtgggtggtcagatcttcagaggaggaaaaactcccatcagggtttcttgagacagtgaataaagaaaagagcttggtcttgaaatggagtcctcagcttcaagttctgtcaaacaaagccatcggttgtttcatgactcactgtggctggaactcaaccatggagggtttgagtttaggggttcccatggtggctatgcctcaatggactgatcaaccaatgaatgcaaagtatatacaagatgtatggaaggttggggttcgtgtgaaagcagagaaagaaagtggcatttgcaaaagagaggagattgagtttagcatcaaggaagtgatggaaggagagaagagcaaagagatgaaagagaatgcgggaaaatggagagacttggctgtgaagtcactcagtgaaggaggttctacagatatcaacattaacgaatttgtatcaaaaattcaaatcaaataa

SEQ ID NO: 151683 - DNA, 327 bp, Arabidopsis thaliana landsberg
acgcagcttcaagtctctttatttctatcggtcgcgcgtctctggtgaaactagagctgtttcgaggcaattcaactctcgatctctggagacgaaccagatcgaacatggaagaatcttcttcaaaatcagtggaagatttaccggctgattgaagagaactccaaggaagatggcgtcgaacgcaagggagagtaattaccggaaaggtttggcgatcgggaagacaaatcacgtggaagaagatgagctttcagctttcacagaggagacttggagagtgagaaagatatagaggtgctggtgagtgtgtaaaatcaatgagta

SEQ ID NO: 151684 - DNA, 1485 bp, Arabidopsis thaliana landsberg
atggcagcatcttccggagagaacgatttgcagtgggcattggggaaggcaggagaggatagagtgcaattagctgtttttgagaagcaaggatggctctttgctggaatctacgacggtttcaatggacccgacgcgccggagtttctgatggctaatctctaccgtgctgttcatagtgagttacagggtttgttctgggaattggaggaagaagatgataatccaacagatattagcactagagagttagagcaacaaggtgaatttgaggaccatgtaaacgaaatggcaagttcgagctgtccagcaacagagaaggaagaagaagagatgggaaagagattgacgtcttcattagaggtggttgaagtcaaggagaggaaacggctatgggagcttctggcagaggctcaagcagaagatgcgttagatctttcaggttctgataggtttgcattttcggtggatgatgctatcggtgcaggcaatgctgtgtctgtgggaagtaagagatggttgcttttgtcaaaattgaagcagggtttatctaaacaaggaatttctgggaggaagttgttcccatggaagtctggtgtggaggaaaatgaaacggaggaggtagataatgttggtgtggaagaaggggttgataagagaaggaagagacgaaaggcgggtaccgttgatcatgagttggttctaaaggcaatgtcaaatggtcttgaagccacagagcaagcattcctagagatgactgataaggttctcgaaaccaatcctgagcttgcattgatgggttcgtgcttactggttgcactgatgagagatgatgatgtgtatataatgaacataggggatagtagggctcttgttgcacaatatcaggtagaagaaacgggtgagagtgtggagacagcagaaagagtagaagaaagacgcaatgatttagacagagacgatggaaacaaagagcctttggtcgtggatagtagcgatagtacagtgaacaacgaagctcctttgccgcaaacgaaactggttgccctgcagctaacaacagatcacagcacaagcatcgaggatgtaagtctgaccttgtgaaatctcttcagtgttttttctttgtagactgtagttgcttggtctcttgatctagaatgtacagtctaattgttaagtagttttggaatgctcttgaccatatagttgtttctgcattccccatcatatccgcatttgtaggatactatggatcagatgaagttccttagtttgatcagttctgcttcttgcaatgttcttgttgcatgataatttccattgatgaactcaggaagtaacaagaataaaaaacgagcaccccgatgacaaccattgcatagtgaatgacagggtgaaaggacggcttaaggtgaccagagcgtttggagcgggattcttaaagcaggttagtcaataatatgttcaccttacaatcgaaat

SEQ ID NO: 151685 - DNA, 397 bp, Arabidopsis thaliana landsberg
atggcggatttcaagaatctcctgcagcagaaatcaatcaagtttctagatttcatacatccacagattggtgagaaagcagcagaactagccttgggatcttgcgttatggttctcgttgatggtgtgtatcggatttatataagatacttttggttggtcatgtgggatatgattttaactgtttgtgcttgctacagtttctcagctcgggtcagaacaattcagagtgaattcatcaacaatagccattggatgctggaagggcaaggctagctttaaccttatggtcacaacagtcgattgtcaccaacttatccagaggctttctgatagaagtaaagaaaaagaacaagctgagaactgttcaaagactgctgagacagcttgtagctga

SEQ ID NO: 151686 - DNA, 2215 bp, Arabidopsis thaliana landsberg
tgaaagtaactggaacccggtctctgacccagcttcagcagctgatgctgcggccatgaaatatgtcggggttcttaagatagaagacactgcaaatttactgatcaactgttgcaagccttctaaggatttatctgaacagctggacagtgtgactttagaaaacggttcccaatcttcaggggaggcaaaacaggtaattgttctgattctcatatacactgccatgggttacaagtgtccgctgtcctttgtttaacgatttatgtttgctcatatgatgcagaatgttaaattgattcggattagctactgggtagagaaaatagagtcaggaattcattttgatgggaacattgtacatactgataaccagatgagacgtgctcgttgttggtttccttgtattgatgatgagtaccatcgttgcaggtattcagttttgttaagaagtaacactgtattcatctcctgtcttttgagatcaaagtgggtatcacaacctgtttaacttttttttttaataactttgtggtgggtgcagtttcgatttggaattcactgttccgcacaactttgtggctgttagtgttgggaaattactctaccaggtaagttgtgtaaatctgtcatacatgaatggattagaggaagtgatattttcttcgatcctgtatcttacgtacaagacatattccattatagatctggattgaatggaaaaacttagaaaaagctgtcattcccgtgacttgtggacgtaggcataaaatctgcgtccaaatttggtttcagcttatatatgaaagaagccatatccagtgctgtttaatctgaaagtgtactatctctatttgcaaggaaacttgttcattgttctgtccttatattatcagaagattttgctgttcagtatagttatctaatgaatctggatcaaacagaagaactttttctctgttattgtaggcatataagctaaaactttgttgaataggtttacagtttccatcattcaattttattagtactcttacaaggtggagggggcgtaatctttaaactttcacacttttcaggttatgtgcaaagaagatactactcgaaaaacgtatgtttatgaactagctattcctattgcaccgcggtgggtgtctttagttgcaggaccattggaaatccttccagatcagaccaactttctcatatctaacttgtgtttgccgcatgatctctcgaggcttcgtaatacaatggaatttttccatgaagcttataggtccgtaaatttgtattctggcaacttattgtagtcaaactgaattaaagtataagtcttgtctactggaattcaacttctacagctactatgaggattatttaagtgcgaactttccatttggattctacaagcaagtatttttacctcctgaaatggttgttacttcgtcgacttcgggagcttccttgagtatctttagctcccacatactatatgatgagagggttattgatcaggtattgtttcctggtaaattgacctgtgggtagataataccttcatcagacacatgcacgtaaatggtttgtatatgttaatattaggatggaaggcacaccagacctaatttgtatgatgcatttttgaaaaaagtacaaccaagcacgtgtctgagcatgttaaatatatttctgcattaccacttatgaatattgcaagctgcgttcatcaatttcttgcatttcaccccttcattggcatatggattttggtgtagaagttttcactatgtttataggaagttttctttctttggtggtgtttcgtcatcttattagttcctttatgcaaaaatctgatagagcttcaattatctttgcagacaatagatacacgcattaaacttgcttctgcgttagcaaaacagtggtttggagtttatattactcctgaatcaccaaatgatggtgggcttgtgacatttttctacactttgatttgcgtacgatttgttatatcagcttcatgtgaaaacatgtaattttgtgattcatgattgtccatgttgttataacagattggctccttgatggtcttgctggtttcttaacggatatgtttatcaagcagtttttgggaaataatgaagcacgatatcggagatacaaggtttatacctactactcgagttattcttccctgacgcctctgtaa

SEQ ID NO: 151687 - DNA, 391 bp, Arabidopsis thaliana landsberg
  unsure (1)..(391): unsure at all n locations
cattttctcgggaaaattctccaacgaagcttttctttgcttcttctctaaattaagttttggggtgaagcaaaaaaaaaaattaaattcgttcatactctacaacgaagcttaccacacaaagctncttctactaccttctctttccaaatccatctccgtcttgttctagggtttatcccaatcgatttcagatcatgcacggccttagccgcctaggtaacggcagtagcaacggtagaatcaatattccgtcaccgtcaccaccttcttcgccttggattctgcataccagaggaaaatctctcgccggaggtgtttataagcaaggattaggagagagacttgcgtttttactcttttcgatagnttttagaaagaaaggtgtctt

SEQ ID NO: 151688 - DNA, 604 bp, Arabidopsis thaliana landsberg
aaactacttccgtgtctccctctctgtctacacaacactcttctctattttctttctttctctctatatatattcatatctcttctccattctctcttacttcaaaattcatcacaaagagagataagagagatggagaacggtgagaaagcagctgagactgtcgttgttgggaactatgttgagatggagaaggatggtaaagcttcagacatcaaatctaagctatctgacatgttttggcatggtggctctgcttatgatgcttggttcagctgtgcttccaatcaggtaatagctttctctcagatgaaaatgatgaacaagttttggtttaactatatatttagtctctctgcttatgattctgattcatgaatgtgctattatataggtggcacaagtgctgttgacactgccatactcgttctcacagctggggatgctctcagggattctgtttcagctcttttatggcatcttaggtagttggactgcttacctcatcagtattctctatgttgaatacagaaccagaaaggaaagagagaaagttaacttcagaaaccatgtcattcaggtttctttactgatcttttctatt

SEQ ID NO: 151689 - DNA, 553 bp, Arabidopsis thaliana landsberg
gacaggtcaaagccaagctgggatgacatttgtgcgtttaaagtatttcctttcaaatgccaaacatttctacagttatttgaacttgacgatgagtacattcaacaagagataagaaagcctcccaagcagactacttgtaatgtgagttatcagctaaagcttttgttaatgaagtagattccaaaaaaattagagtcttgcttattacagatcaaacctatacatgcacttgcaaaaaataccactaccaaaacactgcgtcatcaatcacacacaaatgatatattgagtggaaaattgttttatgtgaggtcttggttatctgtactgatttgtttttgttgctagtataaaacaggatggttctctgaagcgctgcttgacaatttgagactccgtgtagctgtgaggtttgtatctgtgtttcctgagccaggtttcgaagacgtttttaaatctattcaagaagagtttgagaggtctgaaaagacacgtattcagaaagatgcactgcaaccaagtcaacggaatcaccaggaaacaactaaag

SEQ ID NO: 151690 - DNA, 2494 bp, Arabidopsis thaliana landsberg
atggcctggcttagccgcgtgagaggagtttcgccggtgacaaggctcgcagcgattcgtcgatcttttggatcagcggccgcgttggagtttgactacgactccgatgacgagtacttgtacggagatgatcgccgcctcgcggaaccgaggcttgggttggatggatcggggccggatagaggagtgcagtgggtgcttatgggagcccctggagcatggaggcacgtcttcgccgagaggctctccaaactgcttgaagttcctcacatttccatggggtcccttgtccgtcaagaactcaaccctagatcttctctctacaaggaggtgctactcttgtcttctctctaaatttgcattgattccctaagaccttctccttagaaaagccatctttgaaaatgtttaaatacattacctttttatgttcttagttgttagtgttgattattttgattcataagatgtttgattagagttagttgtctagattatgatcacctaatgggaattcttgctgtttatagagtttgattccaagtgtgctttaatgattcatttaatgttgttgactaatccacataacttagcctaataggtaatgaaaggaacttgtaaagagagaacataacatttgttccggtttatggttgttgaactaatcaaaatttctggtggtatagattgcaagtgctgtaaatgaacgaaagctggttccaaagagtgttgtgtttgcgttgctatcaaagaggctcgaagaaggctatgcaagaggggaaactggtttcattcttcatggcattcctcgcactcgttttcaagccgttagtttcttttcatatatatttactgacaacagtcttttttttttttaatgtgggaagctcttattacatactaacatttaatagagatcctcaattgaattgtgttttagtgattcttcaagttgttctgaatgttttgcaggaaactcttgatcaaatcgctcagattgaccttgtcgtcaatctcaaaggctctgaagaccatctggtaaaccggaatgctctcaatgaaacagctctgcctcagcaggagttcctcggctctatgttacactcacctgttgcaatcaatgctcggagggagagtgtcggtgtctacgcacaggaggtacttttctgatcaatgtctttgttatatatctagtttacaaggtggtttcagctgaaaatcttgtggtggtgattcaatcaggtggaagaatactataggaagcagaggaaactgctagactttcatgttggcggtgccacatcagcagacacatggcagggcttgttggcagctttacatctgaagcaggtgaatttgacgacttcacagaagctaactctgtgatgatgaactacaaaacagagctttgctttataaattttgatctttctctctcattttatgggtcttcttaacccctaatatgcaactttttttttgttttctttttctgtaattcaaagttttgcgagagatcaaacgtgatgaggatgataccactaaagcttgtaatgagtctattatatatacaacaaagattttccatctatgaaaaatagttcctatatcacaacaagacgtgcatgatttgcttcacttgcaacaatctagcgcacgtctctgcaatacatgtcaatctgcgtgttattcaaattgtatatatgtcaagctcaaacttcagtactgttactactgtcttcattctatacatggcggcaacaccaaaagtatcataatctccttgtgaacctgacacaagcctaactggttccatcgcagaggatactttggttctgatcttcttcttgaaggtttcccctgactggttggtatacatttcgaatgatacataagtgttgataaactacaagtacacaaaatatgaaacaaaatctatgcacatcaataaaaattcactctgaaaacgcagaaaattcgtaagtgtttattattgttttcaatatatgagaggaggagcttccctactatttttatttttttagccaatgagagagctccacttcatactccacttttatcaatgactcgattttacggccactctcacccatgtcgcgttgagcgcgtgtctacgatttttaaaggggttaatccacaaaaatcattccttttttgatccacgcacctcattctcaaaaatccatcgcgtgtcttatttcttttggttttcttctctaaaccaaaagtaaaccgaaccgagatcaatttgaattttcaaaaccaatgtaaaccaatcgctgtgaaaacaaaaagctcggccactgtaacaacaaaaatggagacgacacaacttggaagagaaatcaactcgaaatagccaagagaatgttcgaaaacccctcaaatccgatgcttcctttgattccagcctccaaaagcccatctgctcaaatcttcatttcgaggacgaggactcgaggagtattacaag

SEQ ID NO: 151691 - DNA, 104 bp, Arabidopsis thaliana landsberg
cttatattatagagaaaaagagctttttcccggaaagttgttctcatcttggaaaatcaaatctcggaaacgcagtcttcagctaaatacatgagcaacgagta

SEQ ID NO: 151692 - DNA, 366 bp, Arabidopsis thaliana landsberg
tccgaattcaaatcccttggaacgctaatcgccaattctctagtcctcctttagatttccctcgctttatcagagcttcttcttcctcaacctcacaggttctcattcctcctctttcttttccgtcttttcttctctctttctctttttggttttgaaaatttccgtgtttttgtgtcaccagaaaccgaaaacttacgaaggtccgaaaccgagcaagaatttagtagctgatttcatttcccaaaacgatgacttggttcgaagcttaccgatctacgtcggaggcgcttctctcttggccgttctctttaatcggactgtttccggtatcgctcctgttgctgatgctagcaggtaattgca

SEQ ID NO: 151693 - DNA, 374 bp, Arabidopsis thaliana landsberg
ttcttagttctactgagacgttagaagaattgtggctgttgtcgactgcaaggagagcgcttactttaattgctgatttcatgagacgagatggctttctttaggaactactcaaacgatactgtgtcacataatgttcttgatgaaaatgaggagcggcaaaatgctgctacttttcagagttcacctttgaatgaagatgtggatggtacttatagtgaaagaggcttttgacatgaacatggacgtacagtatcaaagtgacccagaaccaggatgtagtattaggcagccaaatgagacagcagttaataatgaaactgatcctgtggattcccattatcaatcttcgacaaagagattgggtgtaactg

SEQ ID NO: 151694 - DNA, 519 bp, Arabidopsis thaliana landsberg
gtctagaaggttttagagaaagcaacactttacttccatttgttaagcttattgacacttttgacgcacaattcattgctatcgcaaacgacgagacattgtttactttcttaaccaacaaagatgccccaaagtacaaagtagttcgggttgacttgaaggaaccgagcagttggactgatgttatcgctgaacatgaaaaggatgttctctcaacagcttctgcagttaatggagaccaactggttgttagctacatgagtgatgtaaaacacatcctgcagattagggacttgaaatccggttccttgcttcatggattacctgtagatattggctcggtatgtggagtttttgctcggcgtaaagacaccacgtttttctttaggttcacaagcttccttacacctggcgtcatctacatatgtgacttatcccatgaagctccagaagtaatggtatttcgtgaaatcggtgtacctggattcgatagaactgcatttcaagtcactcaagtat

SEQ ID NO: 151695 - DNA, 539 bp, Arabidopsis thaliana landsberg
cgggttctgcatgaatatcgtttagaaggcaaatattctattgaaaatcttccccaggcagctaaggtaataacatttatagattttgtgtgtttctgtcttttgttttttttggggacttgaaattaattcttttgtttggttgtttgtgaatgtagaacgaatgggttatatgtcgtgttttccaaaaacgtgccgatggtacaaaggttccaatgtcaatgcttgatccacacattaaccgaatggaaccagccggtttaccttcgttaatggattgttctcaacgagactccttcaccggttcgtcgtctcacgtgacctgcttctccgaccaagaaaccgaagacaaaagacttgtccacgagtccaaagacggttttggttctctgttttactcggatcctctgtttttacaagacaattattcgctaatgaagctgttgcttgacggtcaagaaactcaattctccggcaaacctttcgacggtcgtgattcgtccggtacagaagaattggattgcgtttggaatttctga

SEQ ID NO: 151696 - DNA, 487 bp, Arabidopsis thaliana landsberg
gctctccgggcttttaatgtagaagccgcaagagccatgaatgttgcatctgatcccaaaatcggcttgatgcggttactttggtggcaagaagcaattgacaagctctacaccaaaaggcccataaaccatccagctgcacaagctctgtcttgggcaatatcagaacataacatcagtaaaccttggctaaaacgctcagttgacgctagaatccgagatgcccaaagagaagtagacgatataccagagagcattgcggagctagagaaatacgcagaagacacagtttccactcttctgtacaatacactccaagcaggcggaattagttcaacaacagctgatcatgcagcttcacacattggtaaagccagtggtcttgtcttgctgcttaaatcattaccgtaccactgtaccagaaaccgtcaccagagttacatccctgcagatctcgctgagaagcacgggttgctcgtgaaacaag

SEQ ID NO: 151697 - DNA, 379 bp, Arabidopsis thaliana landsberg
gtgccaacaacaaaccaaaaccgttcctttctttttccatttttcttgttctttttgttttggttttggagttgtgtttcacctgttgttggttctttagttcgtcttctgggttaaacaaagaagatcggctctgtttttatttttattttgaaacaagaagaagaaagcaagctacgatgatgtttcttgctgacgccaatagataaagacacgacttttacaaagcttaggacctgcattctcaccgtaattagctcttcttctcaatttctccaaataaatatgcgtgtttttaatgtgtgtgttgcaggttatcataaatgtcgaatctttctgcaagaacaggacgagaccatcaacgttatgacaacaactt

SEQ ID NO: 151698 - DNA, 1827 bp, Arabidopsis thaliana landsberg
catagtgatcaaaagtacgtaaaatcggaaatgacgaacgcagaagcagtaacggtgaccaacaagcaaatcatattcccagactatgttactggatttccaaaagaatctgatcttaaaataaccacaactaccattgatctaaggcttccggagggatccacctcagtactggtgaagaatctttacttgtcttgcgatccttacatgcgtatttgcatgggaaagcccgatcccttgtcttcttcccttgttccaccttacaagaccggcgtggtatgaacaagggacaatacatatatttccattgttctctgaaaattagaaatctccattgaaattggaatcaacttatgtcaccatggtgtttattgcattggttatatacatcttaataatgttttggaaccaatgatggattttaaaatttatatctcgtttaagaaatattattatccgtgtgtatgacagtatgtagggttgtctcgtatgaatttaattttcgataatgctgctaagaatacaacaagagattctaatatgaaacggatgtgcatgttagacaattaatattcattacggataaattgttttaattgcaacatttctggtgaatattgtgttctcgaagaaattatacctctagcaaaattgaacatttcttcgggatattttgttcttgtatacttcgtgttaaagatgttgtctatgcagccaatcattgggcttggagtgtctaaagtgattgattcaggacatccagattacaaaaagggagacttactttggggactagttggatgggaggagtacagtgttattactttaactacttactcacacttcaaaatcgaacataccgatgttccattatcttactacactggacttcttggtataatatcttattcctctctaattagtttggtagtgaaaaaagcttggctatgtgatgtttttttctctatatatttatcacgcttagtttggtaatgtttttaactgtttcatttgatcggaacaggtattccgggtatgactgcgtatgctgggttttacgagatatgttctccgaagaaaggagagactgtttttgtgtcagctgcatctggcgcagtaggtcagcttgtgggacaatttgcgaagatggtgggatgctatgtcgttggaagcgctagcagtaaagagaaggtgagatgatggacaatttgtatccttttatttcttggttttccttcaggagaatgacttgcccaattacttcctttttcgggatttgctaggttgatcttctgaagaccaagtttgggtttgatgatgcatttaactacaaggaagaaccagaccttagtgctgccctcaaaaggttcagtatactttgagaatgtaggaggcaaaatgtgatatagagatctgattcaaaactatgatatcttttttctcaccaggtgtttcccggaaggaatcgacatatactttgagaatgtaggaggcaaaatgctagacgcagtgctcctgaacatgaaactacacggccgtatcgcagtatgtggtatgatctcacagtacaaccttgaggaccaagaaggtgtacacaacctagcaaacgtgatctacaagcggattcggattaaagggttcgtggtctctgattacttcgacaaacacttaaagttcctggattttgtgcttccgtatataagagaagggaagataacgtatgttgaggatgtagttgaaggacttgagaacggaccttcagctttgctaggactattccatggtaagaacgtcggcaaacagctcatagtggttgctcgtgaatga

SEQ ID NO: 151699 - DNA, 844 bp, Arabidopsis thaliana landsberg
gtggtgttaaagggcggcgcagccaaattcgaataagggacgtttaaagaggaacattgtttcgggaaaagaagctaccgggatatcactttctcgaggacgtaatttctgtcttacttgtaaaaggaatcaagctggaatcagaagagcattacctagtgcctttgtggatagaactgcatttagtttgtcgaggtcgagtttgacatcttctctggtaagtaagctacatcatttactttctatgttcttgtcttgtgcttgtttggattatctctgtttaactgactcaacatgtgcagaggaaacattctcagagtgtgaatgcaactgttggaccagatgagccacatgctgctggtacagcttggcctgatggtatggttgcggagagacaagatctcgacttattgcctcctgagattgatagtgcagagctagaagcgtttcttggttgtgaacttccttctcatcccaagttgcaccgggggcaattgaaaaatgggcttcgatatcttattttgccgaacaaagttccaccgaacaggtaaattgagtagaatgctcgaagttggtctacttgtgatactcttaatgacaatatatcattccttgaaaaccagtaagcaaaatggttatagcttaaccatatggtggaatcctttaaggtcttcctgctatatcttatttctgttttgaaatgttttcaatgctagatttgaggcacacatggaagttcatgtaggatcgattgatgaggaagaagatgagcaagggattgctcatatgatagaacatgttgctctccttgggagcaagaaacgtgagaaacttctaggttcag

SEQ ID NO: 151700 - DNA, 515 bp, Arabidopsis thaliana landsberg
atgaacgtgttcgaaaagcgtttagaccaccgtccagtccattcccgttggttcaatcttgataagtacggtaccggagttcttgagccagacgcaagaagaaaagaacataagttctcgagccggattcacctacgaatctgtcttgaaggaggctaccatgtgatggacgagtcaacaatgtacattagcgacacaagacctacagctagacagttatggaagcagccggttggaatgttagagattgggattcttggagcaaatgggttggtgccaatgaagttaaaagacggtagaggaagcactaacgcttattgtgttgctaagtatggtcaaaaatgggtgagaaccagaaccattcttgacacattaagtcctagatggaacgagcagtacacatgggaagtatatgatccttgtactgtcattactctcggagttttcgacaatagtcatttgggctctgcacaatccggaactgcagattctagagatgcaagaatcggaaaggt

SEQ ID NO: 151701 - DNA, 614 bp, Arabidopsis thaliana landsberg
gatcttctctgcaattctctctcctgatggccacgtgcgccgtcctgtgcggtgccagatcgatgcttcgagctgcttgctcacgcagcgccgctgcttctactggccgcttcgcctctcaagcgaaatccgctccaccattgtttagagccactgccagaagaagcccactgctttctcctctccggttagtctctctcatacccatttccttatttgagctcatttcacagttttgtgctacttgaagcttgaaatgggtttaattcgatcgaattgtgaaaaaaaaagaaggaacttgtctatgtaaaaattacatttttgcgttaatcatgtttccagatcgattattcacaagtaaaaaagatgaaattttgcattttgatgttgattttaaatgtgaaactctcttatcacattacttaaaagaatttgcatttttgtttgtttttgatgtgatgatagaaatcctgtggaactgagcttctgtgtggagtcattgttaccatatcactcggctacagcttcagcgctaatgacttcaaagctttctatctctggccacacccatggctggctctttgacggggctttctcacatcctgcaatcttgg

SEQ ID NO: 151702 - DNA, 571 bp, Arabidopsis thaliana landsberg
ggtaaacccaccaaccagggagtgacccagctcaaattcaaggtaagaaaaagatctgttgctgaggaacgtgcgggtcgcaaactgggaggccttagggttgttaactcctactggctcaatgaggtatgcatcacactgtttttagttactagttgctatgccatcctgtaaatgtgttaatagtatggaatcaagtgagtaatggtttggttctctggttttctcaggactctacctacaagtactacgagattatccttgtagaccctgcacacaatgccgtccgaaatgatccaaggatcaactggatctgcaaccctgtgcacaagcacagagaactcagaggtctcacctccgaaggaaagaagaatcgtggtcttcgtggaaagggtcacaacaaccacaagaacagaccttcccgcagggcaacctggaagaagaacaacagtatctctctccgtcgttaccggtgatcagttttatgttttgttttttctcgaactggtatatcttcagggtggattgtgtttcggaaaaacaaaaccccaccctgggtatggatagactt

SEQ ID NO: 151703 - DNA, 1255 bp, Arabidopsis thaliana landsberg
atgcaagtctgccgttagacgtttcagaaagatggagaaagatgttgaagatgcttgctccactggtataaatttagctaatatctttctctcttagttggggattatcaaacacattctggctctcaatctttgattgtcttcagcaaaagacccgaggaaagaatcattggcaaaagaattggaagaggaagaaaacattctgagacaatctgttgagaaacttaaatctgttgaagaaagtaggacatctctcgtaaatcatcttagggaagcgctacgggaacaggtaaaggtcttgcaatcttgcaagttcaataatttgctcagacatttcaattacttactgagttttgtgtatcaggaatctgaattggagaatcttcaatctcagatacaggtaaaaatctgaattggtttaataatccctttacgcctgggaactattttgcaatcttgagtacaagaaaactgtatttctgcatcaaaattgattgtgtgtctgtctttgttcttattcatcaggtagcacaagaacaaaccgaagaagcccaaaacatgcagaaacggctcaataacgaaacaccggttaacaataacaacggaacatctggtcaatcagcgaaaatcactcctgcctcaatcgctgcaatggcggaaatgctaacctcatcaacaaactcatcaatgattatgcattctgtcctctcttcatttgcagccgaagctacacaaacttctggtctaaccaaatcaaacacctcagacacaaatgcatttgttgttcctccaaatcctcagcagtatcacataataccaaatccagccgcatcacaacagtttccttatggatttggtaacattccattaatgccacctggagcactgccgccaccgccgcctggaacgttgccgccgcatatgatgaataataacaaccaaccaaatgcagctcagcaacaagcgcaacaaggtcagagttttcatccaccgggtatgatgtattttggacctccacaccattcttaaggttagtaaaaacaaaccaaaaaatccaattagttctagtattagatagtttctgacccactttattttatttcatgtaacgcatattgtagaaagtagaaacgagatcttttgtcttacaaatcttgtaccttgagctgtttagtcaatttttcttctttgtaacatagttagacttctattgtgtatctgcgttacatttatatctagtatgcgtttgtttcaa

SEQ ID NO: 151704 - DNA, 551 bp, Arabidopsis thaliana landsberg
atgaacaagttctaccaggtaatgacacaatctgcttgcttggataactgataactaagctttcttgtttagttggaaactgatttgtttcatgcattggttaggcacaaggagcttatgagcaataccaaaacaacatggcacagatggaagatggtaatcacgacatggagagtgattcagtagtagatggtgataaatctgaaaaaaatatgcagcagctaaaccaatctccagacatagacggtgaattatcgaaggaggtggttggaatggaggtggacaataatggatttagcagtgagaatggaaaggctgatgagaagaattaggacaaaacaaactgggaatttcaaagttatcctttcgggagggtgataagtgagttgatgtttgaaacatggattttttttgctactgtaagataattttactgcatttgagtaaattctggtaagtgatacatgacatgaggaaaaaaatagcattgtctgaccttcctcaccgactttttgtaacttctatttgagtattcaagcttgtttatcctt

SEQ ID NO: 151705 - DNA, 416 bp, Arabidopsis thaliana landsberg
gatgaacaaaaatacaaaccaaataatcaaatgaaaaagcgacaaggagtgaaagcagcaaggttggtgatgtgtttccctcaacttcccttgaagaatatgcaaacaagtccggaagagttagcgggattattggtcatggtagtgtgcctgatcatgcccatgatgatgctagtggacctgaatcagatgaggatgacaatgttggtgatgatgagcatgatttgcgcgaagacagtgatgaaaatgagcaatctcaactgcagaaataaactcatgtttggttgtactactgtcaatttggtaggattgtgagattttgcaagactgtttattcctgttgttttgataaaacttttacttggtcacctgcaatgcaagactagcaaagaatactataaattttgttctgtttt

SEQ ID NO: 151706 - DNA, 2582 bp, Arabidopsis thaliana landsberg
cttcatatatatcgcatatggtgataaccaatagaagagagaagaaacagaggcgatggctgtaaacgcggtcaggagctgagaaacagaagagaacaaatagaacatgagaagcaaactgcaagagctcataactgggatcatcaaggcctgagagctatctagtgttatggatgcttcagagaagtcacggtttctctccatctctttcccgtagttaagtgcacggaaagcggatgcaaatgtcacggtgacagctgtgacaatgagagtagctggagcaggttctagcaaatacaaaagagtccacagagtctccatgataagaaaagagttctttcggattatataaatatcccccaagcctcgtacgcataaaagcaaatatgtgaaatgcctttaggagttgcaataagtttccaacagatgtgaacctgtaaaataaaaaatcacaccaacaaacctcatgtaagccaccttaaaaccaaaaagattaagtttttacgaactttacagaacaagggacatcaagaaagataatagttcacaagacatggttactaagctactaagtacatgtttggcacaaaaattcagacctcaagctaaagttgagttctttaagaaaaagggtaaatttaaaattgtttataaccagattgaagttaaggaaactcagttatccaagtgtgtgtctacattttaataacaaacccagaaatcaaaaattaagttggtatttcaatcaatgactcaatttcgaggaatttgttgtactcaacggacacaaaactttgagaactggtaaattcgatcaagaaattaattatacttctcagcaacaattaatgtgggaatcaagcaatatctaaggtgaagaaaaaaaacgtaaagattgcagaaaccaattgacgtaaaaattagatcaagacggaaaagaagagaagcgaagtgtgtcacctgagaaaccctaacgacggaggagagacagtggtggaaacggagaattgggatctaggtttcagtcgcgacgttggatcctctgtcgcatatcagtctctccgactaaaggaccaaacgtttctataatattgaaactattaattaattacagtgtatcgtaaattaaacgataacgtattgtaatgcgagtcaaaacgacaacgtatttaagacgaagttacagcatcaccaaatcacaacataaccgtacttcttaaaaatcggaccacttctaatttgaatttgaatgaaccacaaatcataaaaatttcaactggctgtagccggtacatgaaagtacttacagatccgaatttacgggctatagccggtatatgaaagtacttacagatccgcatttacgggctatagccggttaacttcaatctgtccaaaggggaacagcaacacatgcttttgaaaaaccctaattttcaaaattcgaactttacgctcttctctcttcttcttcaacttcccaccttcgtttgaataatctcattgccgttattctctctagctcttcccatttccaggattcttcgatatgggagcatctcacagtcatgaagatctagagatctgttcctcagatgaagatgaatatgaagaatatgaagaaggaagagagggagaggaagaggaagagacgtttcaggactcgcgggatgatacgttaggtatatcttcctccggtggtcgtcgtctccggcctaaatctccttcatcatcactcgacgacgttgaggcaaaactccaagccctgaagctgaaatacccatcgacgcaatcagccccgtctactcagaactcagctcggcttttccgctacatcaatggcaacactcccaaagccaaatgggtcacagctgagaaactgactgcttattgtttcgtcaagactaacaaaggagatgaagatgatgaagacgacgattagaacggagatgtggaaaacgaatggtggattttgaaagtcggaagcaagatccgtgaaaaggtatcagatgaaatgcaattgaaagcttataaagatcaacgccgtgttgatttcgttgctaaagctgtttgggctatgaaattcgccagcagtgaagatttttcggtttttgtaagcagctataacaattgcttgtttgagaacaatcatggtgttgagtttaatgaggctaacaaggcaaaaatctatgggaaagatttcattgggtgggctaatccagaagctgctgatgattccatgtgggaagatgctgatgatattttgcttcaaagcccaggaggaggatctgcaactccggctagagatacacaggatttgactgaggcttttgaagaagctacaagtgagggcatacatagcttagctctaggtgctttagataatagctttctagttggagattctggtattcaggttttcaagaacatgagacaggggattcaagggaaaggtgtttgtgttaactttgagcctggttatggtcgaactcattcttcagcaccgaagaaggctcttctcatgagagctgagactaatatgctgctcatgagtcctatgagccaaacgcctcattcacgag

SEQ ID NO: 151707 - DNA, 1132 bp, Arabidopsis thaliana landsberg
gaagatcaagaaaactactgcacgaaagcaatcgcaacctataacggagttcaccacgatggaacgattaactacggtggatactccgaccatatcgtcgtcgatgaacgttacgctgtcaaaattccacacacattgcctctagtttcggccgcacctttgctttgtgcaggtaattcaaatcaaatatggctatatatttaaaaccaaaaaaaaagtgtggtagttgttaagattatcgatatttacaaattacaaacatgaaaaaaaaaaaaaaaaaaaaagaagaaattatctacgtttctatcaatttttacttttcatctgatgatcatgaatatgatttcaattaatataccgtttgtaacgtaacatataggcatctcgatgtacagtcctatgaagtacttcggattgaccggaccggataaacatgtcggaatcgtggggctaggtggtcttggacacattggtgtgagatttgctaaagcatttgggacaaaagtcacggtggttagttcgaccactgggaaatctaaggatgctcttgacactcttggagctgatggattcttggttagtactgatgaagaccaaatgaaggtacgtaatcttaaaccattcattaattatgcgaataaaacgtaaaaaacgttatcaggtttcaactttatttaggctgcaatgggaactatggatggcataattgatacagtttctgcatcgcattcgatttcacctttgattggactactcaaatccaacggtaaacttgttctactcggtgcaacggagaagccatttgatatatctgcattttccttaatattgggtatgcatatataaccctacgtaatagaacgttatattagtctttcacatctagactatgtatcgagtatgatgaaaccatgatgcgacaggacgaaaatcgatagcgggaagtggtattggaggaatgcaagagacacaagagatgattgactttgcggcagagcatggcataaaagcagaaattgagatcatatccatggattatgtgaacaccgccatggatagacttgccaaaggggatgttagatatcgatttgtcattgacatttctaatacattggctgctactcgatcttaa

SEQ ID NO: 151708 - DNA, 647 bp, Arabidopsis thaliana landsberg
actttatttctttgatgcttcagaagcaagtgtcacaatttcagaaaccgggtcagataagagtaatattcaggtaaagtcctgctgcagaaggtaataatttgtttgttcaactgtcatatttgtaattatcttgctgaaaatggctgtgacattacagaatggtacatctgaagttacattgaataaggcagaagctaagagtggaaatgtaagtagaattccttttccaatttattatcaacgcttgagaccttgtgtgacttttatatatacacttcagatgacggtaaaaacccttatggaagtctatgaaggctgcatcactcatttacgaaagtcccaaggaaccagacgggtcaactctctgaagagaataactccagcaaattttacaagaggggtaaagtattttcgtacatgatctaaacttagtaaagttaatgagagaatgctggaataacgaaatcttttgacaatgcatctaacagacgcgtacaagagttcctaaagaggtcattcagcagatcaaatcgcttaacaacctcgatgtggagctctacaaatatgcaaaagtaatctttgccaaagaacatgaattagtgtcgaataagttgatctcaagtgtaagaaacttcttgtcttca

SEQ ID NO: 151709 - DNA, 2123 bp, Arabidopsis thaliana landsberg
cgcacatcaaatattcctactttttcatgctaagattttgatttattgttaaatcacttatatttaaatgattcctgcatttcgagctcgtctaatggaattcatgtttggaatcgatgtctcgacatacgtttttttgttcgattagacgtaaagagctcagctttcgccttttggcattcaaatttgtttactgagtggatatatatggtttgataaatttaagctaaatatgaatcttaaagctttatattcttcgggtttgattttagctcttttattagcaatctgaagttttttgtttgagttattgataaaatttttatgttattatctatgaactctctgattctgagtctattgataagtaacaatctttgtcctttactctctctccacagatagtagcaaaaacaagtgaagcacaatggggatcatcgaaaggattaaagaaatcgaggccgagatggctcggactcagaagaataaagctacaggttctctttttacatagagaacattcagttataggcatgggacttatcagtttcatgttgctcatccttagtagacgaaattagataacaaacattacgaattaaacagattgcgagcctttacaacacattatagacacttaagccaattttccaaataatcactatgacaagtttctggtccccttcttctgatcttacatttgctaattgataatgttctgtttgtgaacagagtatcatcttggtcagctcaaggcaaagattgcaaaactcaggacacaactgttggagcctccaaaagtaatgcaagctctttataaaatactaaaccattagcctatgcgcttatatttctatatagctgagtgattcttgaagcttgtttgtttcctttcttactcggtttatagttttccttgctggtgtgttgctgtatgtttactactaagatagacgatgagtaactactgttttcgtcaccttagcttatctatttagggctataatctatttaagattttcctgctgctttgatctgaagtagaatttcaaacatttttcattactgctttcagtttgtaattgtcttccgaattcctttaacagggtgctagtggaggcggggaaggttttgaagttaccaagtatggtcatggacgtgttgcacttataggatttcctaggtaaaggcatagatacttatactcacaagatccaattacaaattatttcctgttttataaaattatgttgctccttaagaagttgctggcataagtttagggaaactgatggaaatggttgtactttgcagtgtcggaaagtccacgcttttgactatgttaactggaacacattctgaagcagcctcatatgaatttacaacacttacatgcatccctggtgtaattcactacaacgacacaaagattcagcttctcgatcttcctgggattattgaaggtgcttcggaaggaaaggggcgaggaaggcaggttgaaatccaattgctttcttttcttgttggttatctgatttctttttggatgcccaagttcgcctatcagaaaaagataatcaagaggatatgaactttcgttatgactgcttatttctcaggttattgctgttgcaaagtcttccgaccttgtattgatggttcttgatgcctcaaaagtgagttacggtttatatgtccacgtgaattggtatatggttgtcatgctctacttgtttattaagctttgtatttgcttgtttaaatttgttagagcgaaggccacaggcaaatattgactaaggaacttgaggcagtgggcttgcgactaaacaaaactcctccgcaggtaaagcttgtcttatcagcagtatcaaattatagatgtgtcatgtaatacgctgaagtctaaactccttcaggtttacttgttatgctccattcagaaacttgggttcgtgtggaatttgtttatgtatatttggtttgttctgcccaacagatatactttaaaaagaaaaagactggtggaatctctttcaacactacagcacccttgactcacattgatgagaagctctgttatcaaatcctgcatgaatacaagattcacaatgctgaggtac

SEQ ID NO: 151710 - DNA, 5556 bp, Arabidopsis thaliana landsberg
  unsure (1)..(5556): unsure at all n locations
atgcagttccggcaatttgctaataagattggaaatcttgagcgtccatttcttaaagaattttttcagcgatgggttgcatcttatggttgtcccgtgctaaggtattttttttctaattaagagttacgttcttctgaacttagttcaatggattcctggatcttcatttaatcttatctcgatgttcttactggtgctttattaaactaggattgggttgtcttacaacaaaaggaaaaacaatgttgaaatggctgctctgcgagaatgcacggctgcactggatgcaagattatcagttataggggctacttctgattcagaaagccgggatgtggatgctggctggccgggtattatgagtataagggtttatgaacttgatggaatgtctgatcatccaaagttgcctatggctggagatagatggcagctactggaattaccatgtcattctaaacttgctgctaaacgctatcaaaaaccaaagaagggagggaaacctgatggggctgaagacaatgttgatgctatagcaccgttagaaaataaaacgaggtgggtttctgtggtacactatttctggcattcctggtctgtttacataccttgcaacaacacaagaaagagaactgagactctgagagattgaatctttctctgtagcattgaatctcccttggcttggattaaagctgaccctgagatggaatatattgctgagattcaccttcatcagcccctacaaatgtgggtaagagatcttctctgacacatcttgaaaatctatggtgcacatcacagtcgttatttctttcgctttctacatggttggttcgtgacaagaagctcatgaactagtttacttaggtattatctaactgagtctttctgtgtgttttctgtgtgttgtgctcttacttctagacatctcaaaatcctacattggttacagttcatgtttaatcgtttctcacacttgtgggtttcnnnnnnnnnnnnnnnnnnnnnnnnnntagagaaggacggagatgttgttgctcaggcacaagcaattgcgtcacttgaagccttaaaacaacactccttttccattgtgaatgcactcaaaaatgtcctcactgactccaaggtttagtccgtctcttgtgtactttttctctaaaaccagtttgaagatgaagttcttgtctccaaaatattattgtgacatataggtcttctggagaatacgtattggggcagcgtttgcattggctaaaacagcatcagaggtatgataaaaattgttcaatcttatgttccaaagggacaagacgtataataatcaaatttgtaacttgatttaagtgcatagtatgaaggttagcaaaaggcattgattcaaaagtataagattaggaaccttatatgtgcaaattgttatgtttttagaggaatagaaccagctgaaatttcaccatttacaagaaaacttgtgggaaaagaattccattcattcaggtgagaaaaatgataagggaacaaatttaataggaaactttgcatttactacattgcagaagtaatgagtggaaaaaaaattcctctgatctcaacattcctttcatcaatcttccattcatcttaattttcatttatttctagcatgttaccagattttatttgtttctcttttgagattttcatgagtgtatgtctattggttttaactgcgtagtatgccatctttcaacttatttttgtaaactgcactttctaaaggcctgcactccttttcgtgacctttgaaacaggtcttactgcaattgttgatttaagctcatttttgtttctagcaggagtctgactgggcgggtttgcaacatctaataaagttttataagagtagaagatttgatgcagagattggactccccaagtgagattggagccttttaatttttggacctctctttggtaaccagcagaagatttctcataaaactgatattctcctttcaggccgaatgacttccgcgatttcccagaatattttgtgcttgaggtaggaaatgagcttgatatagtgtcacgcattgatctcagatgttagctggagatgctatgacgtgtcctttcgatatgacagaaactgtgtctgctctacttagcatataagttgggtatctccttaaaagtttaggctactaattaatatgtcatggtaaaatagataaaagaatgaatgttgagccaacaaagaacataatagaaaataacgagcataaggacacaaatatccagaagcttccttgtgtattcagctttttaggaaaattcgttatgcagtgagggtgtgatttcttgtttctctcttcttagcctgctttcctctgggggtttccattgttattcccctgcctgaaactatggtttgtaacagtttaactcttttgtttcactcggttagcgccagtggttctttggttattgttgagttaaattcatttcttctcttgaactttgaacatttcgtctcttgaatgttttatctaaactattgttattttctacgtcttaggccattccacatgccattgcaatagttaggggtgctgaggggaaaagccctagagaagctgttgaatttatcttacagcttctgaaggtatacatctctattgggtaaattttgtgaaacctttgttgcctactgatatagcctttttataaaagctgttagtctttattcgctgcagtgatttctttcatctatgaaagattaggtgtttcgcttgttttcagtccatattatcatcttaactgatctcgccctttttttcctattccattttatagtacaatgacaacagtgggaattcgtattctgatgtattctggcttgctgtgcttgttcagtcagttggtgatctcgaattctgtcagcaggtctgtgatcttgtaaaagacactctatgatttatctgttgtagcgtaatatttatttttgtcttttcctactgacgctattaggagtaaaaaccccttgaatttggtacatagaaaagacaagatttggtacttagctcatgtattatatagctatcaaaattttgaggcttcattggtttatttagctttatggaggtctcatacttttatggaaaaaaaaacgatttggtctcatacttttatgacaaaaaataaagattcctattattcagttcatatgcaaagatgtggattttagaacttcaatataccagctttgctacatggttaatggttaattgctcaatacttcttgcctctttgtttccctggcagagtctaacgtttttggcccctcttctgaagcgcattgacagactcttgcagtttgacaggtaccctcatgtttgatgttaatgatttgataggttttaacagaacttattactgagagcttgttggagataaatgtactaggttgatgccaagctacaatggcatcttgacaattagctgcatccgaacattggcacagactgctctcaagctttctgattccatcagtttcgtaagttctttcctttcgcttttttcttccaattgctccttatgagatagataccagcggtgattaaaagcttgcaatttactgacttcaggatcacatctgtaaacttattgaacctttccggaattcggatacaatattgcaaattcgtatagaaggaagtagggcacttcttgacatcgagtaccaatccaaaggcataagttccgcacttttgttgtttatgaaatatttggtagaagaatcatctttgagaggttggttatattctcatgctggaacatacagctttctatttctaatagagttcatttattgcttttatatctttggcccttgattacagggcaggtaaaattgtgtgtacacacaatgcggttatgtcaaatagcagttggatgtgactcagacgattgtgtcgacactgttactcttctggatttgctgcatctattcaagagccatgtagtatttaacaatgaacttcttcgctactacttgttctgcatttttcaaatcctcgctggaaggtctgtagtttacttccttcagtggattttgtttggaatccagttgttctatttgagcctagagggttatttttctctgttttcttctgcttatcaacataattatccacattctgaacagaatatacttattgttgtctcattttcagacccccaacgttgttcggagttcccaaagaaaaacctttgcagcttgttgatgtggaggcctgcattgaaccgaaaaatgtatttttggttcccggagcagaggcaggggagccttcactttcggcacttggagatgccaaaggacaatcgctggatgttgctccttatggtgttccaataataccacaggaaatgttcatgcctattgttcctgaactgatgttgccagaacctgttgcagcgtatgatgagacacagcatcttgaacctcgcatggaaagtcaaaaccaaccttcacatgaaaatcccatcgttcatgagattccatcagatgttgaaggtccaacagaagaattagctcatagggaagcaaaccctccaacaaaggaacctcaaaaagaacctgatgtggtttctgtgtctgttagtcatgaggtgaagaagtctgttatacggatcaaggtcagaccatctggggcaaccagcagagcggaaggatcagcacgaactatagaaagatctcaagggattgtggtacgccatgatatagaccgaggtcaaactagttcagcttcagtggacgccccacagagaatctcaactgacgctgtgagcataagcaatcagaatcacgtggaggaagtaaattcgtgtcacgatgttggttctcgcatgactgcaagcatcggcagtgtaaaatttgcaagcgaaggcgatatttttgggaaagagttgcaatgcactgctgagtctgggaaaccttcgacaagccagaaagcagataataacaaccgaactgtaccacctagcttcttaccactagaccacagtatggaaaacgaggtgcagcagaaatacgcgagcctccaaacactttcgattggtaaagaaaaggaaaagaagaaagacaaggaaaagaaagagaagaagaggaaaagagaagatcccgtttatctagagaagaaacggttaaagaaagagaagaaacgaaaggagaaggaaatggcgaagctcgtgagcagcactacggatccagctaaaaagaagatagagagtgttgcggaggttaaagaagaagaaccaagtgatggtgccatgttgattaaggttgaaccaaagactgaaccatcaacagcagaagctagaccgcttcccaaattccgaatcaaactgaaaagcaaagcgttcaacaactcataaggttagatccgagccagtccctccccgccaaaatctgagtagtaacttttatttccaaaagctttgttgttacaacttgcaaggtgttgtgattatatgtcaatgtaatctgtttattcaatgcgctttagc

SEQ ID NO: 151711 - DNA, 360 bp, Arabidopsis thaliana landsberg
gtctgtcagatcctgaatgttctgaacttttgcgggaagcagactactatcagcttcttgtacgctaagtttctctcttaccttactattctcgtttttgtttttcatttcttagctagtaactggagttttactttctgtggagtacagaaataatttgtgttggagatgtaatacattgcattctcttcctatttcagggactgaaagatggaataaaagattcgagaaaagaagttggtgaagtagaagctgaattaacgcgtatagatatcatcaaatgtatacaaaccgaaagagtcaggttccgaggagttaatctttctggaatcgatctttctaaactggtaatatttctta
